United States Patent Application Publication US 2005/0287570 A1 - sequence listing, part 2

SEQ ID NO: 1948 - DNA, 1418 bp, Rattus norvegicus
cttctagaagtgtgtgtcgtttttgagctctcgccacaaatgtgcatagccctttgtggtggctacctctgacctaattgtgtatgtatggaccaagcaggatcagaccagcctctcaggtaggaggggtgcctggaagatcggaagcgacctgcaaacacaatgtacttccccctggtgtcccgcaagtgcgccagtacgtccgccaggtctcgaaggctgccatcaacggccagatcaacctggagttgtatgcctcgtgcgtctatcggcccatgtctggttattttgacggggatgatgtggccctgaagagctttgccaaatactttctccatcaatctcatgaagagagggarcwtgctgagaaactgatgaagctgcagaaccwgcagrtgadwygacatsttyctkygattmagaaacctgaccgygatgactgggagarmgrgctgaatgcartgdrgtgtgcactgcacttggaaaagagtgtgaatcagtcactactggaacttcacaaactggctactgacaagaatgatccccacktrwgtatcakwrasacggggtgagtggagatgatttgccacagggcttgggagagctgaccagtaaccctgtcccatgttctctttcctagttatgtgacttcattgagacgcattacctgaatgagcaggtgaaatccattaaagaactgggtgaccacgtgaccaacttacgcaagatgggagcccctgaatctggcatggcagaatatctctttgacaagcacaccctgggacacggtgatgagagctaagctgacgtccccaaggccatgtgactttactggctcactgaggcagtgcatgcatgtcaggctgcctttatcttttctataagttgcaccaaaacatctgcttaaaagttctttaatttgtaccatttcttcaaataaagaattttggtacccagctcttgttgtgattgaggatgagcgcaccagcttcccttgcgtcggctatwtwwyywywytkywwygcctgaaagaatatttattaaactcgtagttggggaaagatagtgaaagacaggtgtgttcagacaggactaagcagtcctggttctgagttacctgccagactgccatgggaacatattcttgagtgtcgctgctgtgtgcctctgactgggtcagtgccctgctggcatccatgcaggtgagaaccaagctgtgaagcatcacttataggaaacaggattggtgtcagctttatcactgtgggagattggagagtattcatagcatgagttgactgaggacaaagttggaagctggccttaacagaagtttatctagcactagaagcaagttggaaatttttgcccttctacttaaaaagatgttctggtcacggatgaaatgggatgtgaaa

SEQ ID NO: 1949 - DNA, 3221 bp, Rattus norvegicus
tcctgggctccattgtgtgtgctgtgcccccccgacttggcctcggagtcctcctctataaaacagtcccctgaggaggggtgacctgcgtgccactggcaggcgaggcaccacaagagccagagacgggtaacagacctggggaccaaagaacctgcaactgaaagaggttgagacgtgccggacccccagctttcgtgggcggagcttcgaaggggcggggccccgtggggcggatcctgagtgggggcgggaccggggccggcacctgggtgaggtcgcgcagtcccgcccccctcgcacttccgtccagaattcmggggcggcggccgcggggatcccgcgagcggcccctgaacatctacccttcttgccgggacccgggaggtccccactggcctccgggcccgtcctgatcagactcgtgtcgacctccccgtccacgcgcatccgggagagccgcgccacgagacggacccgggcccgccgggacccctggtgtctggccctgcgtcgagaggctggtgactgccacccataagctccagcttcagcctcggcttactcccctcaggggcttgcaggctgaggcctgccctcggacgcggctgaccagcctctccctctcttccacactttggacttctctttggacctcctaaaaaggctccatcatggcaccgttcctgcgcatctccttcaattcctatgagctgggctccctgcaggcggaggacgacgcaagccagcctttctgtgccgtgaagatgaaggaggcactcaccacagaccgagggaagactctggtacagaagaagcccaccatgtaccctgagtggaagtcaacattcgacgcccacatctatgaaggccgtgtcatccagatcgtgctgatgcgggcagctgaagaccccatgtcggaggtgaccgtgggcgtgtcagtgctggctgagcgctgcaagaagaacaacggcaaggctgagttctggctggacctgcagcctcaggccaaggtgctgatgtgtgtgcagtatttcctgkaggmtgkrgattgcaaacagtccatgcgtagtgaggaggaggccatgttcccaactatgaaccgccgtggagccattaaacaggccaagattcactacatcaagaaccacgagttcatcgccaccttctttgggcagcccaccttctgttctgtgtgcaaagagtttgtctggkgmstcaacaagcaaggctacaaatgcaggcaatgcaacgctgccatccataagaaatgcatcgacaagattatcggccgctgcactggcactgctaccaatagccgggacaccatcttccagaaagaacgcttcaacatcgacatgcctcaccgattcaaggtctataactacatgagccccaccttctgtgaccactgtggcactttgctctggggattggtgaaacagggattaaagtgtgaagactgcggcatgaatgtgcaccacaaatgccgggagaaggtggccaacctgtgtggtatcaaccaaaagctcttggctgaggccttgaaccaagtgacccagaaagcttcccggaagccagagacaccagagactgtcggaatataccagggattcgagaagaagacagctgtctctgggaatgacatcccagacaacaacgggacctatggcaagatctgggaggggagcaaccggtgccgccttgagaacttcaccttccagaaagtacttggcwaagkcmgctytggyaaggtactgcttgcagaactgaagggcaaggaaaggtactttgcaatcaagtacctgaagaaggacgtggtgttgatcgacgatgacgtggagtgcaccatggtggagaagcgggtgctggcgctcgcctgggagaatcccttcctcacccatctcatctgtaccttccagaccaaggwccwcctcttctttgtgatggagttcctcaatgggggcgatctgatgttccacattcaggacaaaggccgcttcgaactctaccgggctacgttttatgcagctgagatcatctgcggactgcagtttctacatggcaaaggcatcatttacagggacctcaagctagacaatgtaatgctggacaaggatggccacatcaagattgctgacttcgggatgtgcaaagagaatatatttggggagaaccgggccagcacattctgcggcactcctgactacatcgcccctgagatcctgcagggcctgaagtactcattttccgtggactggtggtcttttggggtcctcctctatgagatgctcattggccagtcccccttccatggtgatgatgaggacgagctctttgagtccatccgggtggacacaccacactacccgcgctggatcaccaaggagtccaaggacmyyrtggagmagctcttcgagagggaccctgccaagaggctgggagtaacaggaaacatcaggcttcacccctttttcaagactatcaactggaacctgctggagaagcggaaggtggagccgccctttaagcccaaagtgrwatsyccttcagactacagcaactttgacccagagttcctgaatgagaaaccccaactttccttcagtgacaagaacctcatcgactctatggaccagacagccttcaagggcttctcctttgtgaaccccaaatatgagcaattcctggaatagtgagctcccagacctgcttttaatgccccggcagagtaggcccatctgccctggtttgcatcckcactgcccatgaagaagagtgggtgactggtgattcctgctgctgccccctcttcctcggagagtctggctcctgttggctgggctcacagtacttcctctgtgaactgtttgtgaatttgccttccttttgccatcggagggaaactgtaaatcctgtgtgtcattacttgaatgtagttattraaatatatattatatatatgcacatatatataataggctgtatatattgctcagtatagaaagcatgtaggagactggtratgtgttgacctttttttaaaaaaaaccatatgtatacgtgtgtatgtatacatctacacacgtatacatatatgtatgtatgtatgtatgtatgtatgtatatatgaccaaaagaaaagagagcacaagctacctgaaccacaggattgtttatgtgtgtataaataaacactgaatggtmmmaaaccggaattc

SEQ ID NO: 1950 - DNA, 3075 bp, Rattus norvegicus
gaattccggaatccggcgaggaaatacatgcactcgctgagaatcgccggcgccaggacgcagcgccacaaggtgtagcgagtgagtggggtggggcaagaggggacccaggagtccccccaggctcccagcgcgcctgctcctgctcttcaatcctgccctcggggcggacggagtgacccccgccccgaccatggtagtgttcaatggccttcttaagatcaaaatctgcgaggccgtgagcttgaagcccacagcctggtcgctgcgccatgcggtgggaccccggccccagacgttccttctggacccctacattgcccttaacgtggacgactcgcgcatcggccaaacagccaccaagcagaagaccaacagtccggcctggcacgatgagttcgtcactgatgtgtgcaatgggcgcaagatcgagctggctgtctttcacgatgctcctatcggctacgacgacttcgtggccaactgcaccatccagttcgaggagctgctgcagaatgggagccgtcacttcgaggactggattgatctggagccagaaggaaaagtctacgtgatcatcgatctctcgggatcatcgggcgaagcccctaaagacaatgaagaacgagtgtttagggagcggatgcggccaaggaagcgccaaggggctgtcaggcgcagggtccaccaggtcaatggccacaagttcatggccacctacttgcggcagcccacctactgctcccactgtagggatttcatctggggtgtcataggaaaacagggatatcaatgtcaagtttgtacctgcgtcgtccacaaacgatgccatgagctcattattacgaagtgcgctgggctaaagaaacaggaaacccctgacgaggtgggctcccaacgcttcagcgtcaacatgccccacaagttcgggatccacaactacaaggtccccacgttctgtgaccactgtggctccctgctctggggcctcttgcggcagggcctgcagtgtaaagtctgcaaaatgaatgttcaccgtcgatgcgagaccaacgtggctcccaattgtggggtggacgccagaggaattgccaaggtgctggccgatcttggcgttactccagacaaaatcaccaacagtggccagagaaggaaaaagctcgctgctggtgctgagtccccacagccggcttctggaaactccccatcagaagacgaccgatccaagtcagcgcccacctccccttgtgaccaggaactaaaagaacttgaaaacaacatccggaaggccttgtcatttgacaaccgaggagaggagcaccgagcctcgtcgtctactgatggccagctggcaagccctggcgagaacggtgaagtccggcaaggccaggccaagcgcttgggcctggatgagttcaacttcatcaaggtgttaggcaaaggcagctttggcaaggtcatgctggccgagctcaagggtaaggatgaagtctatgctgtgaaggtcttaaagaaggacgtcatcctgcaggatgacracgtggactgcacgatgacagagaagaggattttggctctggcgcggaaacacccttatctaacccaactctattgctgcttccagaccaaggaccgsctcttcttcgtcatggaatatgtaaacggtggagacctcatgttccagattcagcggtcccgaaaattcgatgagcctcgttccgggttctatgctgccgaggtcacatctgctctcatgtttctccaccaacatggagtgatctacagggatttgaaactggacaacatccttctagatgcagaaggtcactscaagctggctgactttgggatgtgcaaggaagggattctgaatggcgtgacaactaccaccttctgtgggactcctgactacatagctccagagatcctgcaggagttggagtacggcccctcagtggactggtgggccctgggcgtgctgatgtacgagatgatggccgggcagcccccctttgaagctgacaacgaggacgacttgtttgaatccatccttcacgatgacgttctctaccctgtctggcttagcaaggaggctgtcagcatcctgaaagctttcatgaccaagaacccgcacaagcgcctgggctgcgtggcagcacagaacggggaagatgccatcaagcaacatccattcttcaaggagattgactgggtactgctggagcagaagaaaatgaagccccccttcaagccgagaattaaaaccaagagagatgtcaataactttgaccaagactttacccgggaagagccaatacttacacttgtggatgaagcaatcgtgaakywgatcaaccwggaagaattcaaaggcttctcctactttggtgaagacctgatgccctgagaaactgcttcacatggagttagctcactgcaaggagggtgttgagacaatcccgtgttgcagaggctcagaatgyctcgaastattcgtcctccccagagccccagtcccacatctgctctcttatttattgcatcccctcatcccaggccctgtccttccccaccctcccagtgaccagaaggccctctttggtccagactcaccaagatcacagattygaactgcgtctgctctgtgtgcagtgctaggtctggagtagccgtccacccacaaccctgaagcagcyysgarttcttttattacaaagaaaaaaaacccacgaaaactctggctgtgcccactggacatggmatcttgactcctcccttctctcattcctcctggcccgccattcctgcccggctacctaagagaagagaccagagtttcttccacaagggctggtgccccgaggcacgcccttcatgggargatcctggggatgctcargctgtccaactgtggcggtttgctctggaattgcacattcctscttgctttggwtttagctttttttgagcatgccmaagttgtgtgcgtttgtatmtcatggamgmmmtcgytttgattttgaactcttaacatttaaaatargaaaaaaaaararraaraaaaaaaaaaaaaaa

SEQ ID NO: 1951 - DNA, 1645 bp, Rattus norvegicus
cggtttttgatcatcctgagaaaaatgagccttggcctccagacctagtgaagtaacctctttctcatggagaacagtgctggctcctgaggatctggagggcctgcagccccagagggattagccagaagcaggcgtggttcctgctctgcacagtggctctcctgtctggaccattcattatgattcataccaacttgaagaaaaagttcagcctcttcatcctggtctttctcctgttcgcagtcatctgtgtttggaagaaagggagcgactatgaggcccttacactgcaagccaaggaattccagatgcccaagagccaggagaaagtggccatggggtctgcttcccaggttgtgttctcaaacagcaagcaagaccctaaggaagacattccaatcctcagttaccacagggtcacagccaaggtcaaaccacagccttccttccaggtgtgggacaaggactccacatactcaaaacttaaccccaggctgctgaagatctggagaaactatctgaacatgaacaaatataaagtatcctacaagggaccggggccaggagtcaagttcagcgtagaagcactgcgttgccaccttcgagaccatgtgaacgtgtctatgatagaggccacagattttcccttcaacaccactgagtgggagggttacctgcccaaggagaactttagaaccaaggttgggccttggcaaaggtgtgccgtcgtctcttctgcaggatctctgaaaaactcccagcttggtcgagagattgataatcatgatgcagttctgaggtttaatggggcccctaccgacaacttccaacaggatgtgggctcaaaaactaccattcgcctaatgaactctcagttagtcaccacagaaaagcgcttcctcaaggacagtttgtacaccgaaggaatcctaattgtatgggacccatccgtgtatcatgcagatatcccaaagtggtatcagaaaccagactacaatttcttcgaaacctataagagttaccgaaggctgaaccccagccagccattttatatcctcaagccccagatgccatgggaactgtgggacatcattcaggaaatctctgcagatctgattcagccaaatcccccatcctccggcatgctgggtatcatcatcatgatgacgctgtgtgaccaggtagatatttacgagttcctcccatccaagcgcaagacggacgtgtgctattatcaccaaaagttctttgacagcgcttgcacgatgggtgcctacgacccgctcctcttcgagaagaatatggtgaagcatctcaatgagggaacagatgaagacatttatttgtttgggaaagccaccctttctggcttccggaacattcgttgttgagtacctagccaggcacccttatccttctccatacgtcattttatggctactctcctggttaccgctgcttgaaggagtgtttttattcaacaggcccagcctgcttcctgcgctctagggaattttgttggcaagagttctggggcctccagcctgcctccctggggccaccgaggatgggagtccagattcttgccacactcattcctcctagacagcgtcctctcctccttctgcatgggtagggaaag

SEQ ID NO: 1952 - DNA, 240 bp, Rattus norvegicus
ggagcagcccactcccttcctacctcggttcctgcagcgctactgctcctggattacccgccggacaggatctctcttttccttcacaacaacgaggtgtaccacgagcctcacattgcagatgctggccacagtccaggaccacttctcagctgtaaagctagtggggccagaggaggcctgagctcaggggaggccagggacatggccatggatagctgtcggcagaacccgagtgtg

SEQ ID NO: 1953 - DNA, 5217 bp, Rattus norvegicus
tgcgttcccgcttgtgtcgctgacccagcgcgcaaagttgggcagggagctgggggaggaggaccgcgagcgagggtggcggagcaggggcgggaggagcggagggaggaggggaccggagcgtgtcactcgcgcgctccctctgtgcacagaggatgtgctgaatggtgcgcttccaggcggcggccgcccggagccccgatgagcccagatggctggggctcagcccggagtgcacgccttgcaactcaagcccgtgtgcgtgtccgacagcctcaagaagggcaccaaattcgtcaagtgggatgatgactccactatagttactccaattattttgaggaccgatcctcagggatttttcttttactggacagatcagaataaggagacggagctgttagatctcagcctcgtcaaggatgccaggtgtgggaagcacgccaaagctcccaaggaccccaagttacgtgaacttctggatgttgggaacatcggacacttggaacagcgcatgataactgtggtgtatgggccagacctggtgaatatctcccacctgaatcttgtggcttttcaagaggaagtggccaaggaatggacaaatgaggttttcagtttggcaacaaacctgctggctcagaacatgtccagggacgcatttctggagaaagcatatactaagctcaagcttcaggtgaccccagaagggcgcattcctcttaaaaacatctatcgactgttttcggcagaccggaagcgagtggaaactgcgctagaggcttgtagtcttccatcgtcaaggaacgattccatccctcaagaggactttactccagatgtatacagagttttcctgaacaatctttgtccccgacctgaaattgataacatcttctctgaatttggtgccaaaagcaaaccgtaccttactgttgatcagatgatggattttatcaaccttaagcagagagatccccggctgaatgaaatactttacccacctctgaagcaagagcaggtccaagtgttgattgagaagtacgagcccaacagcagcctcgccaagaaagggcagatgtcagtggatggattcatgcgctacctgagcggagaagaaaatggagtcgtttcacctgagaaactggatttgaacgaagacatgtctcagcccctgtctcactatttcatcaattcctcacacaacacctacctcacagctggccagttggctgggaactcgtctgtagagatgtatcgccaggtgcttctgtctggatgtcgctgtgtggagctggactgctggaagggcaggaccgctgaggaagagcctgtcatcacccatggattcaccatgacaacagaaatatccttcaaggaagtcatagaagccatcgcagagtgtgcgttcaagacttctccttttcccatcctcctttcctttgagaaccatgtggattccccgaagcaacaagccaagatggccgagtattgccgattaatctttggtgatgccctccttatggagccactggaaaaatacccactggaatctggggtacctcttccaagccctatggatttaatgtataaaatcttggtgaaaaacaagaagaagtcacacaagtcgtcagagggaagtggtaaaaagaagctctctgagcaagcttccaacacgtacagcgactcttccagcrtgttcgagccttcgtctccgggagctggggaagcagatacggagagtgatgacgatgacgacgatgatgactgtaaaaagtcttccatggatgaggggactgctggcagcgaggccatggccacagaagagatgtctaacctggtgaactatattcagcctgtcaagtttgagtcctttgaaacttcaaaaaaaaraaawaaaagctttgaaatgtcttccttcgtggaaaccaaaggactcgaacaactcacgaagtctccagttgaatttgtcgaatacaacaagatgcagcttagcaggatatatcccaaaggaacacgcgtggactcatccaactacatgcctcagctcttctggaatgctggctgtcagatggtggcgctcaacttccagacagtggatctagctatgcagataaacatgggcatgtacgaatacaatgggaagagtggctacaggctgaagccagagttcatgaggaggccagacaagcattttgatccatttactgaaggaatcgtagatgggatagtggccaacactttatctgttaagattatttcaggtcagtttctctctgataagaaagttgggacttatgtggaagtggatatgtttggtttgcctgtggacacaagaaggaaggcatttaaaaccaagacatcccaaggaaatgctgtaaatcctgtctgggaagaagagccaattgtattcaaaaaggtagttctgccttctctggcctgtttaaggatagcagcatatgaggaaggaggcaaatttattggccaccggatcttgcctgtgcaagcaattcggccaggctatcactacatctgcctgcggaatgagaggaaccagcccctgatgctgccagctgtctttgtctacatagaagtcaaagactatgtcccagacacgtatgcagatgtaattgaagcattatcaaacccaatccgatatgtcaatctgatggaacagagagctaagcagttggctgcattgacactggaggatgaagaggaagtcaagaaggaggctgaccccggggaaacgtcatccgaggctccaagtgaaaccaggacaactccagcagagaatggggtgaatcacaccgcaacccttgcacccaagccaccttcccaggctccacacagccagcctgctccagggtctgtgaaggcacccgccaaaacagaggatctgattcagagcgtgttaacagaagtagaggcgcagaccattgaagagctcaagcaacagaaatcgttcgtgaaacttcaaaagaagcactacaaagaaatgaaagacctggtcaagagacaccacaagaaaaccaccgagctcatcaaggagcataccaccaagtacaatgagattcagaatgactacttgagaaggagggcagccttggaaaagtccgccaaaaaggatagcaagaagaaatctgaacccagcagcccagatcatggctcatccgccattgagcaagacctcgcggccctggatgcagaaatgactcagaagttgatagacttgaaagacaagcaacaacagcagctgcttaatcttcggcaagagcagtattacagtgagaagtaccagaagcgggagcacattaaattgctcattcagaagttgacagatgttgctgaagagtgtcagaacaatcagttgaagaagctgaaggaaatctgcgagaaagagaagaaggaattaaagaagaaaatggataagaagaggcaggagaagataacagaagccaagtccaaagacaaaagccagatggaagaggagaagacagagatgatccgatcatacatccaggaggtggtgcagtacatcaagaggttagaggaagcacaaagtaaaagacaagaaaaacttgtggaaaaacacaaggagatccgccagcagatcctggatgagaagcccaagctgcagatggagctggagcaagaataccaagacaagttcaaaagactgcccctggagattctggagtttgtacaggaagccatgaaagggaaggttagtgaggacagcaatcacggctctgcccctccctcgctggcctcagaccctgctaaggtgaacctcaagtctccctccagtgaggaggtacaaggagagaacgcgggaagagagtttgatactcctctgtgatgtccctgccgggcctaccagacatgcacggctgcttgaactccatcggactctaaagacaaagatcactgcccgggccatcttcctgagaaacatcccttagcctgaaatccacaccaaagggagagttccagaaggatccgtgtgaaggtcccataccctggtcccttgtgtcatgtggaaactattgtggtcttagagagaagggtgcatgtatgcaggatttttcttttcgttccaatagtaaattaaaagcaggcagctccaggctccatggactatgtaatgaaggacaatgtcttctttgaagaaaactagagctcgtgtcttcgtttgaagccctggtgtacagtatttccaagtaaaagagagagtttgagaagtgcgcggcaccatttaacactctggaacattccactctgagcattgtttccctgactgccccgcaaacccatgttttcaagttaacgtgtatagtgcattgtttcaccctttgctttgcaggcactggtggcttgccatttgctaatttatttatcccagaggcatctgtatttgctattgacatggctttattagataccatagtgactcatataagctggtttcttttataaaaaaaatcacatgactgtatcatttcccagtgaagccattttacgattagcaatatgggttgtatatttggctgcacgtctttggatatctatcggttgttgacctgaggctatcaaacagctgcaatgggtttgttctgttgagtcagggtttccgccagactgaacaggatccagtgggctattttattgtcagatattttttcgtggttcatttatttttactgtagaaaggaagatagaatatttatctaaatgcacatgtataaatgatatacattatctccatgtatatagtacatgtatgcacccagccatataagtgcacacacatacatacgcatgagtgtacatgtgtgtttattaattggcagtgacccaaatctcttccataagatttaaaagcaagttcagggatacatggacagagaagaaatgggtcgaatatatgttatgtggataattaaattatacggaaatgctaagaatcagtttatggagtcaatgatgcaacttgaggtaatcttagaatttagaaaatgagtttactaaaaaaattggaggatcaaaaattggattttaagtatcagattttgagcttgttttaatggtcagtgtatgcaaaaatgcataggaaatagagtgcaaatgtattactactatcttcaataaattttaactgaataatttcaattttatactgatagaaataaagctctggttgtatttaaaaaaaaa

SEQ ID NO: 1954 - DNA, 797 bp, Rattus norvegicus
ttggttttagataattcaggaggatatcctcgatcatggcaatgagaaaactgagaaggaagaagtgataaagagaaaaatcccttatattctgaaacggcagctctatgagaataaacccagaaggccctacatactcaagagggcctcctactactactgagaagttaattcttgacatgtgattctcatcctttacctgttatctggatacacatgatgcttatctagatatataattatatgtgtgtatgaatgtatgccagaacttgattattttaccttttccacaattgtgctttcttggatgggattttcctgccattcatgcaagctggamgcaatgttttcaaataaagatctcgagcatgatgtgttctgtatcattgggatagataataattttcatcatatgtagaatgttctgtgattttgcaaggtatgtaatgggtcatataagcagtcatggcatttagcactttatgggaaattataagagattataacaaaattgagcacacacaattaacccaaagcagaacaatggcaccattttgattatttgatggctttattattaactgaacaaaatatacatgctttccataaactgctagctcatctctcagtacaaaggaaagttactatcatataaagacccatctggaagacttgttaatgaaacatcattctttatgctgatctcagtgtatctttacgtggatattttgcctgtcaaatgaactgatagctaataaatgtcaacaatcatcataatctaawrmwwwawwrmaaaa

SEQ ID NO: 1955 - DNA, 2312 bp, Rattus norvegicus
agcagtgccagtgagggtccggggccccagagggaggctgccagggacagctctgagcaggcccagtccagaaggaccgagaccatcagccgtggacgctcaggacactccactgggagagcccacgaagaccgccacgagcaggcaacagaccggtctgccggctccgggtccaggggaggccaggccggctcccacagtgagagcgaggcctccggtggtcaggccggccgcagaggcactgcagccaccaggcacacatctcgccccgaacagtctccagacactgctggccggaccggatccagccgtggacagcagtccgcccaacgacatggtgactcaaccccgggcagcacaagaaccggctccagaggaagaggagagtccccagctggccagcagtcccccgacagagccaggcacatcgaatccaggaggggtagaacccgggaggccagcgccagccagtccagtgacagcgaaggccattctggagcccatgccgggatcgggcaagggcagacctcaaccattcacaggagggcaggctccagctcagggagccagcgggcctctgctggtggccaagcagctgacacctccagtcgctcaggggccagtcaaggccaggcatcaggccagggtcgtgcagggtcccgaagcagggaagctcagggcatcgctcgtcatgggcagtcgacagacagccacaggcactctggggccgggcaagcacaagcccacacagccacaagcattgacagcaggaggcctcgcgggtccagcgagagtcaggccagcgacagcgagggccactccgactactcagaagcacacacacagggagcccacggtgggatccaaacaagccagaggcacgagcagcgaccctcccgaggccagcagggctccggacacccccaggtgtactactatggtgtagaagaaaccgaggacgagtccgatgcccagcaggggcaccagcagcagcagcagcagcagcggcagcagcagcggcagcggcagcagcacgaacaagaacgagaacatgaacagcagcagccagagtccagccagaggcagcaggggtccagtgggagaacgcaacgtgcagctcgccatgaacaggatagcgacagcaccaggcaacggggctctcaccaggcgcacagctccgctcgcacccaggaggagatcgcacgcggaaggtctggagccactgcaagtgagggtccggggccccagagggaggctgccagggacagctctgagcacgcccagtccagaaggaccgagaccagcagccgtggacgctcaggacactccactgggagagcccacgaagaccgccaccagcaggcaacagaccgctctgcccgctccgggtccaggggaggccaggccggctcccacagtgagagcgaggcctccggtggtcaggccggccgcagaggcactgcagccaccaggcacacatctcgccccgaacagtctccagacactgctggccggaccggatccagccgtggacagcagtccgcccaacgacatggtgactcaaccccgggcagcacaagaaccggctccagaggaagaggagagtccccagctggccagcagtcccccgacagagccaggcacatcgaatccaggaggggtagaacccgggaggccagcgccagccagtccagtgacagcgaaggccattctggagcccatgccgggatcgggcaagggcagacctcaaccactcacaggagggcaggctccagctcagggagccagcaggcctctgttgaaggttctgatggctatgattctgttgttaaatctaaatatcttagttttagtcaatcatattgctattattattaacaatgagagcagtttgcaacaattaattgctgaaatataacctcacatagggattgttcattttagtatttgggtttttggttccttattctccttaattcatatcaggtatttccttttcctttatagttcctttactctatcatattttgagcctaaatcgcttaggatcaggaatttaaattttaaactcatcttgtttcctatcacagttctttctttcgtctttaaaatgtttaaattggttcactgaagactagacacaattttacccaaaaattttaaaatactcaaaaatttataatgagtcttttgtatgcataatgccctgcctgcactatgaatttatcatgtctatcctttgtactttcttcttcactcattctttcccattggacatttctgataaaccaaattaaaattgtctaataaat

SEQ ID NO: 1956 - DNA, 686 bp, Rattus norvegicus
  misc_feature (19)..(19): n is a, c, g, or t
  misc_feature (34)..(34): n is a, c, g, or t
  misc_feature (44)..(44): n is a, c, g, or t
  misc_feature (85)..(85): n is a, c, g, or t
  misc_feature (161)..(161): n is a, c, g, or t
  misc_feature (209)..(209): n is a, c, g, or t
taaggtcaatggtacagtntgtcaggtgaagcantgcacaaatntgtagattataattcctaggcacataggagcagataagganaattcatacaccctcttctgtctaagctcaaggaccctttacacactactgccaggactgctactgaaagatcaanattctgatcttcctttttctctatcctgcagaccaacccaaggctacnctcaggtcaccctgttcccaccttcctctgaagagctcaagactgacaaggctacactggtgtgtatggtgacagatttctaccctggtgttatgacagtggtctggaaggcagatggtacccctatcactcagggtgtggagactacccagcctttcaaacagacaacagtacatggctaccagctacctgcttttgacagccacagcattggagactcatagcaattacagctgccaggtcactcacgaagagaacactgtggagaagagtttgtcccgtgctgagtgttcctaggtcatctgactttcatcttacccacagagacttggatcagaaacatgtccaagtgtacctatactgcttttgcctaccatagcccttctccctattctcaaaatgcacaataaaatgtctattcacaacctctaattctcctctacttcatttgttttagtgtatgtgaaactggaattc

SEQ ID NO: 1957 - DNA, 1047 bp, Rattus norvegicus
tctcttatgctccagtaggtgcaccactgcctctgccaatggtctgttctaatgaactcatggagataacaacaacagcaacaacagtagtaacagtaaaggagggtatgatgttactaggaaaaacagtgagcagatcttggggatctaacattggacataatggtgagtgtgaataagaccaaaatacattgaacacatatataaaaattgaaagaaaaagtaaaaattattgctaaaagaagtgttcagtaggtaatttgctatgtaatatttgaaggaaaatagaatatagggtgcagaagctgggctaatcactgaagaataaaggctttaggaaataaatatttgcaaaggtgctttgagtctttgaagcaaccacccatacatgtagcagaacaattattcatttcagtgtgttgtttgtttctatagatgattactgctcactttgaaaggggatcctttgagctgtgacggagacagtgatgtcatcacaaggccactctccaccttaagagatacagagctcctggagacttcagcctgagtttctcaagcttgtgtggattttctatgagtaaagccactgcttcatcttgccatggccaccaggttcctttgctacctggtcctttgtttcttgagagcaggtgagtttccagagataaagaatcttcagcttttgatcattgcttgtcatggttacaattacgttctttattctctattctgtttctttttagaaccaacaaatgctggtgtcatccaaacacctagacacaaggtgacagggaagggacaagaagtaactctgagatgtgagccaatttcaggacattctgctgttttctggtacagacagagcactgtgaagggactggaactcctgatttactttaacaaccaagctcctatagatgattcagggatgcccaaggaacgattctcagctcagatgcccaatcagaggctctccactctgaagatccagaccacacacccccaggactctgcagtgtatctgtgtgccagcagcttagacac

SEQ ID NO: 1958 - DNA, 914 bp, Rattus norvegicus
  misc_feature (26)..(26): n is a, c, g, or t
gcgtaccccgccatgttctccttggngctgcgggccagggcgtccggcctcaccgctcagtggggaagacatgcaaggaatttgcataagacagcagtgcaaaatggtgctggaggagccttatttgtgcatagagatactcctgagaataacccagatactccatttgatttcacaccagaaaactacgagaggatagaggcaatagtcagaaactacccggaagggcacagagcagcagctgtgcttccagtgctggacctggcccaaaggcagaatgggtggctgcctatctctgccatgaacaaggtggcagaagttttacaagtgcctccaatgagagtctatgaagtggcgactttttacacaatgtacaatcgaaagccagttgggaagtaccacattcasgwbtgcactactacrccttgcatgcttcgagactytgacagcatcctggrgacccttcagagaaagctgggaataaaagttggagagactacgcctgacaagcttttcactcttatagaagtagaatgtttaggggcctgtgtaaacgcaccgatggttcaaataaacgrcgactactacgaggatctgacacccaaggatwttgaagagattattgatgaactcagagctgggaaagttccaaaaccagggccaaggagtggccgcttctgttgtgagccagccggaggccttacttctttgaytgaaccacccaaaggacctggctttggtgtgcmagcaggcctttaacttacattcaactgtaaaaatgtcactggagaaataaaatwtgaacstrstaaawaraaaaawaaaaaactatagtctgcgcggccgcaagcttattccctttagtgagggttaattttagcttggcactggccgtcgttttacaacgtcgtgac

SEQ ID NO: 1959 - DNA, 740 bp, Rattus norvegicus
gaagtcctgcaagcatgtacagcatgcagctcgcatcctgtgttgcactgacgcttgtcctccttgtcaacagcgcacccacttcaagccctgcaaaggaaacacagcagcacctggagcagctgttgctggacttacaggtgctcctgagagggatcgataattacaagaatctgaaactccccatgatgctcacgtttaaattttacttgcccaagcaggccacagaattgaaacatcttcagtgcctggaaaatgaactcggagctctgcagcgtgtgttggatttgactcaaagcaaaagctttcacttggaagacgctggaaatttcatcagcaatatcagagtaactgttgtaaaactaaagggctctgaaaacaaatttgagtgccaattcgatgatgagccagcaactgtggtggaatttctgaggagatggatagccatctgtcaaagcatcatctcaacaatgactcagtaattatgtgcctcctacttataacacacaaggctttttatttatttaaatatttaactttatatttattttggatgtattgtttactatcttttgtaactactagtcttcagatgataaatatggatctttaaagattctttttgtaagccccaagggctcaaaaatgttttaaactatttatctgaaattatttattatattgaattgttaaatgtgtatgtagattcattaataaaagtatttagaagagtcgatgaa

SEQ ID NO: 1960 - DNA, 4507 bp, Rattus norvegicus
aagcttcagtacaaaaaaaaaacaaaaaaaacaaaaaaaaaaacagagagagggttgctatttctttttctttttctttttctttttcttttttccggagctggggaccgaacccagggccttgcgcttggtaggcaagccgtctaccactgaggccacatccccagcctcgagggttgctatttctaagaggataggagatatttattaataaggaaaacaaaactggtattttatttacttaatataagaacattactgtcactagaaaggaaagttatagatagaccctgcaagatattttcaagtccctctaaggtattggaaagtttcccattgatcacactagtccctaattcatgttcagaaacacagcagcacacacaaaactcaaacgaacaaacaaaacccctaaacgaagcacaaaaccagagtgccagaatattttgcaatggattttctgggcaaaggggatggtaagattgaaagtctatgtttctactcagattgcttctgattatggaactgatccagccatcacgtctcttcttaatactctggatatcttcctgctgcctgtcaccaatcccgatggatatgtgttctcccaaaccaccgtaagacactcaattattttattttgttgtttgtgtggtttttatgtccacaggacttaagacagcagggacaggaaaaccaaaccaaagtaattttcgttcttcttgatttactccaagcagaagtcctactctcagcagtggccacggggaatgtttataatcgcttcttattccgaccctcgatgtctatatatgtcagctcagccagagcctgtttcagctcttgtgctgggttattcaagtgctgggcttgcagtgagtcacctaggagatttgttccaattatctttgagattgtgtatgtgtgtgtgtgtgtagtgtgcgtgtgagtctgatggaaagaggaggcagatattacctgctgacagattgcttcaagatttaagtaggcagcacaatgcatcctagcatttttttttttacttacaatttgtcaaagaaatcctctgtaataatactaaaaggagttatataggctcccttcccctttacaccattacaaaaacaccactatggcattgagacctcatgtatattcagatgaatcagagtctccaagtttattctggtagagagcaggtaacaatgacaatgacagaaacatcccctgctcacagccagagacacagcatgagtgggtatagggtccacagcaagccagaggaatgctgcctatgatctcttagaggttcattaaaacaagcaaacaaacaatacgttaaacacccatggcagttttgtagtaaggttaaccaatttagccccatatttccccaaactattctctcacaaattccatctctttctcttattttgttgtggtagtggctagcatttaacagatcatgttttctgaaacatggtttggcaggtgtttatttgagagaggaagtacataaagtgaacctcttatggggacatttgacagctctgggcaaaagaaatatcgtgcagttctgaagggagggaacaaagggaatgcacagaaaagggactgctgatcagaagggatgaccatctttttcttccccatattcgtgttttgttggatgtttaaagaatcgaatgtggagaaagacccgttctaaaaggtcaggaagcggctgtgtcggtgtggatcctaatcggaactgggatgcaaatttcggaggtgagcaccggtgtcatccccagggatggccagactgaattctggcaaccgactggtttgcatggctctgcagtgccttcagcccgtttatccatttaggattcaagtcatttaaaaccctctttgaaacattcactaaattctcccccttcacggaagtacagccctgtcacagctccaggcagcatttaatacggtttgcttcacatcttggttttccccgcagctgtagccgttcagcctctgagccaaagagccaggcttagcacaatggagggggctcaggaagcgccgaaccgaccgctagagggggttaggatctataaggaagagaagcattacatcatctggtagatgcttcgagaagaaaaacttaccaaaaaaaaaagtacaaatggaattaagaaatggattttcgaattacagtcagagataaaatgctagcttgctcatttggttttagtgacttcagcttttctgtttgggggtccactagcaagcgagttgtgggggggtgttcgttcatgcttttaggcacagttaaacctgtttcactaatcgcagagagttgacatttgttattttttacccactagtttcttgcaacagtacaatagttgcttttctcattgatgtgtccattgatgtgacaagcttcttctcagggaccgcaaaggcttattttggctacaagttgagaacactgcacatgcagagaaagtgtggtggtaataggagccatgaagaatgtgactgcatattgtccctggtccctaagtagagagagatgggtgttcatgctcaggtggcctccctcttgcccttttcactcactcaaacaccccagtctgtggtgctgtgctactgcattcaggatttagggtgggttttctctccttagtcaaatgcctctggtaagatctcagaacattccgagtatgtttcctaggtgttccaaatctagttagggtgacaatgaagcttaagtattacaaaccctgaagctgggcgctgtgtcgtttttcctaataacgagcacagagtctgcaatgcagagagcaatcattaaatatttgtaaaccaaatgaattctggagagttactgaactgagacaggacccactagggaggtgtgacggggcagcatgagtggtaacttcactcattgctttaacgatttattcttattatttttttgcataggaaaaacataaccaaagcactagaccccgaatattaaaccagatccagtaatctgatgccactctccctctgaaacatttattcttaaataattttaacataagatggcatataagttatgtttgcaagttatattttgcccagttcatgtggagaacttgggaaatctcaggcccacctgctccctaagagattctcgagcattcacagcctctgccaggcctgcagtgacccctgcttcaggcgtcttgagcaactatagctgttgagagaatcaagaccaaaggtggccttgtcaaatgtgatttcttcagggggaagcgtgtcagaggttcttacatttgtggctttgtgacttggaatacagatgcatagacttctactcttggactctacatacagatttgaagaggttcccagaaagtgaggttacagcccccccccccccccccccccagtgcaggagctcttcctccaacagcttccacagagggtagacatgatatctgataggtccttctgctgtacagaggatccatattttaaaagaagagacgcgtctaggatgagctcatttccgcttcctggtcacgccccagagcggggattcggacctaacacaaggataggcttattctgatttacgcaggaggaacgcgttcaccttgcagtgtagccttggtgttctggaactcacattgtagattagcaggccttgaactcagacctctttccgcctctgcctcccgagtactgtatacgctctgcagctatgtgtctacttaaagctactgccctaaggaggcttcttatttctttatcccactaggacctggagccagtagcagcccttgctctgactcataccacggacccaagcccaactctgaagttgaagtgaaatccatagtggacttcatcaagagccacgggaaagtcaaagcttttattacccttcacagctattcccaactgcttatgttcccctatggctataaatgtaccaagccagatgactttaatgagctggtgagttcctacattgttattttgagcttaatggccacatctgttgcgtggacaagtgaagttccattcataaagttagatacggaggtggaggaatgtcagtgacaggctactaaggtaaccagacacacacccaacgcagactaggctcactcggtaagtagaattcattatttggccactggtctccttgtttagaaacagaaagggaaataattttggtggcctgagaaattactcggcgggtccaactatttgtttcctgacagcctgaactagtccctgtgtctctcatggttggagagaaccaggtcctgtgtgagctgtcccctgacacagacacattaaactaaacaaatgtagctttaaattttgtaggaagtaagctggagagatgtctcggctgtgaagagcttgcctttacagaagatggctgcctcttccaggggactgagttaagtccaagcaatacatggtagcatgcagacatagaagcaggaaaaca

SEQ ID NO: 1961 - DNA, 503 bp, Rattus norvegicus
  misc_feature (419)..(420): n is a, c, g, or t
agagaaggcagctgatcagcactatctatgaatcagccatgcactgcaaacttttctactgtatgacctttttattctggacagcaagttccatggactctggggtcattcagagtcctagacatctggtcaaaggaaaagaacagaaagccagaatgcagtgcacccccataaaagaacatagttatgtttattggtactacaagaagctgggagaagacctcaaattcttggtttactttcagaatacagacatcattgataaaacagatatgatcaagaaaatcatttcagcagaatgcttcactaacaaaacatgtaccatagagatcaagtccagcaagctaacagattcagctgtgtactactgtgctagcagtcaagggggacagggtagtcaaaacaccttgttcttcggnncaggcacccgactgtcggtgctagaggatctgaaaacggtgactccacccaaggtctccttgtttgagccatcagaagcagag

SEQ ID NO: 1962 - DNA, 524 bp, Rattus norvegicus
cgcaacctctcaaggaccagaagtaggttaaagcgtttaagagacaaatattcttttcctgttctggcccttccatggatgctagacttctttactgtgtgatcttctgtcttcttgcagccgcttttgtggatacaatggttatgcagaacccaagatacaaggttgcaagagttggaaaaccagtgaatttgatctgttctcagactatggatcatgattccatgttctggtaccagcagaagccaaaccaaggaccaaagttgcttctttactactatgacagcaatttgaacagggagactgacacttctgataacttccaatccagccggcataatacttctttctgctctcttaacatcacctctgcaggcctaggggattctgccatgtacctctgtgctagcactccgggactgggggatggtcaaaacaccttgttcttcggtgcaggcacccgactgtcggtgctagaggatctgaaaacggtgactccacccaaggtctccttgtttgagcca

SEQ ID NO: 1963 - DNA, 426 bp, Rattus norvegicus
ccaacgtttctctgggccagtgttcatgctttgtcttgaattttcttccaggctcttttgatgctgctgttattcagacgccaagacatttgatcaaaatgaaagggcagcaagtagagatgaactgtaaccccgaaaaggatcaccctgctgttttctggtatcagcaaaaacagagcaaagagttaaagttcctgatttactttcagaatcaacggcctgtcgatcaaatagacatggtcaaggagagattctcagctgagtggccctcaaactcacgctgtagcctgaaaatcagtacttctgaagtagaagactcagcactgtacctgtgctccagcagtcaaatagacgaggcccagtattttggagaggggactcggctctctgttctagaggatctgaaaacggtgactccacccaagg

SEQ ID NO: 1964 - DNA, 1319 bp, Rattus norvegicus
cacgaggaccttgcccagcgarcggttgggwrttccggccatcttaggaggatgttctcgyccgtagcgcacctggcgcgggcraaccccttcaacgcgccacatctgcagctggtgcacgatgtgtcgggtccccgcagccccccaggtccgccccggcsttyccgccacctggctgccgccgccgtggaagrgtayagytgtgaatwtggctccatgaagtattatgcactgtgtggctttggtggggtcttaagttgtgggctgacacacactgctgttgttcctctggatttagtaaaatgccgcatgcaggtggaccctcagaagtacaagggcatatttaatggtttctccattacattgaaagaagatggcgttcgtggtttggctaaaggatgggccccaactttrattggctattccatgcaagggctctgcaaattcggcttttatgaagtcttcaaagccttatatagcaacatacttggtgaggagaacacctatctgtggcgtacatcactgtatctagctgcttctgccagtgctgagttctttgctgacattgccctggctcctatggaagctgctaaagttcgaattcaaacccagcctggctatgccaacacactgagggaagctgtccccaaaatgtataaagaagaaggcttaaatgcgttctacaagggtgttgctcctstgtggatgagacagatcccatacaccatgatgaagttcgcctgctttgaacggactgttgaagctttgtacaaatttgtggttcctaagccccgaagtgaatgtacaaaggcagagcagctggttgtgacatttgtggcaggttacatagccggagtyttktgtgcgattgtytctcaccytgctgayyctgtgktctctgtgckgmrbrargagaaaggcmgcactgcctctcaggtchtgcagaggyttggctttagaggtktatggaaggggctcttcgsccgwatcatcatgattggmactctgasggcactscagtggttcatmtatgactctgtgaaggthtacttcaggctccctcgmcctcytccacytgagatgccagagtctmtgaagaagaagcttgggttaactgagtagatmtacatcaaagtaacwtggactgaatstgcttgttgatcagtgttgaaagwgcawakgaacttttatatatttgacaatgtaggaaatgtctgttcctgatacaattaytgtagtacccttgcttaaagcawgwgtttcaaacytactgstaaataaaccvatcyrkwhwtsdwrwmmaaaaaaaaaaaaaaaaa

SEQ ID NO: 1965 - DNA, 536 bp, Rattus norvegicus
ctaaagcgaactaggctgctgggctgctggtggttattcatcccctctcttgtttcatgtgtatggatgtacgctgtcccagtatatgcactgctccggggagcagggggctggcaagtgcgtgcatggagcgtgtgtgtatatgtaaagcaggactgcacctggataccaaaatgaactactgcgtgccagaggtacacgaagtgtgcccagctgccggcagcaaccgttacatgcaggtcactgactacctcgcgtatctggaagacagtccggcttacagtggctgcgatgtccaagctgtgcccggtagcagcatatatctggaacaggcctggactctgaatcagccttatacctgtagttaccctggaaacctgtttaaaagcaaggactctgacttggacatggccctgagtcagtacagccagcctgcacatctccccgaagaaaagccttttcctcaagtgcggtcgcctccgcactcacacaaaaaagggtatatccccagctatctagacaaggatgagctctgc

SEQ ID NO: 1966 - DNA, 2329 bp, Rattus norvegicus
agacctgaaaggggaatttcctaaatctccaggctggacagtttgtttctccctctcacctcctataactcatctgagtcttatctccatatcacatttctaagtctcttgtactcagagtcattgtgactcttgggaggccagagccaggctgaacagagtccttccctgcagtactctatgagaatatgtctttgggtttgaaagaaaggtggtgttatcacctacattggctccagcggatcctcccccagccggaccagcccagagtccctctatagtgacagctccaatggcagcttccagtccctgactcaaggttgtcccacatacttcccaccatcacctactggctccctcacccaggaccctgcccgctcatttggcactgtgccacccagcctcagtgatgatagctccccttcttctgcttcatcatcatcatcatcttcctcctcctccttctataatgggagcccccccggaagtctacaagtggccatggaagacagcagccgagtgtcccccagcaagggcaccagcaacattaccaagcttaacggcatggtgctactgtgtaaagtgtgtggggacgtggcctcaggcttccactatggcgtgcatgcctgcgagggctgcaagggctttttccgccggagcatccagcagaacatccagtacaagcggtgtttgaaaaacgagaactgctccattgtccgtatcaatcgcaaccgctgccagcagtgtcgcttcaagaagtgtctctccgttggcatgtctagagacgctgtgcgttttggacgtatccccaagagagagaagcaacgaatgcttgctgagatgcagaacgccatgaacttggccaacaaccaactgagcagcctgtgccctctagagacctcacctgccccgcaccccacctcaggctccgtgggcccctcaccacctcctgcaccagccccgacacctttggtgggcttctctcagttcccacaacagctgacaccacccagatccccgagtcctgagcccacggtggaggatgtgatatcccaggtggccagggcccatcgagaaatcttcacctatgcccatgacaaattaggcacctcacctggcaacttcaatgccaatcatgcatcaggtagccctccggctaccactccacagtgctgggagagtcagggatgcccgtctacccccaacgacaacaaccttttggcggctcagcgtcataatgaagcactgaatggtctacgccagggcccctcctcctaccctcctacctggccttctggccctgcccaccacagctgccaccagcctaacagcaatgggcatcgcctgtgccccacccacgtatactcggccccagaaggcaaggcacctgccaacggtctacggcaaggcaacaccaagaatgttctgctggcatgtcccatgaacatgtatccccatggacgtagtggccggactgtgcaggagatctgggaagacttctctatgagcttcacacccgctgtgcgggaggtggtagaatttgccaaacagatccccggcttccgtgacctttctcagcacgaccaggtgaccctgcttaaggctggcacctttgaggtgctgatggtgcgctttgcgtcattgttcaacgtgaaggaccagacagtcatgttcctgagccgcacaacctacagcctgcaggagmtcggtgccatgggcatgggtgacctgctcaatgccatgtttgacwtcagcgagaagctcaactctstggcgmttactgaggaggagctgggccttttcacggcagtggtacttgtctctgcagassgctcgggaatggagaattccgcttcggtggagcagctycaggagacgctgctgsgggctcttcgggctctsgtgctgaagaaccggccctcggagacttcccgcttcaccaaamtgmtgctcaagctgcyggacctgcggaccctgaacaacatgcattccgagaagctgctgtccttccgggtggacgcccagtgacccgcccggccggccttstgccgytgcccccktgkacagaatcgaactctgsacttctctctcctttacgagacgaaaaggaaaascaaaccagaatyttakttataktgttakaaratwttmyaasmtragmctstrrmymmctgagccttcyysbwaakaavwvktyccccccacccccatgstcccttcctcccgtatttaaaccactcttgctctcccaccctcctctggcccstcgatttgttctgttcctgtctcaaatccaatagttcmcwgctgwraaaaaaaaaaaaaaaaa

SEQ ID NO: 1967 - DNA, 846 bp, Rattus norvegicus
agagtttctgttgcctacaattctaaaaagatcacccgtgctgagactgttttttctaataccgactatggaaattccactgaattaatcctggatgacatcaccaacagcaccattcttgataacctcactgaaaatagtgaaccaattaatgacttcactcgagttgttggtggagaaaatgcgaaaccaggtcaaatcccttggcaggtcattctaaatggtgaaattgaggcattctgtggaggcgccatcattaatgaaaaatggattgtaactgctgcccactgtcttaaacctggtgataaaattgaggttgttgctggtgaacataatattgatgagaaggaagacacagaacaaaggagaaatgtgattcgaactatccctcatcaccagtacaatgcaactattaataagtatagtcatgacattgccttgctggaactggataaacctttaatactaaacagctatgtaacacctatctgtgttgccaataaggaatatacaaatatcttcctcaagtttggttctggttatgtgagtggctgggggaaagtcttcaacaaagggagacaggcttccattcttcagtaccttagagttccactggttgaccgagccacatgccttaggtccacaaaattcagcatctataacaacatgttctgtgcaggttaccgtgaaggaggcaaagattcatgtgaaggagatagtgggggaccccatgttactgaagtagaagggacaagtttcttaactggcattattagctggggtgaagaatgtgcaatgaaaggcaaatatggaatatatactaaggtttccaggtatgtcaactgg

SEQ ID NO: 1968 - DNA, 3494 bp, Rattus norvegicus
ggcgcttgtgcctgcccagtaggccagagcagcccctggttcgggggaccgtgggtcagctgctctatccccatggcactgccatccctgctactggtggtggcagccctggcaggtggggtgcgtcctccgggggcacggaacctgacgctggcggtggtgctgccagaacacaacctgagctatgcctgggcctggccacgggtgggtcctgctgtggcactggctgtggaggcgctgggccgggcactgcccgtggacctgcggtttgtcagctccgaactagacggcgcctgctctgagtacctggcaccactgcgcgctgtggatctcaagctgtaccatgaccccgaccttctgttgggccctggttgtgtgtaccctgctgcctctgtggctcgctttgcctcgcactggcaccttcccctcctgactgcgggtgcagtggcctctggctttgcagctaagaatgagcattatcgtaccctggttcgcactggcccctctgcgcccaagctgggtgagttcgtagtgacattacacgggcacttcaattggactgctcgggctgctttgctgtatctggatgctcgcacagatgaccggccccactacttcaccatcgagggggtgtttgaggccctgcagggcagcaacctcagtgtgcaacaccaggtgtatacccgagagccaggtggccctgagcaagccacccacttcatcagagccaacgggcgcattgtgtatatctgcggcccgctggagatgcttcatgagatcctgcttcaggcccagagggagaacctgaccaatggggactatgtcttcttttaccttgatgtctttggggagagtctacgagcaggccccacacgtgcgacaggccggccatggcaggacaatcgaacccaggaacaagctcaggccctcagagaggcctttcagactgtcctggtgatcacgtaccgagagcccccgaatcccgagtatcaggagttccagaaccgcctgctgatcagagcccgggaagacttcggcgtggagctggccccatccctgatgaacctcattgcgggctgcttctatgatggaatcctgctctatgcccaagtcctgaatgagacaatacaggaagggggcacccgggaagatggacttcgaattgtggagaagatgcagggacgaagataccatggtgtaactggactggttgttatggacaagaacaatgacagagagactgatttcgtcctgtgggccatgggagacttggagtctggcgactttcagcctgcagcccattactcaggagctgagaagcagatttggtggacaggccggccaattccctgggtgaagggggccccacctttggacaaccccccctgtgcctttgacttggacgacccatcctgtgataaaactccactttccactctggcaattgtggccctgggcacgggaatcactttcatcatgtttggtgtttccagcttcctaattttccgaaaactgatgctggagaaggagctggctagcatgctgtggcgcattcgctgggaagaactgcagttcggcaactcggatcgatatcacaaaggtgcaggcagtcgcctgacgctgtcgctgcggggatccagttacggctcgctcatgacagcccatgggaaataccagatctttgccaacaccggtcacttcaagggaaatgtcgttgccatcaaacatgtgaataagaagcgcattgagctgacccggcaagttctgtttgaactcaaacacatgagagatgttcagttcaaccatcttactcgattcatcggagcttgcatagaccctcccaacatctgcatcgtcaccgagtattgtcctcgggggagcttacaagatattctagaaaatgacagcatcaatttggactggatgtttcgctactcgctcattaatgaccttgtgaagggtatggcctttctccacaacagcattatttcatctcatggaagcctcaagtcctctaactgcgtggtggatagtcgatttgtgctcaaaataacggattacgggctggctagcttccgatcaactgctgaaccagatgacagtcatgccctctatgccaagaagctgtggactgctccagaacttcttagtgggaaccccctgccaaccacgggcatgcagaaggcggatgtctatagctttgccatcattctgcaggaaatagcgctccgcagtggtcctttctacttggaaggcctggacctcagtcccaaagagattgtccagaaggtgcgaaatggtcagaggccgtatttccggccaagcattgaccggacacaactgaacgaagagttagttttgctgatggagaggtgctgggcccaggacccaacagaacgtccagactttgggcaaatcaagggcttcattcgccggtttaacaaggagggtggtaccagcatattggacaacctcttgcttcgcatggaacagtatgccaataacctggaaaaactggtggaggagcgcacacaggcctacctagaggagaagcgcaaggctgaggctctgctgtaccaaattctaccccactctgtggcagagcagttaaaacggggagagacggttcaggcggaggcctttgacagtgtcactatctacttcagtgacatcgtgggcttcacagcgctgtcagctgagagcacccccatgcaggtggtgacacttcttaatgacctttatacctgctttgatgccataatcgacaactttgatgtctacaaggtggaaaccattggggatgcctacatggtggtatctggccttccgggccgaaatggtcagcgccatgcaccagaaattgctcgaatggctctagcattactagatgcagtttcttccttccgcattcgccatcgascccacgaccagctaaggttacgcataggcgtccatactgggccagtctgtgctggggttgttggcctgaaratgccccggtactgtctttttggagacacagtaaacactgcttctcgaatggagtctaatggtcaagctctaaagatccatgtctcctsgaccaccaaggatgccctggatgagctaggatgcttccagctagaactccgtggggatgtggagatgaagggaaaaggaawaatgcgaacttattggctcttaggagagcgaaaaggacctcctggactcctgtaaatcccaagcagacaatttcttgctgttggtacttggatgggcaatggtcactgtgtctccacttgacagaaacagacgtcatatgagatggaaaatatgcatatacacaatccccctgccttatctggaagtcatataagccctctgccgctcagccttgtacatatgcctgcccctccctatcttggtcctcttcctgccttctgtaaatacctgtatctagaccagaatattttgtccaagtataaaacaacamcavcaaaaaaaaaaaaaaaaaa

SEQ ID NO: 1969 - DNA, 1923 bp, Rattus norvegicus
ccatggtcctcaatttcctctccccgagcctttcccggctcggcttgtgggcttctgtagtgatcctgatggtaatcgttctcaagctcttcagcctgctgcttcggaggcagaagctggccagggctatggacagtttcccagggccccccacacactggctttttggtcatgcccttgagatccagaagttagggagcctggacaaggtggtatcctgggcccaacagttcccccatgcccacccactttggtttggacaattcgttggtttcctgaacatctatgagcccgactatgcgaaagctgtatacagccgcggggatccgaaggctgcagatgtgtatgacttcttcctccagtggatcgggaaaggcctactagttctggatgggccaaaatggttccagcaccgcaagctgctcacacctggcttccattatgatgtgctgaagccctatgtggccatatttgctgagtccacacgtatgatgctggacaagtgggagaaaaaggctagtgaaaataagagctttgacatcttctgtgacgtaggccacatggccctggacaccctcatgaagtgcaccttcggcaaaggagacagcggcctaggccacagagacaacagctactacctggcggtcagtgacctcacactgctgatgcagcagcgcatcgactccttccagtaccataatgacttcatttactggctcactccacatggccgccgcttcctgcgggcctgcaagatagcccatgaccatacagatgaggtcatcaggcagcggaaggcagcactgcaggatgagaaagagcggaaaaagattcagcagcggaggcacctggacttcctggacattctcctgggtgtccgggatgaaagtgggatcaagctgtcagatgcagagctccgggctgaagtggacacattcatgtttgaaggccatgacaccaccactagtggtatctcttggtttctctactgcatggccctttaccctgagcaccagcagctatgyasgrrggaggtccgtgggatcctaggagaccaagactccttccaatgggatgatctggccaagatgacctacctgaccatgtgcatgaaggagtgcttccgcctctacccacctgtaccccaagtataccgccagctcaacaagccagtcaccttcgtggatggccgctctctacctgcaggcagcctgatctctctgcacatctacgccctccacaggaacagtactgtgtggcctgatccagaggtctttgacccactgcgcttttctcctgagaatgctgcaggacggcatmcctttgcyttcatgcctttttctgcagggcccaggaattgcatcgggcagcagtttgccatgaacgagatgaaggtggtcacagccctttgtttactgcgctttgagttctccctggatccctcaaagatgcccattaaggtcccccagctgatcttgcgctccaaaaatggtatccacctctacctgaagccgctggcttctaggtctggaaagtaggtcttcagagaactaggcctgggcagcacaagccgtgactcttcctgggatgttgccctcctagatagaatgtggagtcatcatggatccctgcctgtggraggytttggaggcaaaagcatggacactgacagtctcctggaagacattctcttgtaaacatgtgtgtggaatgattcaacgcccaggctccagaacttatttcttcactccacaacatttgctgaacgttttgctgccttgagaaactccattgatttcacatagctacatttatttaaccatcttggtgtgtatttggaatacgatggacatgaggaaaattgctcaaactaaaactgtacaaaataaataatactttaaaaagcaaamwmmmammammaaa

SEQ ID NO: 1970 - DNA, 1241 bp, Rattus norvegicus
gtagtccggctgctggctgagttgtaaggcaggagggaggctgggtgtgttttgtcttgcatgtagccctctctgcagagggcctggcttcactcacacaagcctggtaacatctggtacatcgaactctaagaatcggcaagcccactgctgccgtctccttaagagttcatttagggagtctgtcaggaacttgggcaggagtccacactaagggaagcttacttcccaaacagtggtgctgggtggaaagtggaggactcatgagaacccctagtttaagacttttagagaagcagtctgaagcactgtggagatgtggtcccatcgccatcctggagtagggataattttgcccaggagccccagcaatgggtcagaggagcaaaacgacgacagctgtaagtggtctcagaagatgctagaggaaacagaagatgaactggcagctgagwcytggygstamcttmctggcytckacwstrtgcgwrwkastctcarggsctaaactgctacaattgcacgatgatcccatttggtaatacctgctcatcaactgctacctgcccctaccctgatggagtctgyrctattcargtggcagaagttgttatgagctytgtaagacwgaamgtaaagrvcmatmtytgccttcccgkctgcccmamgagtcstcaaacamcygarrtcstsggtacygttrkcsahrtgaakaytkmctgttgcamyasagatctttgcaacgcagcargkcccactggargcagcacstggaccatggcargggtgcttctgttcakcctgrgctcaktcctcstgcagaccbtgctkwrakgrmycyhccaargcccygccacccttrkcmttttatcctywtgtgtawtcactcctycmtggagccctctagtgataaattctgagtaatrgaaactcwgaggtgggggtagggtgtgsaacaccttgtttcaactvtatagcccctgctgggtaggtgccccactcccctctstagggctttcagatmtstasttcctggaatgccattrtgytgtggtttgctgctcttrgccctggaggcaygtggacagcacgrggaagakrcakaaacccaaggcactgtgysaccacctccatccatacataaaaatctggggtcctgcagggttcccacacatgcmtctcaasrtccccctatttgagtccaataaactctctgttctcccarwmaaaaaaaaaaaaaa

SEQ ID NO: 1971 - DNA, 1286 bp, Rattus norvegicus
ttggaagcagtaagtctgccagaggggccagtgcttaatccagcaagccttagctctatacagccagagcgcaccctcctcctgcgttatcctgcatctggcagaacaagcgaggctgctgctgctgcttggggattgccaggggcaaaggggggttcgtgatacctcgttggagaagacgtctaggatggtagaaagtagtccgatgggactaggagagaaagggcgctgggtcaaggtacactcagcctttcatcactcgctgtagatggatggtttcccggccaggcatctggagcacggctcgctatagggagacgtcagtgtgctcaggtccggggtggaagagcccccggcccctcccgcgcaggcttgctttatataaagtccggggccgcgtggagtcgaagcggcagtggcagagcwcmkgagaactgtcctcctgtcactgctctgtcgggacaacgcactctcagcctagtggagcgctctgagggcttccctccaggaccatgcgcggctccgagctctcgctcttgctgttggctctggtcctctgccaggctccccgggggccagctgccccggtgtcgacaggcgcaggtggaggcacagtcctggccaagatgtatccgcgcggcagccactgggctgtaggacacttaatggggaagaagagcacagatgagttgccgcccctgtatgcagctgacagagatggcctgaaggagcaactgaggggatacatccgctgggaagaagctgcaaggaatttgcttggcctcctcgaagcckcgrggaacagaagccaccagccacctcaggatcagcctctgggcagtctccagcctacttgggatccagaggatggcagctacttcagtgatgctcaaaatgctaagttggtagactctctgctccaggttctcaaggggaaggaaggaactgccagctgaagggaccatgacaagggcggcttccaaggagcaaaacaaaaccccccagagactgccttctgcaaacattgattctactggaccatcaacaagattccctttgtgcaatttacgtaactattctcatgtcactcaactgcaactaaactcrtgatttttgagcagcatcttctggtttgaacctgtttctgtgaacaactacctaggaagagctttccagtgaacgctttttccagctaggcttttttgctgattggatttggggctcaatctgctaccattcacaataaaaagcttcagtaatcacactgtcaaaaaaaaaaaaaaaaa

SEQ ID NO: 1972 - DNA, 1763 bp, Rattus norvegicus
cggcattctgcacgcttcaaaagcgcacgtctgctgcagtgttctcctckkcctctckscrsgmskctcgaccwcasggtgttgccaaaatgtcgctttctaacaagctgactttggacaagctggacgtgaaggggaagcgggtcgtgatgagggtggacttcaatgttcctatgaagaacaaccagataacgaataaccaaaggwtcaaggctgctgtcccaagcatcaaattctgcttggacaatggagccaastcggttgtgcttatgagccacctgggccgtcctgatggtgtgcccatgcccgacaagtactccttagagccagttgctgcagaactcaaatctctgctgggcaaggatgttctgwtsttgraggryygyktgggctcagaagtagagaatgcctgtgccarcccmgcksctgksastktsrtyykyctggagaamctccgctttcatgtagaggaagaagggaagggaaaagatgcttctgggaacaaggttaaagctgagccagctaaaattgatgctttccgagcctccctgtccaaacttggagatgtctatgtcaatgatgcttttgggactgcacacagagcccacagttccatggtgggtgtgaatctgccacagaaggctggtggatttttgatgaagaaggagctgaactactttgccaaggctttggagagtccagagcgacccttcctggctatcttgggaggagctaaagttgcagacaagatccmgctgatcaataatatgctagacaaagtcaatgagatgatcatcggtgggggaatggcttttaccttccttaaggtgctcaacaacatggagattggcacatctctgtatgatgaagagggagccaagattgtcaaagatctcatgrccaaagctgagaaaaatggtgtgaagattaccttgcctgttgactttgtcactgctgacaaatttgatgagaatgcaaagactggccaagctactgtggcctctggtatacctgctggctggatgggcttggactgtggtactgagagcagtaagaaatatgctgaggctgtggctcgagctaagcagattgtttggaacggycctgttgggkwatttgaatgggaagcmtttsccaggggaaccaagtccctcatggaygaggtggtgaaagccacgtctaggggctrcatcactatcataggwggyggagacaccgccrcttgctgygscarakggaacacarrggataaagtcagccatgtgagcaytgggggcggckccmgtytrgagctcctgraaggtaaagtccttcytggggtggatgctytcagcaatgtttagtattttcctgccttttggttcctgtgcacagcccctaagtcgacytwgtgttttccgcakstccatttggtkttagtgcagctagtggccaaracgcagcmccaggaaccywaagcagstgcacagcatytcagstygtytttactgcatcgggrttcatbtactagttcaagatcccvkywmrakkyckyagtgvctwwwwyywttktkywttkywgdgggcatmtwtttwtactctgccygtgaaaggaagtgrgctgtaaaagcttagctctmttcgctgtatgtagcctctggttagctytgtcactgttcatgacagcatggaamtaacgrtgrgattccagctgtaggtttkggrggytgatbatwttgaaccaataaaagrtcccmctgaaamdrvaaaaaaaaaaaaaaaaa

SEQ ID NO: 1973 - DNA, 1889 bp, Rattus norvegicus
acaagtcctcgacttagcaccatggcactgggaggggccttcagcatctttatgacgctctgcttgtcttgcctgctcatcctgatagcttggaagcgaaccagcaggggaggaaagctgcctcccggccccacaccaataccatttttggggaacctgttacaagtacgcattgatgccacatttcagtcctywctsmagstycagwaaaagtatggctctgtgttcaccgtatactttggcccaaggccagtggttatcttatgtggacatgaggcagtgaaggaggccctggtggaccaggcagatgacttcagtggtcgtggtgaaatgcctacactagagaagaactytcmwggytakggtwtagytctgtccaatggagaacgatggaagattcttcggcgtttttccctgactgtccttcgaaactttggaatggggaagcgaagcattgaggagcggatccaggaggaggccggctacctactggaggaactccatmwrsycwagggagstcccatagatcccaccttctacctgagtcgcactgtgtccaatgtcatctgttccgtcgtctttggaaaacgtttcgactatgaggaccagcgtttccggagcctcatgaagatgatcaatgagagctttgtggagatgagcatgccctgggcacagktrywtgatatgtactggggagtcatacagtattttccaggaagacacaaccgcctctacaacttgatagaagagcttaaggacttcattgcttccagggtcaagatcaatgaagcatcctttgacccctcaaatcctagggacttcatcgactgctttcttattawsatktwccaggatammwgtgacccacactcagaattcaacctcaagaacttggttctcaccaccctcaacctcttctttgctggcacggaaactgtgagttccacactacgatatggattcttgttgctaatgaagtaccccgakktrsaggsyaagwtccatgaggagattaaccaggtgattggaacacaccgtaccccaagagtggatgaccgggccaagatgccctacactgatgctgtcatccatgagatacagagattgacagatattgtgcctctgggtgttccccataatgtcatacgggacactcatttccgaggctactkyctacccaaggkkasagatgtgtatcccctgattggctcagtcctcaaagatcccaaatacttccgctacccagaagctttttatcctcagcacttcctggatgaacaagggcgcttcaagaagaatgatgcctttgtggccktktcywcwggwargygcatctgtgtcggggaggccctggcccgtatggagctcttcctctacttcacctccatccttcagaggttctccttacgttctctggtgcctcctgctgatatcgacatcgctcacaaaatctcaggctttggcaacattcccccaacatatgagctctgcttcatggcccgctgagtgcccacttcgagaccaaccaagagtcaattgagagaggagctctgctggagttcacgcacacccgatctccctccaaccctccctactcatctaagagaagtcgctctcattgctgtgctgagaccacgggtcaggagaggtgtctgcaaaaacatggctggatggtatcaagcagggttctagccacagtctcggtttcggagagccctgaatttctcaaccttggtctcggtgggcagcaaacttacagatgctgtgggtttacataatctattgactttgccctgatattgaccagaatgtactccgcaattctttcctgtttgcttttatttctcctccccaataaagaactcaagactattgaccatagcaagctt

SEQ ID NO: 1974 - DNA, 1222 bp, Rattus norvegicus
  misc_feature (397)..(397): n is a, c, g, or t
  misc_feature (1132)..(1132): n is a, c, g, or t
cctggccctgastgkctcgggtcsrsgwsrcagggacatckgtaccgstgkctggawcttcgcagacaatgctgkcccgggtggtactttctgscgscgccacagcggscccgkgtctrragaacgcggscgtcctgggtccaggggttttacaggcaacaagggtctttcacacaggacagsctckccttksccctctaccacctmttyctgaatatggaggaaaagtacgtcttgggctgattcctgaggaatttttccagktcctttaccctaagactggkgtaacaggaccctacgtgcttgraactgggcttagcttgtactttctatccaaarraatatatgtgattaccccagagaccktstctaccatatcaktagtmvggktgattgnctatstgattaakaawwatggcgccyhyatygkhkrrwttattgmcwaacttaatgaggraaaaattgctcaactagaagamataaakmrgkcmrgcatgrarcmmatycasgawgmawtcrvmavgragrmsgcacagcarscaytggttmagragcgscactamytyttsgatkdtcakargratwacattgccytggccttkraggtcacttaccsggracgrctdcataaagcatatwagraggwaaagaatsgcctsgactwmcatatttctgtacargacatgatgcgthkcadrgaggrmsmrmrsatkataaamyggsdsrarrakcatgtgatacakakcatttytgymcagcwsgaaaaggagaccattgycargtgcatcggagatbkmamkwbgsyygcaaagrmkgctcaakctcagccaattatgtgmatgtgtctatctcaswtgtgatagccagagagggttaacytaaatgagaacwactykacttgaagaactctttytgtawtgctgtmwaatgarattgkggtgtacctttcstaagaaatgatcaaggtccatttagtggcttaaccctatttytgawccttgctmtgtattsggagttgtctgatcacatttgrgtaagcaatttgcagcaactcgytgcccaacagaaattmccaagttatagtttaaacttgtaattagttaaaacatcttacaataaaatgtttgvmmcngrawwwrwaarwwwmawamtctgaaatagcactgctttattatgagtaagaattacatgatttaaaataaaatatctagcagctggagat

SEQ ID NO: 1975 - DNA, 261 bp, Rattus norvegicus
tgtcatgcagccaatccaaacggcagatactactggggtggacagtacacctgggacatggcaaagcatggcacagatgatggtgtagtatggatgaattggaaggggtcatggtactcaatgaggaagatgagtatgaagatcaggcccttcttcccacagcaatagtccccaatagcgtagatttttgctcttctgtatgtgacaacatttttgtacattatgttattggaattttctttcatacattatattcctact

SEQ ID NO: 1976 - DNA, 1682 bp, Rattus norvegicus
cagctgggttggaattcaagggccccattgcttcccggaacagaacgaccacacagcctgctctgattaatgccagtgatcccaatgtgattgctgcccacgccccttctcctctcacaagtgttctactttgggtgatgattctgggctctcttcccatagcctcctggcatcttcttggaagaaccctgtgagggggcctgacaccatcccgataatgcttagcacggctccccagcgtttaacttaggtaacctctcggtctttgtctttccaggtgcatagcgtaatgtccatgttgttctacactctgatcacagcgtttttgatcggcgtacaggcagaaccgtacacagatagcaatgtcccagagggagactctgtccctgaagcccactggactaaacttcagcattcccttgacacagccctccgcagagcccgcagtgcccctgctgaaccaatagctgcccgtgtgacagggcagacccgcaacatcactgtggaccccaaactgtttaagaaacggagactccgttcaccccgcgtgctgtttagcacccagcctccacccacctcttcggacactctggatttagacttccaggcccatggtacaatctccttcaacaggactcacaggagcaagcgctcatccacccacccagtyttccacatgggggagttttcagtgtrtgacagtgtcagtgtgtgggttggagataagaccacagccacggacatcaasggcamggaggtgacagtgctgggcgaggtgaacattaacaacagtgtattcaaacagtatttttttgagaccaagtgccgagccccraatcctgtagagagtggatgccggggcattgactccaagcactggaactcatactgcaccacgactcacacctttgtcaaggcgttgacaacagacgacaaacaggctgcctggaggttcatcaggatagatacagcctgcgtgtgtgtgctcagcaggaaggctgcaagaagaggctgacttgcctgcagcccccttccccacctgccccctccacactctcytgggcccctccctacctcagcctgtaaattattttaaattataaggactgcatgataatttatcgtttatacaattttaaagtcattattattaaattttcaaagcatmmwrwrwammmamamwwrarwmawwwmwctcaataagagtacccacaaagtttaggagagtgcagaatgaactgtcccccagccactcctggcaacacggcccatctgtaaccttcattcccagccagagctgctccagggctggctaactagtttcagacactgctcagcacccagcatgattagcaagggaagtcagcctgcaggctctggtctacattccggagccaactctaccaaatccttggattatctgctgcacagcatgcctccatgggttttgattgcctcacttgaggagggaagagtagttaagactggtcagaaagcaggatgctatgtacactggctgcagtctcccacctctgagagacccaggctggtcctcggaggatattgggaactccctgggtggataagtagaggcttccaggtcttctggcttcagtcagttggaagagcagtctgaaggagctgtaacaaaatcatctcctgaggcctgtcatggcagatct

SEQ ID NO: 1977 - DNA, 231 bp, Rattus norvegicus
ctggtggtgatgctggaatcccgattccctggtccggcccgtggcgtcgcgaattgccggcagcaggtcctggaattagagaaagagtttcattacaaccgctacctgacccgaaggagaaggatcgagatcgcccactcgctgtgcctctctgagaggcagatcaaaatctggttccaaaaccgtcgcatgaaatggaagaaggaccacgactccccaacaccaaagtga

SEQ ID NO: 1978 - DNA, 4551 bp, Rattus norvegicus
tgaaccacagccccgcgcctctaccggcccgacccggggcctgaccgcaaggggacccgcgcacaggctccgggcggaggagctggcgcggcggcactgcgggaagcagcctgcggctcgctgaagcccgcttggcccggctccgcagccctggtccggagcgcgcggctcccgagttcccgcacagttgcagatgatcggtgccacctgtgtcctgggaacccactaaacattccagctccagttggacgcccttcacccacaaccaaggggagcctccccgccttcccaggtcttaacgaagccctggtgaagtggcttgacctggacttctccctccctcattagaagcagccaccagtcaacatgaccgaggaccagggcttctcggatcccgagtactcggcagagtactcagccgagtactcagtcagcttgccctctgaccccgaccgcggggtcggccggacccatgaaatttctgtgcggaactctgggtcctgcctgtgcctgcctcgctttatgcggctgaccttcgtgcctgagtccttggagaacctctaccagacctactttaaaaggcagcgccatgagacactgctggtgctggtggtctttgcggccctctttgactgctacgtggtagtgatgtgcgcggtggtcttttccagcgacaagctggcgcccctcatggtggcaggcgtcggtctggtgttggacatcatccttttcgtgctctgcaaaaaggggctgctcccggatcgagtgagccgcaaagtggtaccctacctgctgtggctgctcatcacagcccagatcttctcctacctgggcctgaacttttcgcgtgcccacgcagccagtgacactgtgggttggcaggccttctttgtcttctccttcttcataacgctgccactcagcctcagccccatcgtgatcatctccgtggtctcctgtgttgtgcatacgcttgtcttgggggtcacggtggcccagcagcagcaagacgagctagaagggatgcagctgctgagggagatcctggctaacgtcttcctctacctgtgcgccatcatcgtgggcatcatgtcctactacatggcagaccgtaagcaccgaaaggccttcctggaggcccgccagtcgctggaggtgaagatgaatctggaggagcagagccagcagcaggaaaaccttatgctttccatcctgccaaagcatgtggctgacgagatgttgaaggacatgaagaaagatgagagtcagaaggaccagcagcagttcaacaccatgtacatgtaccgccatgagaatgtcagcatcctgtttgcagatattgtgggctttacccagctgtcctctgcttgcagtgcccaggagctcgtgaagctactcaacgagctctttgcccgctttgacaagctggcggccaaataccaccagctgaggatcaagatcctaggcgactgttactactgcatctgcggcctgcctgactaccgggaggaccacgccgtgtgctccatcctgatggggcttgccatggtagaggccatctcgtacgtgcgggagaagaccaagaccggagtggacatgcgtgtgggggtgcacacaggcactgtgctaggtggcgtcctgggccagaagcgctggcagtatgatgtatggtctaccgatgtcactgtggcaaacaagatggaggctggcggcatcccagggcgcgtgcacatttcccagagcaccatggactgcctgaaaggggagttcgatgtcgaacctggtgatggtggcagtcgctgcgactacctagatgagaagggcatcgaaacctacctcatcattgcctccaagccagaggtgaagaagacagctcaaaatggcctcaacggctcggccctgccaaacggagcaccggcatccaagcccagctcccctgcccttattgagaccaaggagcccaatgggagtgcccatgccagcggctccacatcagaggaggctgaagaacaggaggcccaggctgacaacccctcgttccccaacccccgccgcaggctgcgcctccaggacctggcagaccgtgtggtggacgcctctgaggatgagcacgaactgaaccagcttcttaacgaggccctgctggagcgggagtccgcccaggtggtaaagaagagaaacacattcctcctaacgatgaggttcatggacccagagatggaaacacgctactcggtggagaaggagaagcagagtggggctgccttcagctgttcctgtgtggtccttttctgcacggccatggtggagatacttatcgacccctggttgatgacaaactacgtgaccttcgtggttggagaggttctgctcttgatcctgaccatctgttcgatggctgccatcttccccagggcatttcctaagaagctcgtggccttctcatcttggattgaccggacccgctgggccagaaatacctgggccatgttagccatcttcattctggttatggccaatgttgtggacatgctgagctgtctccagtactacatgggaccttacaacgtgacaaccgggatagagctggacggtggctgtatggagaaccccaagtactacaactatgttgctgtgctgtccctcatcgccaccatcatgctggtgcaggtcagccacatggtgaagctgacactcatgctgctcgtcacaggcgccgtgactgccatcaacctgtatgcctggtgtcctgtctttgatgaatacgaccacaaacgctttcaggaaaaggactctcctatggtggccttagagaagatgcaggtactttccacccctgggctcaatggcactgacagcaggctgcccctggtgccttccaagtactcgatgactgtgatgatgttcgttatgatgctgagcttttactacttctcacgccacgtggagaaactggcccggacactgttcttgtggaagattgaggtccatgaccagaaagaacgtgtgtacgagatgcgccggtggaacgaggccttggtcaccaacatgttgccagagcatgttgcacgccatttcctgggctccaagaagagagatgaggagctgtacagccagtcttatgacgagattggagtcatgtttgcctccttgcccaactttgccgacttctacactgaggagagcatcaataatggtggcatcgagtgtctacgcttcctcaatgagatcatctctgattttgactctctcctggacaatcccaaattccgggtcatcaccaagatcaaaaccatcggcagcacctatatggcagcttctggagtcacaccagatgtcaacaccaatggctttacaagctccagcaaggaggaaaagtcagacaaggagcgctggcagcacctggctgacctggcagactttgcactagccatgaaggacacgcttacaaacatcaacaaccagtcattcaacaacttcatgctgcgcataggcatgaacaaaggaggagttctggctggagtcattggagcccggaagccacactatgacatctgggggaacacggtcaatgtggccagcaggatggaatccacaggggtcatgggcaatatccaggtggtagaagagacacaggtcatccttcgagagtatggcttccgctttgtgaggcgaggacccatctttgtgaagggcaaaggggagcttctgacctttttcttaaaggggcgggacaggccagctgccttccccaatggctcctctgttacactgccccaccaagtggtggacaacccctgaacagccctggctccacagcggtccacactggaagggagacattttggmassagrgaaaagctttgggaaagggcaaacgaccgagtcccggggttcccaactgttgaagtgcacattcccatagactttaggtttcagatttcctccagcctccctgtgtggctgtgagctctgagcgtggctattcctactcctcagtgtgcctgtagcttccccaaagcaggggtytaggcatagtactggagcagcctttccagagcctttgttccagctcagcccttcacccctagakaggccacagccactgtgagcaggatgccagcagatgtgggatgaagctgcctgtgctgcagggtgggggcacaggctgggctcagggccgagaaggctcggcgcctgghtgcgcctcctgtmagttaagtcaatggcccttacccgatgttcctgataatcttgaaaggttcttctggaacccccgtgtcaccttagtcacgagagcrraaagtgcaatatttcctttcacctggttgggaaggggggttatttctgaaagaaaaraatatataracagatcttctacatttatatttttaacctgttcaaaaaacaactttccaatattgccttgtcttctgagctcttgctacagtcgcctttgmtactgctttaacagagaatctgcaggtgttgataaagaacaggactgttttattaaaarctttactmaacttgraaaaaaaaaaaaaaaaa

SEQ ID NO: 1979 - DNA, 2413 bp, Rattus norvegicus
ctgttgtgcttcctcgatccctgcctgggccagagccgagaaaaggcgagtccttttctgctgatagaactgtgaggaactgttgctcaggacctctgcactcctgacaacgtcgtcacagtctctcgcttttctgtggcttcacagtgaaatcactcgcacgtttgtagccgggtgaatccttctgctccagtgctcagaggaggggtctaggaaaacatcaagtgtttgaaagagggattcggagtactgcgggagctgtctgaggtgctgaagcttcccaagcgtttgcctctagcagcccagaaggggttagatggcacgttttcacttctgtctttctggtcccccatgccttggataagactgttttcaggatcgggaatatctttccgtatcatggcccacgtgagacactttcggacactactttctggattttacttctgggaagccgcactgttactgagtttggtggccacgaaggaaacaaacagtgcacggtcccgaagtgccccaatgtcaccttctgattttctggacaaactaatggggaggacatccgggtatgatgcaagaatcaggcccaacttcaaaggtcctccagttaatgtcacatgcaacatattcataaacagctttggctccatcgcagagacgactatggattacagagtaaacattttccttcgtcagaagtggaatgatcctcgccttgcatacagtgaataccctgatgattcattagacctcgacccatccatgttggactccatatggaaacctgacttgttctttgctaatgagaagggggctaacttccacgaagtcaccaccgataacaagctgctaagaattttcaaaaatggaaatgttctttattcaataaggctgacattaacactctcttgtccaatggatctcaagaatttcccaatggatgttcaaacatgcataatgcaactcgaaagctttgggtacacgatgaatgatctcattttcgaatggcaagatgaagcaccagtacaagtggctgaaggactcactttgcctcaatttctgttgaaagaagaaaaagatttgcgatactgcactaaacactacaatacaggaaagtttacatgcatagaagtacgatttcatcttgagcggcaaatgggctactacttgatccagatgtacattcccagccttctgattgtcattctgtcctgggtctcattctggattaacatggatgcagctccggctcgggtagcgttgggtatcaccactgtacttacgatgaccacgcagagttctggatcccgggcttctttaccaaaggtgtcctatgtcaaggcaattgacatttggatggcagtgtgtctcctttttgtgttctcagcacttctggagtatgcagccgtgaattttgtatcaaggcaacacaaagaactgctgaggtttcggcgaaagaggaaaaataaaacagaagcttttgcactggagaagttttaccgtttctcagacacggatgatgaggtgagggagagtcggytcagcttcactgcctatggaatggggccctgtcttcaagcaaaggatggtgtggttccaaaaggtcccaaccatgctgtccaggtcatgccaaagagcgccgatgaaatgaggaaggtcttcatcgacagggctaagaagatcgacaccatctcccgagcctgctttccgctagcatttctgatttttaacattttctactgggttatctataaaatccttaggcatgaagacattcatcatcagcaagattaagtctatgaaggcatacaaaaacagagcattgagaagaaagagtcccgctaaaggagcggggtgtgtgtgcatgtggggtgcaggtgagagtcagtgcatcagaacagcatatggggaaagaatttattttgatttcctatgtaaaatagtgagacagtttggttaaatgatacaaaatgtacatcgtgggtgtcctgcttcataatcctgacaggtgatctgttgtcttcctagtgtgaatatgtgttgcatatgctttacaagcacatagagtagacatgataactacattgggaggtcttgagttttaattcaattatagtaaacactgcggaagcaagatttacacaataaaatgtataaagcaagtatagcaaaatgatgagtataataaaatgtcttgagatatacagcatatcgatgaagtaacaagatcattaaatgtcaaggtcactcatgtcagaacactgtccatagaaacagtgtggaaccaacaaccacaataaaaacaaaatcggatggtcaaaatgaaagccatcatttagaacactatggcttaagcaatcatgtttataaaattctacttatctttacatctctaggaatgaggaggaagatg

SEQ ID NO: 1980 - DNA, 1748 bp, Rattus norvegicus
gaaaaagaaaaaccaacaagwragccaatggcyctcttcatttttctggggatttggctttcttgtttggtttttctttttctatggaatcagcaccatgtcagaaggaagctcccacctggtcccactcctctaccaatttttggcaatattttgcaagtgggtgttaaaaatatsagcaaatctatgtgcatgctagcaaaagagtacgggcctgtgttcaccatgtatctgggcatgaagcccactgtggtgctgtatggatatgaagtattgaaagaagctctgattgaccggggagaagagttttctgataaaatgcattcgtcaatgctcagtaaagtcagccaagggttaggcattgtcttcagcaatggagaaatatggaaacaaacacggcgtttctccctcatggtcttaaggtctatggggatgggaaagagaactattgaaaaccgaattcaggaggaagttgtttatctgctggaagcactgagaaaaaccaatgggtccccgtgtgaccccagcttccttctggcctgtgttccctgcaatstgatctccagtgtcattttccagcaccgttttgactacagtgatgagaaattccaaaaattcatagagaatttccatacaaaaattgaaattttagcatctccttgggcccagttgtgcagtgcctatcctgttctatactatctcccgggaatccataacaaattcttaaaagatgtgactgaacagaaaaagttcatcttgatggaaataaacaggcatcgagcatctctgaacctcagtaaccctcaggactttattgactatttcctgattaaaatggaaaaggaaaaacacaatgaaaagtctgaatttaccatggacaacctgatagtcaccataggtgatctttttggagcaggaacagagacaacgagttccaccataaaatatgggcttttgctcttgctgaagtacccagaggtcacagctaaaattcaggaagaaattactcgcgtgattggtagacaccggagaccctgcatgcaggacaggaaccacatgccctatacggatgctgtgctgcatgagatccagagatacattgattttgttcccattcccttgcctcgtaagacaacgcaggatgtggagttcagaggataccacattcccaagggcacaagcgtaatggcatgtctgacttctgccctgcacgatgacaaagaatttcccaacccagagaagttcgaccctggccactttctcgatgaraaaggcaacttcaagaagagtgactacttcatggctttctcagcaggaagaagagcctgtattggagaaggtttagcccgcatggagatgttcttaatcctgaccagcattttacagcattttaytttaaaacctcttgtcaatccagaggacatcgacacaaccccagttcaacctggtttattgtctstgcccccaccctttsagctctgtttcattccagtctgmrgcsgcawagtytttcacacagatgactgagaccctgcttctacttgtgagcaaacaggtcctcctgtcctsktgtacctgtaactggcagtccttcctgaatggcagggatgctacctctgaactgtcctacatttttttcaattctttgtgaaccagttccaatttttcatatgtgaaaaaacttcactgttttagcactaataaagtttttttkyagtgtatgtcaraaaaaaaaaaammwmgtgccg

SEQ ID NO: 1981 - DNA, 8275 bp, Rattus norvegicus
cgcagaattctaaatctgagagcaaaagctcaaattcactgccaagcgataaggccgtatgagatttttatggccttcaaacgtggccacagacattgtttctgagtttttaaaaagtacaaggaaaaatacaagtgggatagctgttcagttgtgacatcagctgttggtccccaactggagtcacaatgattcgggccttcgctcagccatccacacccccataccagccgctctccagttgcctgtctgaggacacagagaggaagttcaagggcaaggtggtacacgaagctcaactcaactgtttctacatttctcctggaggttccaactatgggagcccacgcccagctcatgccaacatgaatgccaatgcagctgcaggacttgcccccgagcacatccctactccaggggcagcactgtcctggctggcagccatcgatgccgcccggcaggccaagttaatgggcagtgctggcaatgcgaccatctctaccgtcagttccacacagcggaagcggcagcagtatgggaaacccaagaagcaggggggcacaactgccacacggccgccccgggctctgctctgcctgactctgaagaaccccatcaggagggcatgcatcagcattgttgaatggaaaccatttgaaataattattttattgacgatttttgccaattgtgtggccttagcaatctatattccctttccggaagatgactccaacgccaccaactccaacctggaacgggtggagtatctcttcctcatcatttttaccgtggaagcatttttaaaagtgattgcctacggactactcttccaccccaacgcttacctccgcaacggttggaatttactagattttataatcgtggttgtagggctttttagtgcaattttagaacaagcaaccaaagctgacggggccaacgctctgggagggaaaggagcgggattcgatgtgaaggcactgagagctttccgtgtgcttcgtcccctgcggctggtgtctggagtcccaagtctccaggtggtcctgaactccatcatcaaggccatggtgcccctgctgcacattgccctcctcgtgctcttcgtcatcatcatctatgccattatcggcctggagctcttcatggggaagatgcacaagacctgctacaaccaggagggcataatagatgttccagcggaagaggatccctccccttgtgctttggagacaggccatgggcgacagtgtcagaacgggaccgtgtgcaagcccgggtgggatgggcccaagcacggcatcaccaacttcgacaacttcgccttcgccatgctgacggtgttccagtgtatcaccatggagggctggacagacgtgctgtactggatgcaagacgctatgggctatgagttgccctgggtgtattttgtcagtctggtcatctttggatcctttttcgttctaaatctggttctcggtgttttgagcggagagttttccaaagagagggagaaagccaaagctcgaggagacttccagaagcttcgtgagaagcagcagctagaagaagatctcaaaggctacctggactggatcacccaggcggaagacatagaccctgagaatgaggacgagggcatggatgaagacaaaccccgaaacatgagcatgcccacaagtgagactgagtctgtcaacaccgaaaacgtggctggaggtgacatcgagggtgaaaactgtggagcccggcttgcccaccggatctccaaatccaagttcagccgctactggcgccggtggaatagattctgcagaagaaagtgccgtgccgcagttaagtccaacgtcttctactggctggtgatcttcctggtgttcctcaacaccctcaccattgcctccgaacactacaaccagcctcattggctcacagaagtgcaagacacggccaacaaggccctcctggcccttttcacggcagaaatgctcctgaagatgtacagcctgggtctgcaggcctactttgtatccctcttcaaccgctttgactgtttcattgtgtgcgggggcatcctggagaccatcctggtggagacgaagatcatgtcgcccctgggcatctcctgctggagatgtgtgcggctgctcaggattttcaagatcaccaggtactggaactccctgagcaacctcgtggcgtccttgctgaactcactgcgctccatcgcctccctgctgctactcctcttcctcttcatcatcatcttctccctcctggggatgcagctgtttggtggaaagttcaactttgatgagatgcagacccgtaggagcacgtttgataacttcccgcagtctctcctcactgtgtttcagatcctgaccggggaggactggaattcggtgatgtatgatgggatcatggcttatggcgrcccctcttttccagggatgttagtctgtatttacttcatcatcctcttcatctstssaaattatatcctactgaatststtcttggccattgcggtggacaacctggctgatgcggagagcctgacctctgcccaaaaagaggaagaagaagagaaggagagaaagaagctggccaggactgccagcccagaaaagaaacaggaggtgatggagaaaccagcagtagaggagagcaaagaggagaaaattgagctgaagtccattacagcagatggagaatccccgcccactaccaagatcaacatggatgacctccagcccagtgaaaatgaggacaagagtccccactccaacccagacactgcaggtgaagaggatgaggaggagcccgagatgcctgtgggcccacgcccccggcccctgtctgagctgcaccttaaggaaaaggcagtccccatgccggaagccagtgcatttttcatcttcagcccaaacaacaggttccgcctgcagtgccaccgcattgtcaatgacacgatcttcaccaacctcatcctcttcttcattctgctcagtagcatctccctggcggctgaggaccccgtccagcacacctccttcaggaaccacattctgttttattttgacattgtttttaccaccattttcaccattgaaattgctctaaagatgactgcttacggggctttcctgcacaagggctctttctgccgaaattacttcaatatcctggacctgctggtggttagcgtgtccctcatctcctttggcattcagtccagcgcgatcaacgttgtgaagattttaagagtgcttcgtgtcctcaggcccctgaggatcaacagggccaaggggctaaagcacgtcgttcagtgtgtgtttgtggccatccggaccattggaaacattgtaattgtcaccactctgctgcagttcatgttcgcctgcattggggtccagctcttcaagggaaagctctatacctgttcggatagttccaaacagacggaggcagaatcgaagggtaactatataacatacaagaccggagaagttgaccaccccattatccagcctcgaagttgggagaacagcaagttcgactttgacaatgttctggcagccatgatggccctctttaccgtctccaccttcgaggggtggccagagctgctgtaccgctccattgactcccacacagaagacaagggtcccatctacaactatcgtgtggagatctccatcttcttcatcatctacatcatcatcattgccttcttcatgatgaacatcttcgtgggtttcgtcattgtcaccttccaggagcagggggaacaagaatacaagaactgtgagctggacaagaaccagagacaatgtgtggaatatgccctcaaggcccgacccttgccaaggtacatccccaagaaccagcaccagtacaaagtgtggtacgtggtcaactccacctacttcgagtatctgatgttcgtcctcatcctgctcaacaccatctgcctggccatgcagcactacggccagagctgcctcttcaaaatcgccatgaatatactcaacatgcttttcactggcctcttcacggtggagatgatcctgaagctcattgccttcaaacccaagsactatttctgtgatgcatggaatacatttgacgccttgattgttgtgggtagcattgttgatatagcamtcaccgaggtacacccagctgaacatacccaatgctctccctctatgagtgcagaggagaactcccgcatctccatcaccttcttccgcctcttccgggtcatgcgcctggtgaagctgctgagccgaggggaaggcatccggaccctgctgtggaccttcatcaagtccttccaggccctgccctatgtggcccttttgattgtgatgctgttctttatctatgcagtgattgggatgcaggtatttgggaagattgccctgaatgacaccacagagatcaatcggaacaacaacttccagacgttccctcaggctgtgctactgctcttcaggtgcgccactggggaggcctggcaggatatcatgctagcctgtatgccaggcaagaagtgtgctccagagtctgagcccagcaacagcacggaaggggagacaccctgtggcagcagtttcgctgtcttctacttcatcagcttctacatgctctgtgccttcctgatcatcaacctctttgtagctgttatcatggacaactttgactacctgactagggattggtctatccttggtccccatcacctggatgaattcaagagaatctgggccgaatatgaccctgaagccaagggtcggatcaaacacttggatgtggtgaccctcctccgtcgaattcagcccccactgggttttgggaagttgtgtcctcaccgtgtggcctgcaaacgcctggtgtccatgaacatgcctctgaacagtgatgggacggtcatgttcaatgctacactgtttgcccttgtcaggacagccctgaggatcaaaacagaagggaacctagagcaagccaatgaggagctgagagccatcatcaagaaaatctggaagaggaccagcatgaagctgttggaccaggtggtgccccctgcaggtgatgacgaggtcacagtgggcaagttctatgccaccttcctgatccaagagtacttcaggaaattcaagaagcgaaaagagcaggggctggtcggcaagccctcgcagaggaatgcactgtctctgcaggctggcttacgcaccttgcatgacattgggcctgagatccggagagccatctctggggatctgacggctgaggaggagctggacaaggctatgaaggaggcagtgtctgctgcctccgaagacgacatcttcaggagggctggaggcctgtttggcaaccacgtcagctactaccagagtgacagcaggagcaacttccctcagacgtttgccacccaacgcccactgcacatcaacaagacagggaacaaccaagcggacaccgaatcaccgtcccatgagaagctggtggactccactttcacccccagcagctactcatccacgggctccaatgccaacatcaacaatgccaacaacactgccctgggccgcttcccccaccctgctggctactccagcacggtcagcactgtggagggccatgggcctcccttgtcccctgctgtccgggtacaggaggcagcatggaaactcagctctaagaggtgccactcccgagagagccagggggccacggtgagtcaggatatgtttccagatgagacccgcagcagcgtgaggctgagcgaagaagttgagtactgcagtgagcccagcctgctctccacagatatactctcctaccaggacgatgaaaaccgacaactgacctgtctagaggaggacaagagggagatccagccatgtccgaagaggagtttccttcgctctgcctctctaggtcgaagggcctccttccatctggaatgtctaaagcgacaaaaggatcaagggggagacatctctcagaagacagccttgcccttgcatctggttcatcaccaggcattggcagtggcaggcttgagccccctcctgcagagaagccattctccttccacgtttcccaggccacgccccacgccccctgtcactccaggcagccggggcaggcccctacagcccatccctaccctgcggctggagggggcggagtccagtgagaaactcaacagcagcttcccgtccatccactgcagctcctggtcagaggagaccacagcctgtagtgggggcagcagcatggcccggagagcccggcccgtctccctcaccgtgcccagccaggctggagctccaggcagacagttccacggcagtgccagcagcctggtggaagcggtcttgatttcagaaggactgggacagtttgctcaagatcccaagttcatcgaggtcaccacacaggagctggctgacgcctgcgatatgacaatagaggagatggagaacgccgcagacaacatcctcagcgggggcgcccagcagagccccaacggcaccctcttaccttttgtgaactgcagggacccagggcaggacagggctgtggtcccagaggacgagagctgtgtatatgccctggggcgaggccggagcgaggaagcgctcccggacagcaggtcctatgtcagcaacctgtagtccgcaggctggcgagacgcgggtgttttttattcgtttcaatgttcctaatgggttcgtttcagaagtgcctcactgttctcgtgacctggaggtaaccggaacagcgtcttcattcactgctgtcgggataagcctcagagctgggcggtgtaccgaagtcggcttttcagggagaagccaaggccgttggtgcgggggctccagcaccttcccacggcagcaccgcccaaaggaccccaccccccctaagcaaaagggtgttttccccttgcttgtataaacagtcatttgcacatgttctgtctgagcctggccgtctctatggagcagggccccagggatctatggcaggaatgggccagtgtccccagtaggagccggaaggtggctgcaaggttcccagcagtgcagatctggtccctatgtcccttcagggacccttcccctgctggaactgaggagcaggtgcaggagccagtgcagaccacaccacctgccctcagctagccagacctgggggcgcaggctgcttgcctggtgctctgggtttcatagtttgatggttcttgtcagcatgttgcggttttctaggttttgatttctttattactatttgttgtgttttccacggggaggggaggaagaagagcgtttacaactgcgcagcctcacttcaccggttccacatttgcatatttaagttggatttggtttattgtattctttaaatggtgcggtccaacccccaccctcacccctattggagcaagggttcattatcaccaacggggttcattatcaaccaacggggaggttttacctgctctgtgtatgcccaagtaacatgttacaattttccttaagtcaaagcaactttttcccctttcggtttggttgagcatcacgacctgcaggttaacagtcagtttagataaggcggtgtgtgcctgggcgactgagctgggctcctttctgggcatatggattggttcaggagagaagaaatatgggcatctttgcgtcacacgtgtgtccatagtgggtcgtcttgtgtgtctgtgcatccacacggtacgtgagcaccccgccccacccccgcycaaagtctgtaratcccgttcgggtttgackgcmggggagttcaaaatctggggckattcgaaagcaagaacaaaccactgtctctgcttctgcttctgaaacgagaatctggtaactgcattttctgtcccacgagatatgcaaaagcaatgcaataatayccwttttaaaatacgattgtgagttgtgtcacagcattaaaattctattttaaaaaaaacatgaaatttaaggggaaaaactccaagaagacattttgactttcgatatattctgtgtaatgttttattgcattgataatgtttctgttgaagaaactgttatacttgaattcaggtcagtttcagtatttttcaaatatttttttaaaactgaattgcaattgtgccwwgcaaatataatgacttaagtttgttttaaaattcacttcttgtatattttgctgcatgtaaagtaaatcattttgtatttgg

SEQ ID NO: 1982 - DNA, 4400 bp, Rattus norvegicus
gtatagtttcgtgtgaggggtttccagccccaagaatgccagctatgaaactagcagggtcgcccacccacaactccccctccatctttttatggtttggctcgctctccctcaccctctctcacacacgcacgcacacacccacctctcccataaacacacacacacacatgcacacccacatccacgcgcgcccgcaccgccccacgcgcgcacactcccgcccacgcccacgccgcgctccggggagtccggtcccggccagagcgcgaaaggacacggagaagccacccgccgggagcgcagcggcgccctgggacgcggcgcgtctccgctggggctcggcctgggggccgctggccggcgatggccctggattgcctgctgctgttcctcctggcatctgcagtggccgcgatggaagaaacattgatggacacaaggactgccactgcagagttgggatggacggccaaccctgcctctgggtgggaagaagtcagtggctacgatgaaaacctgaacaccatccgtacttaccaagtgtgcaacgtctttgaacccaaccagaacaactggctgcttaccacctttatcaacagacggggcgcccatcgcatctatacagagatgcgcttcactgtgagggactgcagcagccttccaaatgtcccaggctcctgcaaagagaccttcaacttatactactatgagactgactctgtcattgccaccaagaagtcagccttctggtctgaagccccctacctcaaagttgacaccattgctgcagatgagagcttctcccaggtggattttgggggaaggttgatgaaggtcaacacagaagtcaggagctttgggcctcttactaggaatggtttttacctcgctttccaggattatggagcctgtatgtctctactttctgtccgtgtcttcttcaaaaagtgtcccagcattgtgcaaaattttgcagtgttcccagaaaccatgacaggagcagagagcacatctctggtgattgctcggggcacatgcatccctaatgcagaagaagtggatgtgcccataaaactctactgcaatggagatggagagtggatggtgcccattgggcgctgcacctgtaaggctggctatgaacctgagaacagcgtggcctgcaaggcctgtcctgcgggaaccttcaaggccagccaggaagctgaaggctgctcccactgcccctccaacagccgctccccttcagaggcgtctcccatctgcacctgccggactggctattaccgagcagactttgatcccccagaagtggcgtgcactagtgtcccatcaggccctcgaaatgtcatctccattgtgaatgagacatctatcattctagagtggcaccctccaagagagaccggtgggcgagatgatgtgacctacaacatcatctgcaagaagtgcagagcagaccgccggagttgctcccgctgcgatgacaatgtggagtttgtacccagacagctgggcttgactgagtgtcgtgtctctatcagtagcctatgggcccacaccccatacacttttgatatccaggccatcaatggagtctctagcaagagtcccttccccccacagcatgtctctgtcaacatcaccacaaaccaagctgccccctccactgttcctatcatgcaccaggtcagtgccaccatgaggagcatcaccttgtcatggcctcagccggagcagcctaatggcatcatcctggactatgagatccggtactatgagaaggagcacaatgagttcaactcttccatggccaggagccagaccaacacggcacgtatcgatgggctacggcccggcatggtgtatgtggtccaggtacgagctcgaaccgtggctggctatggcaagttcagtggcaagatgtgcttccagactctgacagatgatgattacaagtcggagctgagagagcagctacccctgatcgctggctctgcagcagctggggttgtatttgttgtgtctctggtggctatctccattgtctgcagcaggaaacgagcttacagcaaagaggctgtgtacagtgataaacttcagcattacagcacaggccgaggctccccagggatgaagatctacattgacccgttcacttatgaggaccctaatgaagctgtccgggagtttgccaaggagattgatgtgtcttttgtgaaaattgaagaggtcatcggagcaggggagtttggagaagtgtacaagggccgattgaagctgccaggcaagagggaaatctatgtggccatcaagaccctgaaagctgggtactcagagaaacagcgtcgggattttctgagcgaggcgagcatcatgggccagtttgaccatcccaacatcattcgcctagagggtgttgtcaccaagagccgacctgtcatgatcattacggagttcatggagaatggcgctttagactctttcctccggcaaaatgacggacagttcaccgtgatccagcttgtggggatgctgaggggcatcgctgctggcatgaagtacctatctgagatgaattatgtgcaccgggacctggctgctaggaacattctggtgaacagcaacctggtgtgcaaagtgtctgactttggcctctctcgctacctccaggatgacacctcagaccccacctacaccagctccttgggrgggaagatacctgttagatggacagctccagaggccatcgcctaccgcaagtttacgtcagccagcgatgtctggagctacgggattgtcatgtgggaagtaatgtcatttggagagagaccttactgggatatgtccaatcaagatgtcatcaatgccattgagcaggactaccggctgccccctcctatggactgcccagctgccctgcaccagctcatgctggactgttggcagaaggatcgaaatagccggccccgttttgcagagatcgtcaacaccctggacaagatgatccggaacccagctagtctcaagactgtggcaaccatcaccgctgtgccttcccaacccctgcttgaccgcwckaksccagacttcacggcctttaccaccgtggatgactggctaagtgccatcaaaatggtccagtacagggacagcttcctcaccgctggcttcacctccctccagctggtcacccagatgacatcagaagacctcctgagaataggggtcaccttggcaggccatcagaagaagattcttagcagcatccactcgatgagggtccagatgaaccagtcaccgtcggtaatggcatgagaactcgatgttcctaggggaggagaggaatgaaaaggaccagggtcaaagsrsrarsagaggttgaccacggtggaatgtgccagaaagatcagcttcttggctgagaaacaacttcccacctgtgaagaatgaactggacctgctgcccatgggcaaccgccatttctcggccatggaagtgtgtagaagccgtgggaaaccaaacgcgtaatgattgacgataaagacagagaaaggtgatgctaaacagaagcgaagctgaaaccgtatgcgttgggaaccagggtgaactcagttcccatctgagagggactggagttccccgtctgcaggaagaaaggaaggaggtggagggaagagagggaagccctgggctgtgccatgctctccctcgccaatgacattcttttctttcctccattcgtactcctccctcagagcccctcctccctcccccacatccatttcccttgctcatgactcatgtagggaagtttcttcaaaataaaacccagctcctgagtcaaaacctggtctgagggagagcggttctccatccctcggtcccagagaacagagtgatatttaaaatgccatcgatggtgaggttattggaagaggaaggaccgttagcacacaccatcatggtaaataagtggagcctaagtgtcagcagacatgatgaaagccaagtcaccttgaaggtgacttttctgggaaggtcttaagcatgtaatgtcccttaataggagggaaagggacaatctcagggcagccttgtccaggtagaaatattttgcccccctgtctgttgttggtgaggggtcacaccagccagggagacctctgggaagaagctgccacacacaaggactctggaaggatccacatgtgagcccagccagggtcatacggttcccaacctgaggaaaaggtttttcacacactccttgctttctgctgagataagaaaggtgtcactctgcagagtgtgactttttacaggttaaataaagctgtatatgtctcattgttaaaaaaaaaaaaaaaaaaaaaaaaaaaaaaaaaaaaaaaaa

SEQ ID NO: 1983 - DNA, 7351 bp, Rattus norvegicus
ctgtggagctagaaccctggatggcccccgagccagcgccagggaggaggatggtgccccttgtgcctgccctcgtgatgctgggtttgatggcaggtgctcatggcgacagcaaacctgtctttgttaaggtccccgaggaccagatcgggctgtcgggaggggtggcctccttcgtgtgccaagccacaggggaacccaagcctcgaatcacatggatgaagaagggaaagaaagtcagctcccagcgctttgaggtaattgagtttgacgacggagcagggtcagtgctgcggatccagccattacgagtacagcgagacgaagccatctatgagtgcacggccacgaacagtctcggcgagatcaacacaagtgccaagctgtcagtacttgaagaggaccagctgccgtctgggttcccgactatcgacatgggacctcaactgaaggtggtggagaaggctcgcactgccaccatgctgtgtgcagctggtggaaatccagaccctgagatctcttggttcaaagacttccttcctgtggaccctgcttcaagcaacggtcgtatcaagcagctgcgttcaggtgcattgcagattgagagcagcgaggagtctgaccaaggcaagtacgagtgtgtggcaaccaactcggcaggcacacgctactcggcccccgccaacctgtatgtgcgagtgcgccgcgtggctcctcgtttctccatccctcccagcagccaagaggtaatgccgggcggcaacgtgaacctcacgtgtgtggcagtgggagcacccatgccgtatgtgaagtggatgatgggcgccgaggaacttaccaaagaggacgagatgccagttggccgcaatgtgctggagctcagcaatgtcatgcggtctgccaactatacctgtgtggccatctcttcactgggcatgatagaggccacagcccaggtcacagtaaaagctctgccaaagcctccaattgatcttgtggtgacagagacaactgccaccagtgttaccctgacatgggactctggaaataccgagcctgtgtctttctacggcatccagtaccgtgcagctggcacagacggccccttccaggaagtggatggtgtggccagcacccgatacagcattggtggcctcagccctttttcagaatatgccttccgtgtgttggctgttaacagcattgggcgaggaccacccagtgaggcagtgcgagcgcgaacgggtgagcaggcaccctccagccctccacgccgtgtgcaggcccgaatgctgagcgccagcaccatgctggtacagtgggaaccccctgaagagcccaatggcctggtacggggatatcgagtctactacaccccagactctcgacgccccttgagcgcctggcacaagcataacaccgacgcaggactccttaccaccgtgggcagcctgctacctggcatcacctacagcctccgcgttctggcctttactgccgtgggcgacggccctcccagccccaccatccaagtcaagacacagcagggagtgcctgcacagcctgcagacttccaggccaaagccgagtcggacaccaggatccagctatcatggctgctgcccccgcaggagcggatcatcaagtatgagctggtgtactgggcagcagaggatgaaggccagcagcacaaggtgaccttcgaccccacctcctcctacactctggaggacctgaagcctgacacactgtaccacttccagctggctgctcgctcagatttgggggtgggcgtcttcactcccaccgtagaggcctgtacagcacagtccaccccatccgcccctccccagaaggtgacatgtgtgagcacgggctccaccacggtccgggtaagttgggttccaccgccggctgacagccgcaacggcattatcacccagtactccgtggcctatgaggcagtggacggcgaggaccgtaaacggcatgtggtggatggcatcagccgtgagcattccagctgggacctgttgggcctggagaagtggacggagtaccgggtgtgggtgcgggcacacacagatgtgggccctggccctgagagcagcccggtactggtgcgcaccgacgaggacgtgcctagcgggccaccacggaaggtggaggttgagcctctgaactccactgctgtgcatgtctcctggaagctgcccgtccccaacaagcagcacggacagattcgtggctaccaggtcacctatgtgcggctggagaatggggagccccgaggccagcccatcatccaggatgtcatgctggctgaggctcaggaaaccaccatcagcggcctcacccccgagaccacctactccattactgttgctgcctacaccactaagggggatggtgcccgaagcaagcccaaagtggttactaccacaggggcagtcccaggacggcccaccatgatggtcagcaccacggccatgcacaccgcgctgctgcagtggcacccacccaaggagctgcctggagagctgctgggctaccggctacaataccgtagggccgacgaggcgaggcccaacaccatagattttggcaaggatgaccagcattttacagtcaccggtctgcacaaaggggccacctacatcttccggctggctgccaagaaccgggctggcccaggtgaagagtttgagaaagagatcacgacccccgaggatgcgcccagtggctttcctcaaaacctccgagtgacaggactgaccacgtctaccacggaattggcctgggacccgccggtgctggcagagaggaatggtcgcatcaccaactataccgtggtctaccgtgacatcaacagccagcatgaactccagaatgtcactggtgatgtacaccttacactcttgggcctcaaaccggacaccacttatgacatcaaggtccgtgcacataccagcaaaggcgccggcccactcagccccagcatccagtcccggaccatgcccatggagcaagtgtttgccaagaatttccgtgtggccgctgcaatgaagacatctgtgctgctcagttgggaggtccccgactcttacaagtcagctgtacccttcaagatcctgtacaatgggcagagcgtggaggtggatgggcactccatgcggaagctgattgcagacctgcaacccaacacrgagtactccttcgtcctgatgaaccgcggcassagcgctgggggcctacagcacctggtgtccatccgcactgccccagacctcctgcctcagaagccactgcctgcctctgcctttatagaggatggccgcttctccctctccatgcctcaagtgcaggacccctcgctagtcaggtggttctacattgtggtggtgcccattgaccgtgtgggcgggaacctgctggcaccaagatggagcacaccagaggagctggagctggacgagcttctggaggccatcgagcagggtgaggagaaacagcggaggcgtcggcgccaagcagagcggctgaagccttacgtggcagctcaagtggacgagctccctgagaccttcaccctgggggacaagaagaactaccgtggcttctacaaccggcccctgtctccggatctgagttaccagtgctttgtgctcgcctccctcaaggaacccatggaccagaagcgctatgcctccagcccctactcggacgagatcgtagtccaggtgacaccagcccagcagcaggaggagcccgagatgctgtgggtgacaggccctgtcctggcagtcattctcatcatactcattgtcatcgctatcctcctattcaagaggaagagaacacattccccatcgtcaaaggatgagcagtcaatcgggctgaaggactccctgttggcccactcttctgaccctgtggaaatgcgaaggcttaactaccagaccccaggtatgcgagaccacccgcccatccccatcactgacctggcagacaatattgaacgtctcaaagccaatgatgggctcaagttctcccaggagtatgagtccattgaccctggacagcagttcacgtgggagaattccaactcagaggtgaacaagcccaagaaccgctatgcaaacgtcattgcctatgaccactctcgagtcctcctcacctccattgatggtgttcctgggagtgactacatcaatgccaactacattgatggctaccgaaagcagaatgcctacatcgccacacagggtccgctgcctgagaccatgggtgatttctggaggatggtgtgggaacagcgtayagccacagtggtcatgatgaccaggctagaggagaaatcccgggtgaagtgtgatcagtattggccagcccgtggcactgagacctatggcctcattcaggtgaccctggtggacactgtggagttggccacgtacaccatgcgcaccttcgcactccataagagcggctccagtgagaagcgtgagctgcgtcagttccagttcatggcctggccagaccatggggttcctgagtaccccactcccatcttggccttcctgagacgggtcaaggcctgtaacccgctagatgcaggacccatggtggtgcattgcagtgctggtgtgggccgcacgggctgcttcattgtcatcgacgcaatgctggagcgtatgaagcacgagaagacagttgacatctatggccacgtgacgtgcatgcgctcrcaaaggaactacatggtgcagacagaggaccagtatgtgttcatccacgaggcactgttagaggctgccatgtgcggacacactgaggtgcttgctcgaaacctctatgcccacatccagaagctaggccaagtgcctcccggggagagtgtcactgccatggagcttgagttcaagttgctggccrrctccaaggcccrcrcgtctcgcttcattagtgccaacctgccctgcaacaagttcaagaaccgcctggtgaacatcatgccctatgagctgactcgagtgtgcctgcaacccatccgtggtgtggagggctctgactacatcaatgccagctttctagatggctacagacagcagaaggcctacatagctacacaggggcctctggcsgagagcaccgaggacttctggcgcatgttatgggagcacaattccaccatcatcgtcatgctgacgaagcttcgggagatgggcagggagaaatgtcaccagtactggccagcagagcgctctgctcgctatcaatactttgtcgttgacccgatggctgagtacaacatgccccagtatatcctgcgtgaattcaaagtcacagatgcccgggatgggcagtcaaggacaatccgacagttccagtttacagactggccagagcaaggagtacccaagacgggggaaggcttcatcgacttcatcgggcaggtgcacaagacaaaggagcagtttggacaggatgggcccatcacagtacactgcagtgctggtgtgggccgcacaggggtgtttatcaccctgagcattgtcctggagcgcatgcggtacgagggcgtggttgacatgttccagaccgtgaagaccctccgcacacagcgccctgcaatggtgcagacagaggaccaataccagctgtgctaccgtgcggccctggaatacctcggcagctttgatcactatgcaacgtaactactgctcccctctcctccgccgctcccctgagggctccggaggggacccagctcctctgagccataccgaccatcgtccagccctcctgcacggatgctgttgccggcagagcacagcccactgggatcacagcatttcgggaacattgccacaccagtcagagagcccagaacacctgggcaagtaggcggactggcagcctggctctggccctcgtccaccgggcccaagtggagccctgcttcaagctctctgttcactgccgcrattctcatgcttctcatggggtgggaagsgrrsrgagccccccacgtttatacattaggcggggtagactgcggggtcctagcctcttcctccgayttkmmttykgcagrkstttcactacagattgggctgctgtgggagtwsggmckyamwkgttttyytttttgagttcacgttggatccttgtacaacttctgcggaaggacacagtacacgctttccttcctcgagcagagctagggccctacctgagcaagtcggmtgtggmccgggaggcagctgagactcctgctgtcctccagcctttcagaggagatcmtattccagccaaatgcagggaaacactttattttgtkttaggktktgtttttccttgagagcctttttttaggccccacagacagtggtgggcggggaggcgataggaaacacatccccagtgtgcatttaacattcatmscmtacaaccacagacgtgtctggggggagcctggcaaggcgttcctygtcaccatcgtgtttgcaaaggttcaaamawgcaaaaawwwaaaaaaaaaraammwmrwratatttttttttaaaaaaaagaaataaagattcatcccctggcctctccttctgctccgaagtgggaggcaactcaatgtgcctggggctcgttgtgggcccacagagtcttgctgtcatccccagcggtgcagtgtggcaggtgtttgtaagctgtgggttctggccacctcggtaactgmaygrsrcaggtgagggcctgtgccacgccccacacacctcagggccaagcgggggcgtggccggcccttcaggtctagccagtgggcctggtagcacatgtctgtcctcagcgggmcagatgctttctctcctggtttscagctgtcttcrrawcsmssmtgactcgcccttcccactccttcaagtcsccctcrcaaaccaatgtkgcaagactactggacttgtatccatggtactctactcagtcctmttatswmascwysmtsagsggcmksrmvmssgwswcywcctctgggcagcmctatytaggtagtaagtgggggcgggaaagggtgcatasctgttttagccgaaggactcgatgtggacgtcctcagatatagctaggctaarcggaratcgacgsyccgggrttggtggtgttggatraracattcatttttmccttgtggacgytaktgytgyaragttcactgttswacmcagtctgtttyctatttgttaaggaaaactmcmgcmycattgcatacttcttgatggtaataaatttgaatamtcrgawwwmwwmmhvmmmrrraaaaaaaaaaaaaaaaaaaaaaaatcatcatgcggcc

SEQ ID NO: 1984 - DNA, 2634 bp, Rattus norvegicus
gctgggcaccatgcattcagctattctggccaccttcttcttgttgagttggactcactgttggtccctgccccttccctatggtgatgatgatgatgatgacttgtctgaggaagatcttgagtttgcagagcactacttgaaatcatactaccatcctgtgactcttgcgggaatcctgaagaagtctacagtgacctctacagttgatagactccgagaaatgcagtctttctttggcttagatgtgactggcaaacttgatgatcctaccttagacatcatgagaaaaccaagatgtggagtgcctgatgtgggtgwwtacaatgttttccctcgaacactcaaatggtcccaaacaaacttaacttacagaattgtgaactacacccctgatatatcccattctgaagtggagaaggccttcagaaaagccttcaaggtctggtctgatgtgacacctctgaattttaccaggatccatgatggcactgctgataycmtgatatcytttggaacyaaagaacatggtgacttctacccatttgatgggccttctggtcttctggcacacgcttttcctcctggaccaaaccttggcggggacgcccattttgatgatgatgaaacctggacaagcagctccaaaggctacaacttatttattgttgctgcccatgagcttggccactccctcggtctggaccactccaaggaccctggagccctgatgtttcccatctatacctacactggcaaaagccatttcatgctcccagatgatgacgttcaaggaatccagtctctctatggtccaggagatgaagaccccaaccctaagcaccccaaaacaccagagaagtgtgacccagccctatcccttgatgccattactagtctccgaggagaaaccatgatctttaaagacagattcttctggcgtctgcaccctcagcaggttgagcctgaactgtttttgaccaagtccttttggccagaacttcccaaccatgtggatgctgcatacgagcatccatcccgagacctcatgttcatctttagagggagaaaattctgggccctgaatgggtatgacattatggagggttatcccagaaaaatatctgacctgggatttccaaaagaggtgaaaaggctcagtgctgcggttcactttgaggacacggggaagaccctcttcttctcagggaaccacgtgtggagttatgatgatgctaaccagactatggacaaagactatccccgcctcatagaagaagaattccctggaattggcgacaaagtagatgctgtctatgagaaaaatggctatatctactttttcaatgggcccatacagtttgaatacagtatctggagtaatcgcattgtgagagtcatgccaacgaattccttattgtggtgttaaacatctttcaaaattgttatttatctcccaaagagtatttgggttactcttaggtgtatactgtggggagtggagatatcaggggagagcttagttctgtgaacaagcttcaggtaagttatctttgagcatgcarwakctrsakswcyaygcgtggctggmmscwcatwgaakartkgtmmmgkrctgaaattsagagcmcsaaggatcacctgattcttgggtgctatggagaaacaaattgataataacccacagcaaacatgtggtttatctgctgaagagtgatcataattattaatatatttattaaaaaacctaacaggcataaaataaattatatttatataactgaattgtctttacaaaaaagcataaacttacaagcatgaaaactgtggggagttcatctatggagaatcatagatgaacacagataaagggaaattcctgtaaaacacacattaacagatagctttccaaggcaagatttcagcttttcactgtgratattcagrtttwaacctattttctcacaaacactaagaagatgtcaggcactaaaggaaggggataaccactgttctgaggacagtgtggctggctttacatttggcttaatttttatgttgggtcattactcgagactgtgcacactgatagaggacacagagatggagaaattctctttttattaaatattttaggtgtttaaaaggccacaatgtggaaaatcaaaattgttataaggtacctaagcaatagcatagtttttcataaattatttgactatttgcaaataamacragkgtttcaaccctgtttacmtacccacttatwttaatgacccayagattcttttctagtgacttgtgtgacargagctaaggcagacatagtwagtagatctgttaagacacagacagcamgaataaagactgtgcgaactggacagtcacccttttgagaccaccctttcatgctcctccatgttcattagccccttccctgctttccttagtgackgacacttggtgcttactgatgtgtgaayaactattttgtcaagagatggtgtttattaaactgggacaaggaaaaagaagtgtgttttttaataatgtgttacactgtgcttatgttgtttctaataaaaacawgtgttttcmgcrgaaaaaaaaaaaaaaaaaaaaaaaaaaaaaaaa

SEQ ID NO: 1985 - DNA, 1615 bp, Rattus norvegicus
tatataaggtcagcctcttgcccatgctgtcctgtgtggtctttgcagctcgccatggctaggacagtagtagcactaaatatcctggtattgctgggcctgtgctggtccctggctgttgccaaccctcttcctgctgcccatgagactgttgctaaaggtgaaaatgggaccaagccagactcagatgtaatcgaacactgctcagatgcctggagctttgacgctaccaccatggatcacaatgggaccatgctgttctttaaaggggagtttgtgtggaggggtcactcagggatccgggagttaatctcagagaggtggaagaatcccgtcacctcagtggatgctgcattccgtggtcctgacagtgtcttcctgatcaaggaagacaaagtctgggtgtatcctcctgaaaagaaagagaacgggtatccaaagttgttccaagaagagtctcctggaatcccatacccaccagacgcagctgtggaatgccaccgtggagaatgccagagtgaaggtgtcctcttcttccaaggtaaccgcaagtggttctgggactttgccacaagaacccaaaaggaacgttcctggcctgctgttgggaattgcactgcggccttgaggtggcttgaacgctactactgcttccagggtaacaagttcctgagatttaaccccgtcacaggagaggtgcctcccagataccctctggatgcccgtgactacttcatatcctgccctggcagaggccatggtaaactaagaaatggaactgctcatgggaatagcacccatcctatgcattcgcgttgtaacgcagatcctggcctgtctgcactgctgtctgaccatcgaggtgccacctatgccttcagtggctcccactactggcgtctggactccagccgtgayrsgwggcatagctggcccatkgstcatcactggccccagggtcsttcagcagtagatgmtgcmttttcctgggatgagaaagtctatctgatccasggcactcaagtatatgtcttcctgacgaaggggggcaataacctaktaagtggttatccaawscksctgragaakgaacttgggagccctcccgggatcagccttgataccatagatgcagccttttcctgccctggttcttccaagctytacgtcacatcasgacggcggctttggtggctggacctgaagtcrssassmsrsgcgacatgggcagagctttcytgkccccatgagaaagttgatggtgccctgtgtttggaaaagtcycttggkccmtactcatgctcytccaatggtcscaacttgttctttatccatgggcccaatttatactgctatagcagtatagacaaactgaatgcakccaagagtytgcctcagccccagaaagtgaasagcatccttggctgcagtcaataaaaagccctgatgggaattagcccagcccaccccacctytccatttccattmtaataaaaccagatggtttcttcamawraawmawrrrrwawwrawwatgaagcaaccttctttatttgtattaaaaagttatcaagtcttttwwmmmwaaaaaaaaaaaaaaaaaaaaaaaaaaaag

SEQ ID NO: 1986 - DNA, 1780 bp, Rattus norvegicus
gcagctgctccgctcgctctcgaacctccgtcttcagctcactgccttcactccagacttcaccatgtccgtcagggtgactcagaaatcctacaagatgtccacctccggtccccgggccttcagcagccgctcgttcacgagtggacccggtgcccgcatcagctcttccagcttttcccgggtgggcagcagcagcagcagcttccgcggaagcctgggcggctttggcggggctggtgtcgggggcatcacggcggtcacggtgaaccagagcctgctgaaccccttgaagctggaggtggaccccaacatccaggctgtgcgcactcaggagaaagagcagatcaagaccctgaacaacaagttcgcctctttcattgacaaggtacgcttcctggagcagcagaacaagatgctggagaccaaatggagcttgctgcaacagcagaagacatccaggagcaacatggacaacatgtttgagagttacatcaacaacctccgtcggcagctggaagccctgggccaggagaagctgaagctggaggtggagcttggcaacatgcagggcctggtggaggacttcaagaataagtatgaggatgagatcaacaagcgtacagagatggagaatgagtttgtcctcatcaagaaggatgtggatgaagcctacatgaacaaggtggagcttgagtcccgcctggaaggactgaccgacgagatcaacttcytccggcagatccatgaagaggagatccgtgagctgcagtctcagatctcagacacgtctgtggtgctgtccatggacaacagccgctccctggacatggacagcatcattgctgaagttcgtgcccagtatgaggagatcgccaaccgcagccgagctgaggccgaaaccatgtaccagattaagtatgaggaattgcagaccctggctgggaagcacggggatgatctacgtcgctcgaagacggagatctctgagatgaaccgtaacatcagccgcctgcaggcggagattgacgccctcaaaggccagagggcaaccctggaggcggccattgctgatgcagagcagcgtggggaactggccgtgaaggatgccaatsccaagctggaggatctgaagaatgccctgcagaagsccaagcaggacatggcccggcagctgcgcgagtaccaggagctgatgaacgtgaagctggcgcttgacatcgagatcgccacctaccgcaagctgytgkagggcgaggagagcaggctggagtctgggatgcagaacatgagcatccacacgragmccaccagtggctacgcagragraytsrgywcaksytacgggggactcactagccccggcttcarmtatggaatgagctctttccagcccggcttcggttcygttgggggatccagcayttmtakccgcaccaaggctrtggkcrygargaagattgaaacccgagatgggaaactggtgtytgagtcttstgacwtcatrdccaagtgaatgkccastgaartcattsccrgcbtgaggtcmtgcaghtgmtyaggggtcaaggggwgacagctgtatggcagagtgcagggaaytwgsgaccagccagagtaccagccmtaaacctbtgrccamccttgggaggaatttmtathtgggatatrmcaatgcccaactcaaktgtatttwccaaaataaagcctcagtgrmtgtwwmmhmwwwwaaaaaaaaaaaaaaaamtcgagggggggcccggtacccaattcgccgagt

SEQ ID NO: 1987 - DNA, 1468 bp, Rattus norvegicus
cctcccgggatcaagatggacttcagtcgtcgaagtttccacagaagtctgagttcctcctcacaaggcccagcactcagcacgagtggctccctgtatagaaaggggaccatgcagcgtctggggttgcacagcgtctacggtggctggaggcacggcacccgcatctctgtctccaaaaccacaatgagctacgggaaccatctctccaacggaggggacctgtttgggggcaatgagaaattggcaatgcagaacctcaatgacagattggcaagctacctagaaaaagtgcgctccctggagcaatccaattccaaacttgaagcccagatcaagcagtggtacgaaaccaatgcaccgagcaccatccgggactacagttcctactacgcacagatcaaagagctgcaagatcagattaaggatgctcaaatagaaaacgcccgatgcgtcttgcaaattgacaatgctaagctggccgcagaggacttcagattgaagtttgagactgaaaggggcatgcggataactgtggaagccgatctccaaggcctgagcaaggtctatgatgacctgacccttcaaaagacagacttggaaattcagattgaagaactgaacaaggacctggccctcctcaaaaaagagcatcaagaggaagtcgaggtccttcgccggcagctgggcaacaatgtcaacgtggaggtggatgccgctccaggcctgaacctgggtgagatcatgaatgagatgagacagaaatatgaaatcctggcccagaagaacctgcaggaggccaaagaacagtttgagagacagactcaaactctggagaaacaagtcacagtgaacattgaggagctgagaggaaccgaggttcaagtcacggaactgagacgcagctaccagaccctggaaatagagctccagtcccaactaagcatgaaagagtctctggagcgcaccctggaggagaccaaggctcgttatgccagccagttggcggccatccaggaaatgctgagttccctggaggcccaactgatgcagatccggagcgacactgaacgccagaaccaagagtacaatatcctccttgacataaagacccggcttgagcaggagatcgccacctaccgccgccttctggaaggagaggacataaaaactacagagtaccagctaaacactttggaagcaaaagatatcaagaaaaccaggaagattaagacggtcgtggaggaagtggtagacggcaaggtcgtgtcctctgaagtcaaggagatagaagaaaacatataaacagctgccaatggggaggctgcttcagctgtggcgtccagaaaccgcatcaatactgtgcggtgacagtctatttatttaccgggctctgtaattaaatataaacgttttcactctggggagctgtaaagggcttgtaagattaaagccagtgaatcctgga

SEQ ID NO: 1988 - DNA, 1725 bp, Rattus norvegicus
ccgtggttctaccggcggttagttctctcttctgtgttgtcctccctcctcgttcccgatcgccgccagccggctacacgggcggcggcgcggttcctgtgggaagcgcagcacaagtcgagcggtaacgcgaagcgtcgagcccaacgcggcggaggctgtgcagccaacatggcggcggcggcggcggcgggcccggagatggtccgcgggcaggtgttcgacgtggggccgcgctacactaatctctcgtacatcggagaaggcgcctacggcatggtttgttctgcttatgataatctcaacaaagttcgagttgctatcaagaaaatcagtccttttgagcaccagacctactgtcagagaaccctgagagagataaaaatcctactgcgcttcagacatgagaacatcatcggcatcaatgacatcatccgggcaccaaccattgagcagatgaaagatgtatatatagtacaggacctcatggagacagatctttacaagctcttgaagacacagcacctcagcaatgatcatatctgctattttctttatcagatcctgagaggattaaagtatatacattcagctaatgttctgcaccgtgacctcaagccttccaacctcctgctgaacaccacttgtgatctcaagatctgtgactttggccttgcccgtgttgcagatccagaccatgatcatacagggttcttgacagagtatgtagccacgcgttggtacagagctccagaaattatgttgaattccaagggttataccaagtccattgatatttggtctgtgggctgcatcctggcagagatgctatccaacaggcctatcttcccaggaaagcattaccttgaccagctgaatcacatcctgggtattcttggatctccatcacaggaagatctgaattgtataataaatttaaaagctagaaactatttgctttctctcccgcacaaaaataaggtgccgtggaacaggttgttcccaaacgctgactccaaagctctggatttactggataaaatgttgacatttaaccctcacaagaggattgaagktgaacaggcwckrgsccacccgtacctggagcagtattatgacccaagtgatgagcccattgctgaagcaccattcaagtttgacatggagctggacgacttacctaaggagaagctcaaagaactcatttttgaagagactgctcgattccagccaggatacagatcttaaattggtcaggacaagggctcagaggactggacgcgttcagatgtcggtgtccccccagttcttgaccctggtcctgtctccagcccgtctcagcttacccactcttgactcctttgagccgttccgaggggcagtctggtcgtagtggcttttatactttcacggaattcttcagtccagagagttctcctgcaccaggccctgcacagttgcactcagtgcactcaagtgctcactgttgtttagtcagtaactgctttctggtttgaaagatgcagtggttcctccctgccctgaatccttcctacatgtcacctactgaactgtcagcctcctcagagcaagtcttaacagacttgttccagttatgcccacccaccttacattagggaaggctaagacataaggcaccttaagtcagtgacagctccaaacttacacgccatctgttggctgtagctgtctgctcagatcgga

SEQ ID NO: 1989 - DNA, 7300 bp, Rattus norvegicus
tgcttatctcctaccatgaacctggagggctggggagaggacctggtgctcccctagccataactggctaaactttgagatcacagctgcatctgctgctccagagcacccagcatggggggagtagctccgaagaggcctaagggcactccataagaactcccacacacacccaggaattgggctcgagctgtatgtatcatgcctcctctgccactggaacacagacccaggcaggagcctggtgcctccatgctggttcgatacttcatgatcccctgcaacatctgcttgatcctgttggccacttccacattgggctttgcggttctgcttttcctcagcaactacaaacctggaatccacttcacaccagcgcctcctacgcctcctgatgtatgcaggggaatgttatgtggctttggtgctgtgtgtgaacctagtgttgaggatccaggccgtgcctcctgtgtgtgcaagaagaatgcttgccctgctacggtggctcctgtgtgtggctcagatgcctccacctatagcaacgagtgtgagctgcagcgcgcgcagtgcaaccagcaacggcgcatccgcctgcttcgccaagggccatgtgggtcccgggacccctgtgccaacgtgacctgcagtttcggtagtacctgtgtaccttcggctgacggacagactgcctcatgtctgtgtcctacaacctgcttcggggcccctgatggcacagtgtgtggcagtgacggtgttgactaccctagtgaatgccagctgcttagtcatgcctgtgccagccaggagcacatcttcaagaagttcaatggtccttgtgatccctgccagggcagcatgtcagacctgaaccacatttgccgtgtgaacccacgtacacggcacccagaaatgcttctgcggcctgagaactgccctgcccagcacacgcctatctgtggagatgatggggtcacctatgaaaacgactgtgtcatgagccgtataggtgcaacccgtggcctgcttctccagaaagtacgctctggtcaatgccaaactcgagaccagtgcccggagacctgccagtttaactccgtatgcctgtcccgccgtggccgtccccactgttcctgcgatcgtgtcacctgtgatgggtcttacaggcctgtgtgtgcccaagatgggcacacatacaacaatgactgttggcgccaacaggctgagtgtcgacaacagcgggccattcctcccaagcaccagggcccgtgtgaccagaccccgtccccatgccatggagtgcaatgtgcatttggggcagtatgcacagtgaagaacgggaaagccgagtgcgagtgccagcgggtgtgctccggcatctacgatcctgtgtgcggcagtgacggtgtcacttacggcagtgtgtgcgagctggaatccatggcctgtacccttgggcgggaaatccaagtggcccgcagaggaccctgtgacccatgtgggcagtgccgttttggatccctgtgcgaggtggaaactggacgctgtgtgtgcccctctgagtgtgtggagtcagcccagcccgtatgcggttctgatggacacacatacgctagtgaatgtgagctgcatgtccacgcctgtacgcaccagatcagcctatacgtggcctcagctggacactgccagacctgtggagaaaaagtttgtacttttggggctgtgtgctcagctggacagtgtgtatgtccccgttgtgagcaccctccacctggccctgtgtgtggcagtgatggtgtcacctacctcagtgcctgtgagctacgcgaagctgcctgtcagcagcaggtacaaattgaggaggcccatgcagggccatgtgagccggctgagtgtggctcagggggctctggttctggggaggacgacgagtgtgaacaggagctatgccggcagcgtggtggtatctgggacgaggactcagaagatgggccatgtgtctgtgactttagctgccagagtgtccctagaagcccagtgtgtggctcggatggagtcacctatggcaccgagtgtgatctgaagaaggccaggtgcgaatcacagcaagaactgtacgttgctgctcagggagcctgccgtggccctaccttggctccactgctacctgtggccttcccacactgtgcccaaaccccctatggctgctgccaggacaatttcactgctgcccagggtgtgggcttggctggctgtcccagcacctgccattgcaacccccatggctcctacagtggcacttgtgacccagccacagggcagtgctcctgccgaccaggtgtaggaggcctcaggtgtgatcgctgtgaacctggcttctggaacttccgtggcatcgtcaccgatggacatagtggttgcactccctgcagctgcgaccctcggggtgccgtaagggatgactgtgaacagatgactggattgtgttcctgtaggcctggtgtggctggtcccaagtgtggacagtgtccagatggtcaagtcctgggccatctaggctgtgaagcagatcccatgacacctgtgacttgtgtggagatacactgcgagttcggggcctcctgcgtagagaaggctggttttgcccaatgtatctgcccaaccctcacatgtccagaggctaactctaccaaggtctgcggatcagacggtgtgacatatggcaatgaatgccagctgaaggccattgcctgccgccagcgtctggacatctccactcagagtcttggtccctgccaggagagtgttactcctggggcttccccaacatctgcatctatgactaccccaaggcatatcctgagcaagacgctgccatttccccacaacagccttcctctgtctcccggcagtactacccatgattggcccaccccattacccatatcacctcacaccacagtcagcatccccagaagcaccgcgtggcctgtgctgaccgtgccccctacagcagcagcctctgacgtaaccagtctcgcaacatcaatcttcagtgaatccggcagcgccaatgggagtggcgacgaggaactgagtggagatgaggaggccagtgggggcgggtctgggggacttgagcccccggtgggcagcattgtggtgacccatgggccacccatcgagagggcttcctgctacaactcacctttgggctgctgctcagatggcaagacaccctcactggactccgaaggctccaactgtcctgctaccaaggcattccagggcgtgctggagcttgagggggtcgagggacaggaactgttctacacacctgagatggctgaccccaagtcagagttgtttggggagaccgcaaggagcattgaaagcacgctggacgacctgttccggaattcagacgtcaagaaggacttctggagtgtccgcctacgggaactggggcctggcaagttggtccgcgccattgtggacgttcactttgaccctaccacagccttccaggcatcagatgtgggtcaggccttgctccgacagatccaggtatctaggccatgggccctggcagtgaggaggcctctgcaggaacatgtgcgattcttagactttgactggtttcccactttctttacgggagctgcaacaggaactacagctgctatggccacagccagagccaccactgtgagccgactgccggcctcttccgtcaccccacgagtctaccccagtcacaccagccggcctgttggcagaactacagcaccaccaaccactcgccggccaccaaccactgccaccaacatggaccggcctcggaccccaggccatcaacagccctcaaagtcctgtgattcccaaccttgcctccatggaggtacctgccaggaccaggattctggcaagggtttcacctgcagctgtactgcaggcaggggtggctctgtctgtgagaaagtacaacccccctccatgccagcttttaagggccactccttcttggccttccccaccctccgagcctaccacacactgcgcctagcactggaattccgggctttggagacagagggactgctactctacaatggcaatgcacgtggcaaagatttcctggctctggctctgttggatgggcgtgtgcagttcaggtttgacacaggctcagggccagcagtgctaacgagcttagtgccagtggaaccaggacggtggcaccgcctcgagttgtcacggcattggcgtcagggcacactttctgtggatggcgagactcctgttgtaggtgaaagtcccagtggcaccgatggcctcaacttggacacgaacctctatgtgggtggtatcccagaagaacaagttgccatggtgcttgatcggacctctgtgggcgttggcctgaaaggatgcattcgtatgctggatatcaacaatcagcagctggagcttagcgactggcagagggctgcggttcaaagctctggtgtgggagaatgtggagaccatccgtgcttacctaacccctgccatggtggggccctatgccaggcactggaggctggcatgttcctctgtcagtgcccgcctggccgctttggcccaacttgtgcagatgaaaagagcccctgccagccgaacccctgccatggggcagccccctgtcgtgtgctttccagcggtggggccaagtgcgagtgccccctgggacgcagtggtaccttctgtcagacagtcctggagactgctggctcccggcccttcctggctgactttaatggcttctcctacctggaactgaaaggcttgcacaccttcgagagagacctaggggagaagatggcgctggagatggtgttcttggctcgtgggcccagtggcttactcctctacaatgggcagaagacagatggcaagggggactttgtatccctggccctgcataaccggcacctagagttctgctatgaccttggcaagggggctgcagtcatcaggagcaaagagcccatagccctgggaacctgggtcagggtattcctggaacgaaatggccgcaagggtgcccttcaagtgggtgatggtccccgtgtgctaggggaatctccgaaatcccgcaaggttccgcacaccatgctcaacctcaaggagcctctctatattgggggagctcctgacttcagcaagctggccaggggggctgcagtgtcctctggcttcagtggtgtcatccagctggtgtctctaagaggccatcaactgctgactcaggagcatgtgttgcgggcagtagatgtctcaccttttgcagaccacccttgtacccaggccttgggcaacccctgccttaatgggggctcgtgtgtcccgagggaagccacttatgaatgcctgtgtcctgggggcttctctgggctgcactgcgaaaaggggctagttgagaagtcagtgggggacctagaaacactggcctttgatgggcggacctacatcgaatacctcaatgctgtgattgagagtgagaaggcactgcagagcaaccactttgaactgagcttacgcactgaggccactcaggggctggtgctgtggattggcaaggctgcagaacgtgcagattacatggccctggccatcgtggacgggcacctgcaactgagctatgacctaggttcccagccagttgtgctgcgctccactgtgaaggtcaacaccaaccgctggcttcgaatcagggctcacagggagcacagggaaggttcccttcaggtgggcaatgaagcccctgtgactggatcttccccattgggtgccacgcaactggacacagatggagccctgtggcttggaggcctgcagaagcttcctgtggggcaggctctacccaaggcctatggcacaggttttgtgggctgtctgcgggacgtggtagtgggccatcgccagttgcatctgctggaggacgctgtcaccaaaccagagctaagaccctgccccactccctgagctgccaccagagctgccaccttccctactgtaattattttctatttttgtaaacttgttgcatttttatatgatttttttgactgcacgttggccagaaggactgctggcctggcctcctttccgtccggcagctgtgctacagagacaaagtggtgctaagggaactcttaagtagaccgtagcacctagagccctgggctttgaaaggcagccttaggacacactcctctgcctaaggtaccgtgcctcagccccttgcactgtatgttcctacctgtccacttgtattggtcctttgggtctcctggcccattgctaggccctgtttgtgtgttattaatgtgttattggatgagaactgtatccctgagcaggagggtgctgttggggttgagggggcccttcattaaaccaagtaacattggswcswkkgtakgttcccacttaarctgctctccygtgtgtgctaagggccagcctcaccccaagctagcctgkacccctartgckccctgtgamartactgtgatataaaaaacctgataattggggcatcatcttacttcccaaaatgtgtttgcctgtccctggaggctgtaaacasaagccakgctccawctasgttgtccyggcyggtcctcagttggccttccccayctaytcagttaycctgaacatggtcatcctttccccaaaacatcakgccacttasgaatccctaasagggagtgcgtcactacsggatgtggttgacctccattgcttacctgcctaakcagccagctacatctgtctctcaaagatgtccagccagactcctaactatattcttcaaccattgattttgtttgawttctgatgtggaagtrcggtcaktcctgttctarcgcacagcaawctttarttggtytracgtsagggcwacccacagttggyccactgtaacgatggtcatccttgtttgagtgacagtwactrccgggtgtccasccaaggrcaggtactakaatggcasrgatgactatagagccaaaaatgactgaaactgaagcaactgtctgctcctccatcccctatctttaatgyccagcacagtcatctygggagaaaaaccagacaaatctgggatgggggcagtctgrcckwmttcctgmttcsgtgatcaaggctaragggaactgcatggtatcytgttactaactccagtatgtgtcaatgtcaaataccatgaaataaagtctgawamccttwaaaawaaaaaaaaaaaaaacaa

SEQ ID NO: 1990 - DNA, 7853 bp, Rattus norvegicus
ccttaatatttatatctccacgttgttttattttttttccccttgttttggggggcttttattttccttttgtttttaaaattttatccttgtatatcacaataatggaaagaaagtttatagtgtctttcacaaaggagcgtagtttaaatgccccgccgcgcccgcgcccgcccctgccagaacggcgctcggcggcgcggcccggagcggcggcggcggtggcggcggcggcggccgttcccgcgggctcgccctcaggtgttcgcggctgccgtcgccgaagatcgcgggtcggggcctcgcggcgatcgccctgggcgggccggagacgcctcgggccccctggcggctcggggtccacccggcgccgcgggcccgccgctctccctcgcctcgcctttgcgcctcttctcgctctgcctctccatttattattattatcatttttgttttcaaatggtgtagccgccagaggtgcggtgctaaattcttggaaggggcccggatgtactgaggatgcattacaatctcacgaaaggaggcggtagtggaaagcagcagtttttggtgtttggtgcaataatggggatcaggtaatcacccgaaggagcaagaaccactgcggatccacggcttcctggatttgcgcgagagccgccggcctcggaggagggatccatccagaggctcgcgggctgttgctgcatttcttcctctttgtggcttctcctttccaagcagtttttggccaatggtcaatgaaaacacgaggatgtacgttccagaggaaaaccaccaaggttccaactatgggagcccacgcccagctcatgccaacatgaatgccaatgcagctgcaggacttgcccccgagcacatccctactccaggggcagcactgtcctggcaggcagccatcgrtgccgcccggcaggccaagttaatgggcagtgctggcaatgcgaccatctctaccgtcagttccacacagcggaagcggcagcagtatgggaaacccaagaagcaggggggcacaactgccacacggccgccccgggctctgctctgcctgactctgaagaaccccatcaggagggcatgcatcagcattgttgaatggaaaccatttgaaataattattttattgacgatttttgccaattgtgtggccttagcaatctatattccctttccggaagatgactccaacgccaccaactccaacctggaacgggtggagtatctcttcctcatcatttttaccgtggaagcatttttaaaagtgattgcctacggactactcttccaccccaacgcttacctccgcaacggttggaatttactagattttataatcgtggttgtagggctttttagtgcaattttagaacaagcaaccaaagctgacggggccaacgctctgggagggaaaggagcgggattcgatgtgaaggcactgagagctttccgtgtgcttcgtcccctgcggctggtgtctggagtcccaagtctccaggtggtcctgaactccatcatcaaggccatggtgcccctgctgcacattgccctcctcgtgctcttcgtcatcatcatctatgccattatcggcctggagctcttcatggggaagatgcacaagacctgctacaaccaggagggcataatagatgttccagcggaagaggatccctccccttgtgctttggagacaggccatgggcgacagtgtcagaacgggaccgtgtgcaagcccgggtgggatgggcccaagcacggcatcaccaacttcgacaacttcgccttcgccatgctgacggtgttccagtgtatcaccatggagggctggacagacgtgctgtactggatgcaagacgctatgggctatgagttgccctgggtgtattttgtcagtctggtcatctttggatcctttttcgttctaaatctggttctcggtgttttgagcggagagttttccaaagagagggagaaagccaaagctcgaggagacttccagaagcttcgtgagaagcagcagctagaagaagatctcaaaggctacctggactggatcacccaggcrgaagacatmgaccctgagaatgaggacgagggcatggatgaagacaaaccccgaaacatgagcatgccyacaagtgagactgagtctgtcaacaccgaaaacgtggctggaggtgacatcgagggtgaaaactgtrgagcccggcttgcccaccggatctccaaatccaagttcagccgctactggcgccggtggaatagattctgcagaagaaagtgccgtgccgcagttaagtccaacgtcttctactggctggtgatsttcctggtgttcctcaacaccctcaccattgcctccgaacactacaaccagcctcattggctcacagaagtgcaagacacggccaacaaggccctcctggcccttttcacggcagaaatgctcctgaagatgtacagcctgggtctgcaggcctactttgtatccctcttcaaccgctttgactgtttcattgtgtgcgggggcatcctggagaccatcctggtggagacgaagatcatgtcgcccctgggcatctccgtgctgagatgtgtgcggctgctcaggattttcaagatcaccaggtactggaactccctgagcaacctcgtggcgtccttgctgaactcagtgcgctccatcgcctccctgctgctactcctcttcctcttcatcatcatcttctccctcctggggatgcagctgtttggtggaaagttcaactttgatgagatgcagacccgtaggagcacgtttgataacttcccgcagtctctcctcactgtgtttcagatcctgaccggggaggactggaattcggtgatgtatgatgggatcatggcttatggcggcccctcttttccagggatgttagtctgtatttacttcatcatcctcttcatctgtggaaattatatcctactgaatgtgttcttggccattgcggtggacaacctggctgatgcggagagcctgacctctgcccaaaaagaggaagaagaagagaaggagagaaagaagctggccaggactgccagcccagaaaagaaacaggaggtgatggagaaaccagcagtagaggagagcaaagaggagaaaattgagctgaagtccattacagcagatggagaatccccgcccactaccaagatcaacatggatgacctccagcccagtgaaaatgaggacaagagtccccactccaacccaracactgcaggtgaagaggatgaggaggagcccgagatgcctgtgggcccacgcccccggcccctgtctgagctgcaccttaaggaaaaggcagtccccatgccggaagccagtgcatttttcatcttcagcccaaacaacaggttccgcctgcagtgccaccgcattgtcaatgacacgatcttcaccaacctcatcctcttcttcattctgctcagtagcatctccctggcggctgaggaccccgtccagcacacctccttcaggaaccacatcctaggcaatgcagactatgtcttcactagtatctttacattagaaattatccttaagatgactgcttacggggctttcctgcacaagggctctttctgccgaaattacttcaatatcctggacctgctggtggttagcgtgtccctcatctcctttggcattcagtccagcgcgatcaacgttgtgaagattttaagagtgcttcgtgtcctcaggcccctgagggccatcaacagggccaaggggctaaagcacgtcgttcagtgtgtgtttgtggccatccggaccattggaaacattgtaattgtcaccactctgctgcagttcatgttcgcctgcattggggtccagctcttcaagggaaagctctatacctgttcggatagttccaaacagacggaggcagaatgcaagggtaactatataacatacaaagacggagaagttgaccaccccattatccagcctcgaagttgggagaacagcaagttcgactttgacaatgttctggcagccatgatggccctctttaccgtctccaccttcgaggggtggccagagctgctgtaccgctccattgactcccacacagaagacaagggtcccatctacaactatcgtgtggagatctccatcttcttcatcatctacatcatcatcattgccttcttcatgatgaacatcttcgtgggtttcgtcattgtcaccttccaggagcagggggaacaagaatacaagaactgtgagctggacaagaaccagagacaatgtgtggaatatgccctcaaggcccgacccttgcgaaggtacatccccaagaaccagcaccagtacaaagtgtggtacgtggtcaactccacctacttcgagtatctgatgttcgtcctcwtcmtgmkcwwcaccrtctgcctskmcwtgcagcactacggccagagctgcctcttcaaaatcgccatgaatatactcaacatgcttttcactggcctcttcacggtggagatgatcctgaagctcattgccttcaaacccaagsdhkryytydgwgatscmtggaatrywtttgackycytsatygtyrtkggkagcatwrttgatrtcawtcwmmsdgrwwctavtccagctgaacatacccaatgctctccctctatgagtgcagaggagaactcccgcatctccatcaccttcttccgcctcttccgggtcatgcgcctggtgaagctgctgagccgaggggaaggcatccggaccctgctgtggaccttcatcaagtccttccaggccmtgccctatgtggcccttttgattgtgatgctgttctttatctatgcagtgattgggatgcaggtatttgggaagattgccctgaatgacaccacagagatcaatcggaacaacaacttccagacgttccctcaggctgtgctactgctcttcaggtgcgccactggggaggcctggcaggatatcatgctagcctgtatgccaggcaagaagtgtgctccagagtctgagcccagcaacagcacgraaggggagacaccctgtggcagcagtttcgctgtcttctacttcatcagcttctacatgctctgtgccttcctgatcatcaacctctttgtagctgttatcatggacaactttgactacctgactagggattggtctatccttggtccccatcacctggatgaattcaagagaatctgggccgaatatgaccctgaagccaagggtcggatmaaacacttggatgtggtgaccctcctccgtcgaattcagcccccactgggttttgggaagttgtgtcctcaccgtgtggcctgcaaacgcctggtgtccatgaacatgcctctgaacagtgatgggacggtcatgttcaatgctacactgtttgcccttgtcaggacagccctgaggatcaaaacagaagggaacctagagcaagccaatgaggagctgagagccatcatcaagaaaatctggaagaggaccagcatgaagctgttggaccaggtggtgccccctgcaggtgatgacgaggtcacagtgggcaagttctatgccaccttcctgatccaagagtacttcaggaaattcaagaagcgaaaagagcaggggctggtcggcaagccctcgcagaggaatgcactgtctctgcaggctggcttacgcaccttgcatgacattgggcctgagatccggagagccatctctggggatctgacggctgaggaggagctggacaaggctatgaaggaggcagtgtctgctgcctccgaagacgacatcttcaggagggctggaggcctgtttggcaaccacgtcagctactaccagagtgacagcaggagcaacttccctcagacgtttgccacccaacgcccactgcacatcaacaagacagggaacaaccaagcggacaccgaatcaccgtcccatgagaagctggtggactccactttcacccccagcagctactcatccacgggctccaatgccaacatcaacaatgccaacaacactgccctgggccgcttcccccaccctgctggctactccagcacggtcagcactgtggagggccatgggcctcccttgtcccctgctgtccgggtacaggaggcagcatggaaactcagctctaagaggtgccactcccgagagagccagggggccacggtgagtcaggatatgtttccagatgagacccgcagcagcgtgaggctgagcgaagaagttgagtactgcagtgagcccagcctgctctccacagatatactctcctaccaggacgatgaaaaccgacaactgacctgtctagaggaggacaagagggagatccagccatctccgaagaggagtttccttcgctctgcctctctaggtcgaagggcctccttccatctggaatgtctaaagcgacaaaaggatcaaggrggagacatctctcagaagacagccttgcccttgcatctggttcatcaccaggcattggcagtggcaggcttgagccccctcctgcagagaagccattctccttccacgtttcccaggccacgccccacgccccctgtcactccaggcagccggggcaggcccctacagcccatccctaccctgcggctggagggggcggagtccagtgagaaactcaacagcagcttcccgtccatccactgcagctcctggtcagaggagaccacagcctgtagtgggggcagcagcatggcccggagagcccggcccgtctccctcaccgtgcccagccaggctggagctccaggcagacagttccacggcagcgccagcagcctggtggaagcggtcttgatttcagaaggactgggacagtttgctcaagatcccaasttcatcgaggtcaccacacaggagctggctgacgcctgcgatatgacaatagaggagatggagaacgccgcagacaacatcctcagcgggggcgcccagcagagccccaacggcaccctcttaccttttgtgaactgcagggacccagggcaggacagggctgtggtcccagaggacgagagctgtgtatatgccctggggcgaggccrgagcgaggaagcgctcccggacagcaggtcctatgtcagcaacctgtagtccgcagggctggcgagacgcgggtgttttttattcgtttcaatgttcctaatgggttcgtttcagaagtgcctcactgttctcgtgacctggaggtaaccggaacagcgtcttcattcactgctgtcgggataagcctcagagctgggcggtgtacgaagtcggcttttcaggggagaaggccaaggccgtggtgcgggggctccagcaccttcccacggcagcaccgcccaaaggaccccaccccccctaagcaaaagggtgttttccccttgcttgtataaacagtcatttgcacatgttctgtctgagcctggccgtctctatggagcagggccccagggatctatggcaggaatggccagtgtccccagtaggagccggaaggtggctgcaaggttcccagcagtgcagatctggtccctattgcccttcagggacccttcccctgctggaactgaggagcaggtgcaggagccagtgcagaccacaccacctgccctcagctagccagacctgggggcgcaggctgcttgcctggtgctctgggtttcatagtttgatggttcttgtcagcatgttgcggttttctaggttttgatttctttattactatttgttgtgttttcccacggggaggggaggaagaagagcgtttacaactgcgcagctcacg

SEQ ID NO: 1991 - DNA, 2617 bp, Rattus norvegicus
cgggcgcgttgttgctggacgaagctgagtcctatacagcgctcgcagctctcccgatcatggcttcttcgagttccttcacctattattgtcctccatcttcttcccctgtttggtcagaaccgctgtatagtctgagacctgagcacgcgcgggagcggttgcaagacgactcagtggaaacagtcacgtccatagaacaggccaaagtagaagaaaagatccaggaggtcttcagttcttacaagtttaaccacctcgtaccaaggctcgttctgcagagggagaagcacttccattatctgaaaagaggccttcgacaactgacagatgcctatgagtgtctggatgccagccgcccctggctctgctactggatcctgcacagcttggagctcctcgacgaacccatcccccaaatagtggctacagatgtgtgtcagttcttggagctgtgtcagagtccagacggtggctttggagggggccctggtcagtacccacacctcgctcccacgtatgcagctgtcaacgcgctatgcatcattggcacggaggaagcctacaacgtcattaacagagagaagctccttcagtacttgtactccctaaagcaaccggatggctcttttctcatgcacgtcggaggagaggtggatgtaagaagtgcgtactgtgctgcctcagtagcctctctcaccaacatcatcactcctgacctcttcgaaggcactgctgaatggatagcaaggtgccagaactgggaaggcggcattggcggggtgccagggatggaagcccacggtggctacaccttctgtggcttggctgcgctggtgatcctcaagaaggaacgttctttgaacctgaagagcttgctacaatgggtgacaagccggcagatgcggttcgaaggaggatttcagggccgctgcaacaagctggtggacggctgctactccttctggcaggcaggacttctgcccctgttgcaccgggcactccacgctcaaggtgaccctgccctcagcatgagccactggatgttccatcagcaggcgctgcaggagtacatcctcatgtgctgccagtgtccggctgggggtctcctggacaaacctggcaagtcacgtgacttctaccatacttgctactgcctgagcggcctgtccattgcccagcattttggaagtggagccatgctgcacgatgtggtcatgggtgtgcctgaaaatgttctgcagcccactcaccytgtgtacaacatcggacctgataaggtgatccaggccaccacacactttctgcagaagccggtcccaggctttgaggaatgcgaagatgcggtgacctcagatcctgccactgactagaggaccccatggctcccccaaatcccccgtcagacaaggtttctccgtttgggtacatagcacagtccgtgctacttgagccttggccactgtggagttgtggtttctttgtcctttcctgtcaaacaaaacaaagccatcagctctgggttggaatacamaawrrwrwrawwwttaaaattattttcatacctgtcaaaccaaaactctgggagccgatgtagtaagcagggttggagagcaatgcatgctgggaagcagcagcctcctccagcagccaggcccacaatgctgaaatggaaggtgtctgtgagtatctccacatcacagccactgctgtgcctcscacctacacaccattcagtcagcagatgggctcctctctggtataaatgtcagctctgtgcaagggcggmgctgtgggtccagccaatayacgctctctggaaaacagcactgggctccagtgggcatattcatacttgtctcttttaccccagtcatttgcgaaggacaggggccaggaatgaagaagggtcttagattgagccctccccacaacctgaggagaactgatctcatatttctccaaggccatgtttgtatgagcaagacttgttttgccctaagtatgacgactagacccaggtaatcaattmtgagtgkwrrakcrrcckcwaggtgaactctgtgccagaggaagcagcctccccagtgyccagccccygcctctccccatcatgyrscasgagaggccctcctcacggcagtgctgcagcccaggctccttctagtcctttctccccacccaccctccaagacagtgctcttttctcatccagggtgttaacactactaaggcttcaccgtaatcgatcactcaggatttactcstgccctgcccactccaggctctctgaaacacagtcaagtgctaggcaagctagctgctgctgggacagtgaccagcaggaaggcaagtgctgtccgtgtgctgaattctggaactgcctctgcaccggctgagtttgctcacctatccactgctacagtcatagcaagctcatgccgctgtcccagcctgtgcgagcaggcagacgggagcttggagatgcagcatgaggttcttccccaaaccactggccatttgctgcctctgattccccattgctttggtgtactgggctatgtattacctccttgaaataataaaagagtaacatttwmaaaaaaaaaaaaaaaaa

SEQ ID NO: 1992 - DNA, 1867 bp, Rattus norvegicus
ctcgagaccccgtccccctcccagtggacgccaagtgcgcttgcgcggtaacagccgcccgcacttgtgccatttcccccttcttccgagccacctttcccccctccctcccttccctatccccttccctgccctgcttccctcccttccccctagactcttcgttgtggtcttcccgttcctgatccttcccctaccccacccccaatccccaggaccctggcgccccagccgcaggtgctgcgcccacgggagccacgatgtgcgtcctctcagaacctgtgggcctccttgccctcactgccctccgtttcctcctcgcaggcccccacatccttcagaatgacgttggacgtggggccagaggatgaactcccagactgggctgcggccaaagagttttaccagaagtatgaccccaaggacatcattggcagaggagtgagctctgtggtccgccgctgtgtccatcgagctactggtgatgagtttgcagtgaagatcatggaggtgtcagctgaacggctgagtcttgagcagctggaggaggtgcgggatgccacacggcgagagatgcacatccttcgccaggtcgctggccacccccacatcatcactctcatcgattcctacgagtcttctagcttcatgttcctggtgtttgacctgatgcggaaaggagagctgtttgactatctcacagagaaagtggccctctcagaaaaggaaaccaggtccattatgaggtctctgctggaggcggtgaactttcttcatgtcaacaacattgtacatcgagacctgaagcctgagaatatcctcctagatgacaatatgcagatccgcctttcagattwtgggttctcctgccatttggaacctggcgagaagcttcgagarmwgwrwrgramwsmrggatatctagcaccagagatccttaaatgctccatggatgaaacccacccaggctacggcaaggaagtcgacctctgggcttgtggggtaatcctgttcacacttctggctggctcgccaccattctggcatcgacgccaaatcctgatgctacgcatgatcatggaaggccaatatcagttyaskwsrcccgagtgggatgatcgttcaaacaccgtcaaagacctgatcgcaaagctgctgcaggtggatcctaacgcacgcttgaccgctgagcaagccctacagcaccccttctttgagcgctgtaaaggcagccagccctggaacctcacacctcgccagcggttccgggtggcagtgtggacaatactggctgctggacgagtagccttaagcagtcaccgtttacggccactaactaagaatgcactcttgagagacccctatgcactgcggccmgtamggsgcctcattgacaactgtgccttccggctctatggacactgggtgaagaagggggagcagcagaaccgggcggccctsttccagcaccagcctchtaggcctttccccatcattgccactgacctggaaggagactccagtgctatcacagaggatgaagttaccttggtacggagctwggaccttctccctgggcaagccacgaagtaggactccccaggaggagattttctttttctatcattccaaccacttgggactcagatcttagccctgccttgccaagtctacaactgrgmaygmkgcttgtcacagaaaccagccctttacccctacctacctactctggacttggagatcggggcrgagatggaagggaacctcttcccagcattgtgcctggccttgccatcaccgcctgtgctgcatctgaaataaaacctgctacaagccwrrrararmmarwaaaaaaaaaaaaaaaaaa

SEQ ID NO: 1993 - DNA, 4931 bp, Rattus norvegicus
aattacccactaaaacaagaagtctgccttctgctgtccccagcccctggcaacctgcccttctttctgtttctacaaattttgatgatttttacttgccttgtatttgtagactcaaacagtattattttcttaggattggcttattcaacgtagtataacatcttcgagcacgtgccagagtttttttttttccttttaagacagtaaattaaaagcaattattttaattttattgggattctcttatttttctgcttatgagattccccctataactattccccctataacccctttaactattttttttggtgggggttttaaaaagcagagataaatgtatgcccaatctgttcttcaaaaggaaactcacatttatttgtgaaatgtgatgtctaaggacagactcttggatgcttttcaaaaatcaccttaactttttaggatccattgaacaatagaattacagaaggagtttacatttaatctgaccaaagtaagagtctttttatttgtgttgttttgctggttttttttttgtttgtttgtttttttttttttttgataccgaattgtagaccactctggccttgaactcagagatctgcctgcctctgcctcccaaagtcctgtaccaggacagcaccatgcctccaccaccaccaccaccacacctgccacaacacataaattcttaagctccaccttacttctattgaatctgaaagtggggcgtgtcttgtgtaccactatttcaatcagccctctagaaaatcagattcttctgggacttgagaacctcctagtcttctagaaataaccctgcaaaactgtatctagagattcaacattttacgttgattggtccaaactctaggatttccagactgtgaggtcactatcttttggcaaacgggttgtgagttgtctataacatttataatccaaatggtcaagactgttttcagtagacaaggcaggtcttgtcaagtatggatattgttgcatctttatcctccatcgcagtggctgcacttactggaccactacagtcaaggtcaggtcatctacaggatagtcaagaccatctagttggacttgatgtcttgaaaactttgatagatataacaaaaccagagtcattgatgaaatgctgaaggtataaaaaccaaggccttgggcaagcacagttcctgtatgcatacttttctctctttccattttcctttttctacgagtgcatatttatttctcatacaagaattgtttgatcaaaacacacataactattgataagaaatgctaagtgattagttggccagagccattattctgcaatgtaaagcctgtccaaactattggcttgtccttggtactgccttgtcttagcagttgtatttaagcgacttggcatctctgtccaatttttccatgcggaaatagacttggtagcatttttattgcattttggtgctgagcatttaaattcttttgcaactgcttctagtctgatcctctgagaaacgagtgcaaattgctttgtaaatcaacaaccaaagaatcaatagcaatgatgttcttttaaagaattcaagatgagtcgtccctaaaagacgccgtcattgctcgccaacattcaaaagcaagcatctttaaaatgaaggaaatcataaaacattgtctcaaagattatgtggtggtgattaaaagcccggacaggatttgagaagtgaaaatttgttctgagaacagttcttgagtagcataatgagaacatgggaaagaagccttttctttttcaggtcatggctattatcttaagacttgatacaaacaaaaactattagagcgctgatggcaaagacggtttaaacccaacgtatctgctcttagtattatactcttggaaacctcccagaatgcgagaccgacaacaggtcatttaatccaattactaatttcatgcccgagtcacttctacagctcgaaagctacaggagctcccggcattgtgactaatggaagcaggccatctaacatgcctcttataagaaatctatgaagctaaaaacccatgttggaggatgatactgaaaatgccactcttgctaatgtatggaagaagagttccttctttcctcccgccttgggaaaggtgtcaaccatcgtggcagagactaataattgtccccagatttggttttcctccatctctaagcatttgcttgcacctaactgctcaaaataaagaatgtcttcccccaatctccccactgtggtgtgcaattgctattgctgtgcaatgaactaccccaaaatttcaaggctaacatatacctcctccttttttttacaggacttggaccgaacccagggccttgcgcttgctaggcaagtgctctaccactgagctaaatccccaactcccctcctcctttttttaagtgctcaccaactccatggatcagaactttggccgggcacccatcagagggctagagtgttctaacatcaccactggtcaaggcagtcacaatcccactcatgctccactccgggcttaggaattgcaaagttgttttatggaagagcccaggggctggaagtcaccattactcactttcagaaaatataaaatttgtgtggccaaaagttctagccaaaagatgaggagtgtttgctgtgggagggatgctcccgtctccttcccactttcctgttagtgactggtggtggaacagccataaagtcagaatcacacagcagtgagcctgaatgagtgtggatccttaattgccattgagtagcacaaaggccttccatagctcactttacgagtcagagaaataaaatcttaaaactagtctgatttgcattttctgctgcatctgagcaatgatcatcataatgtaaacatcgttataaatgatagaaatacatcctagattattggatctgtaaaacattatggttgggagcttgactaatagtatgttccctatggcgtcctgtgacaatcaccacattgtctgagtttatttcttacacactccacaattacgatttagaagtatgttatttttttaatggcattattatcatgaggttaagaaactgaacttgagaaatgcactgaaaaagtacaagataaacgctgtaaacaaatgggtaagatgcatttaaaaaataaagtgaaatggtaaatggtattttctttttttttttttttggttcttttttttccggagaccgaacccagggccttgcgcttcctaggtaagggctctaccactgagctaaatccccagccccgaaatggtattttcttatttctagcttctgggctttgtgagtcacacattttttattttgtgtggacagaaaggaaattgagaataactaagggaataaaataaaactcaagagagaatagctaagtgagtttgcacttggacggctttaacaatgaaacgagcatcgtagaaagtgaagtatgtgtatttaaacagcatttgatttggcaaaagataatatttttttctgtttccaaattctcagaataggctcgttttaaagacaagggctttctttaaaaagcacaagtgtgtagttctccttttctttatgctgctatattcgaatcttggagatttaattgaaatgactcaaaatgtcaggaaaggttttaaaaataagcaacaagaggctaatcaggcaacacaccctttgttgtctgactatctgccctgacttcccggtatcctgtctgaaaggtatcaactaacttcggtaagtgcttcacagtaaatgcaggcctttgtctcagtaaccagtaggaaatgcaccaagcccgcatggcagagcatcagtaaggcaaaccatcaccacagttccgaggctaaaaggcggactaaaacctagtgaaagaacatgtaacaaacaagtggcagtatcttatatccagaagaggatataggtaaggctgtgtgactaacaaaagacaccacgcgcatttctcttgccgctggattcaaggaaaagaaaaagccaccaatgtggaggctgaagtttcagaacgaatggcgcggcaccagctttgagtgggctgggcagaaagaagcgtgggatttgcccaaggagctcaggtggagcgcgcggcctcggccccacgccccaggcgcccgctgcctccacccttaggccacttgagaggcggcagcgctcccgcccgccgggttgccatggtttccggggatcacgtgggcgcgcgggcgggggcggggcgccgggcgggggggggggcggtgcagcggcggcgggagcgggagcgggaggagctggagatgctgccaaccctccccgggttgtgctcgctctgctgccgccgccgcacggagcagcctcgccgggggcccagtgcgccgcgctcgcagcccgtagcgcccggggcgctcgctcgggggccgcgcagcccaagacccgaccgcggataggaggcgagggcggcgtccaggcgcctcggcgtgcacaggcaggatgagcatcgagatccccgcggggctcacggagctgctgcagggcttcacggtggaggtgctgaggcaccagcccgccgacctgctggagttcgcgctgcagcacttcacgcggctgcagcaggagaacgagcgcaagggcgccgcgcgcttcggccatgagggcaggacctggggggacgcgggcgcagccgccgggggcggaacccccagtaagggtgtcaacttcgcggaggagcccatgcgctccgattccgagaacggcgaagaggaggaggccgcggaagcaggggcgttcaacggtgaggaccggacccctcgcaccctgagccctggccgccacgtccgtctcactctcgaaccgcccttgctcttgaaccctgtgctgagctc

SEQ ID NO: 1994 - DNA, 895 bp, Rattus norvegicus
gactctgggaaagcccaaagaactgaacaataatgcccctgacctctgttcttagtaacctgtgatcagttacttgcgtcactgtactagatttcatgtgacatcttatactaaacctggaaatgaagttaatttgcatcaccagcccatcccagccctggttaggagttatattacttctgtgtcactgcctggtgctgaacaatcttgaaagaaatagacaagaagtcgacccggtttgtgaattatgacctgtacttcacttttgcttatcctcctggctgtctgctcaggtcaggaggcctttccacatggcagtgggyawgmartsgwsmmrrwywktgawttmtgayytktacttsacywytgswtmtcctcmtggctgtytgctcaggggccatttcccaggctgttgtgactcaggaatctgcactcaccacattacctggtggaacagttacactcacttgccactcaagtactggggctgttacaaccagtaaytatgccaactggatycaagaaaaagcagatcatttattcactgstatagtmrstgvcaccarcaacagggctccaggtgctcctgccagattctcaggctcyctgcttgarggcaaggctgcccttaccatcacaggggcgcagattgaggatgaggcaacgtatttctgttctctctggtacarcrrccrytwysryddtggmrkgtgsarmwraggaagtaggacaaaaaccactcttgtacagcgtcccaattactgttgtcttaaatgtggctacatctttctagactgttctctgttactgtagagaagattataaaagttgttgtctcaagcaacaaaatgttttatttcaacaaattttataataatgatgccttgatgacaag

SEQ ID NO: 1995 - DNA, 1563 bp, Rattus norvegicus
gaattccggggggaggctggccgggacgggatgggcgacacggggcgggattcccgaagcccagacagctcctccccaaatcccctttcccaggggatccctccctcttctcctcctggcccacctcacaccccttcagcacctccacctccaatgccacccccgccactgggctcccccttcccagtcatcagttcttccatggggtctcctggtctgccccctccggctcccccaggattctccgggcctgtcagcagccctcagattaactccacagtgtcgctccctgggggtgggtctggcccccctgaagatgtgaagccaccagtcttaggggtccggggcctgcactgtccaccccctccaggtggccctggggctggcaaacgactttgtgcaatctgcggggaccgaagctcaggcaagcactatggggtttacagctgcgagggctgcaagggtttcttcaagcgcaccattcggaaggacctgacctactcatgccgagataacaaagactgcacagtggacaagcgccagcggaatcgctgtcagtactgtcgatatcagaagtgcctggccaccggcatgaaaagggaggcggtacaggaggagcgacaacgggggaaggacaaagacggggatggggatggggctgggggagcccctgaggagatgccggtggacaggatcctggaggcagagcttgctgtggaacasragrgcgaccaaggcgttgagggyccyggggscaccgggggkrgtggcagcagcccmaatgacccagtgactaacatctgccaggcrgctgacaagcagctgttcacactcgtggagtgggcmaagaggatcccgcacttttcctccctacctctggacgaccaggtcatactgctgcgggcaggctggaatgagctcctcattgcgtccttctcccatcggtccatcgatgtccgagatggcatcctcctggccacgggtcttcatgtgcacagaaactcagcccattctgcaggcgtgggagccatctttgatcgggtgctgacagagctagtgtccaaaatgcgtgacatgaggatggacaagacggagcttggctgcctgcgggcaatcatactgtttaacccagacgccaagggsctctccaaccctggagaggtggagatccttcgggagaaggtgtatgcctcactggagacctactgcaagcagaagtatcctgagcagcagggccggtttgccaagctgctactacgtcttcctgccctscgctccatcggcctcaagtgtctggagcacctgttcttcttcaagctcattggcgacacccccattgacaccttcctcatggagatgcttgaggctccccaccagctagcctgagtccggatgcacacggagggagagtgtcgctgaggaggacttgagccgcgcgggggcgagaaccatggacaggtgcagagcaggaggggacttgcccatcctgccaggggtctggcaacacttaacagggtttgcgtggtccccaagtcagagcagagggaccccagatccctgtga

SEQ ID NO: 1996 - DNA, 2685 bp, Rattus norvegicus
gtaaactgctctgtggactgccaactccaggtcttcaattggtcctgtccatctactccctcaactcccccaccctcaacaccaacaacaccaacatcctcccagacaaccacaccctccacaccatctaccacatcttcgaagtctacaccctctacgccccaatccacatcatccaagtcaacgcccagcacaccacccaaaaccacccttcctgggtgcctcgattttgatcctcccagacaggtcaatgagacctggtggctgtgtaactgtaccatggccatctgcaaatatgacaacgtagtggagattgtggagctggagtgcaaccccccacccatgcccacctgttccaatggcctcaaacccgtgcgtgtccctgaccctgatggctgctgctggcactgggaatgtgactgctactgcactggctggggggacccacactttgtcaccttcgatggactttactacagttaccagggtaactgtacctatgtgctggtagaggagattacccccacagtggacaactttggggtctacattgacaactaccactgcgatgccaacgacaaggtgtcctgcccccgcacacttattgtgcaccatgagacccaggaagtgctgatcaagactgtgcacatgatgcccattgaggtggaggtacaggtgaacaagcagttagtggctttgccctacaagaagtatggactggaggtataccaatctggcatcaactttgtggtggacatccccaggctgggtgcccaggtctcctacaatggcctgtctttctccatccggctgccttaccacctgtttggcaacaacacaaagggccaatgtggcacctgcaccaacaatactgctgatgactgtatcctacccagtggggagatcatttctaactgtgaagttgctgctgatgagtggttggtgaatgacccgtccaagccacactgtccccacaaaggcctcaccactaagcgcccagccatcacgacaccaggacctttccctgaaaactgcactgtgtctcctgtctgtcagctcatcatggacagcttattctcccagtgccaccccttcgtgcctcccaagcactactacgaagcttgcctgtttgatagctgctttgtggctggctctggtatggagtgtgccagtgtacaggcctatgctgccctctgtgctcaggaaggtgtctgcattgactggcggaatcacacccagggggcctgcgctgtgacgtgtccagctcacaggcagtatcaggcctgtggcccttcagaggaacccacctgccagtccagctcccctaagaattccacgctcttggtggaaggctgcttctgtcctgaagggaccacaaagtttgcccctggctatgacgtctgtgtgaagatatgtggatgtgtgggaccggacaatgtgcccagagagtttggagagcactttgaatttgactgcaaggactgtgtttgcctggagggtggaagtggtattgtctgccaaccaaagaagtgtgctaggggcaacctgaccacatgtgaggaggatggcacctaccttgttgtggaggccgacccagatgacaagtgctgcaacaccacctcatgtaagtgtgaccccaaacggtgcaaagctgaacgcccctcatgtctgctgggattcgaagtgaagagtgagcacgtgcctgggaaatgctgtcctgtctactcctgtgtgcccaagggtgtgtgcgtgcacgagaatgctgaataccagcctggatccccagtgtactctaacaagtgccaggactgtgtatgcaccgacagcatggacaacagcacccagctcaatgtcatctcctgtacccatgtgccctgcaacatctcctgcagctctggctttgagcttgtggaggttcctggggaatgttgcaagaagtgccagcagacccattgcatcatcaagaggcccgagcagcagtacatcattctgaagcctggggagatacagaaaaaccccaacgacaggtgcaccttcttcagctgcatgaaaatcaacaatcagctcatctcttcagtctccaatatcacctgccctgactttgacccaagtgattgtgttccgggctccatcacatacatgccgaatggctgctgtaagacatgcatccataaccctaacaacacagtcccttgctctgccatacccgtcatgaaggagatttcctacaatggctgcgccaagaacatctccatgaacttctgcgctgggtccystgggacttttgccatgtactctgcccaggcccaggatctggatcatgggtgttcttgctgcagggaggagaggaccagtgtacgaatggtttccctggactscccagatggcagtaagytgagccatagctacacacacatcgagagctgtctgtgccagggcaccgtctgtgagytgccacaggcccagcaaagccgcaccaggcgttytagtccccggcttytagkaaggaagtgaacgggttacaccgtgcacatctcttcccatcttgagccatcctgctgattctctgagcttccccacttcctgcttgacttcttctctgcacatatttattttcggagtttctgttccattctttgctttctgataataaactcaggcatagccaaaaaaaaaaaaaaaaaa

SEQ ID NO: 1997 - DNA, 3290 bp, Rattus norvegicus
gttgtcctcagggagagggtacttaggtcacttccagctcaaggggcctctgggttctatttssaaagttctcggtgtgttccgtaatacttacgttacatctctcgggtgtggagctaggaatctccagtaagagagaacatgcgatatttgttgttctggtatggattgcctcactcgtattctcagtgtgtctgtcattggaccccagccagtggcatctttgaaaatgagccattattatctttattgcttctgstcctgggcaagttagtcaccacagaaaagcgcttcctcaaggacagtttgtacaccgaaggaatcctaattgtatgggacccatccgtgtatcatgcagatatcccaaagtggtatcagaaaccagactacaatttcttcgaaacctataagagttaccgaaggctgaaccccagccagccattttatatcctcaagccccagatgccatgggaactgtgggacatcattcaggaaatctctgcagatctgattcagccaaatcccccatcctccggcatgctgggtatcatcatcatgatgacgctgtgtgaccaggtagatatttacgagttcctcccatccaagcgcaagacggacgtgtgctattatcaccaaaagttctttgacagcgcttgcacgatgggtgcctaccacccgctcctcttcgagaagaatatggtgaagcatctcaatgagggaacagatgaagacatttatttgtttgggaaagccaccctttctggcttccggaacattcgttgttgagtacctagccaggcacccttatccttctccatacgtcattttatggctactctcctggttaccgctgcttgaaggagtgtttttattcaacaggcccagcctgcttcctgcgctctagggaattttgttggcaagagttctggggcctccagcctgcctccctggggccaccgaggatgggagtccagattcttgccacactcattcctcctagacagcgtcctcctctccttctgcatgggtagggaaagatccacatttctcaccagggttgcgaaaactagactttgttttctccaactggatgatgtcatcctcgcaaggcagcacgtcctctgtggcttgaactctccctaggtattgatttcacatccgaaagaaattctcccagatcatgatttgtgtttcacagatgcagggtggcgggaggggagaaaaataattggggcaggatggggaagcctactcagttactccagaagggcgtcaaggtgctcccaactcccttgggacatagtcctgttgtcaccctgtctggctaggctgatccttaatgcaaaggaccctgggtgcttatgatttgggtagcccacttccaactccctgtggagatgaaaggtacaaaacctcctgatcacctgaccatctgtctccagcatggacgagagagacacccaacaggcagctaaaatgcaaacattccgtagcctgttgtctgtgtgctcctccctaagacacccaggaggggccagctctactgtgttcttgtagagctgcggcacggaggaagaagggatactggggaagctcttacaccttctgcgtcagaagatctcttttcattttcccctttatgaacactgtatggcctgttacattgatgttatatttggaggcccaaggagtttttgttaggaagtccctaccaccgtcagatgtagacagcaggttaaagtgctgccccacaagactggggttcttattttattttttttaaatgtctacctctcccctactaattgctattgttatcccaaaccttctccagcaggctcccctctcgaattttaatctttttctttaggggcaccccatcaactttccctgaccgtttgacaaatacccgaaaggtctctcagggcatggggagtatgtaataaatgattcttcccttagaatcttaatcattcctgggacttaggggggtgaagtgtgtgatcacagattgccaagcatacccaccctgtttggctctgggcaggaagcactgctcttcctggttccctcacaaggattttctgagatgtggagtggtttacctagcctctgatgaagccacagtgggcttctctaccaggtggcaataacctatggtcaaaactcaaggctggcacaatctgttcgattcaaggctactaagacttaatgctattgaacctgtgttctcacaggcttctgtttactgctgacctagagctcagaaactcagaccccactgtctcagtgtttcaagctgcttgccttattcgggcaatagaaagcccggagtgaaaagccctgggtttccaggttgacctctcacttcctcactgtgccactttgtttctgtatctgtaaaatggsggysrcaatcctacctcacagggctgtgtggggacaacaggaaaacatggctgcgatgtatgagaaccactggaaagcgcgtggctgggctgtgaccacagtgtataggaagtaggtaccctgctgtccttcctgtttccttatgaagaacctaccaggtgatcacacccgtgctgggccttgctacaagggagggcagtggagaggaacaggacattctttctgttgtgagacaactgcatcatttgcaatatgcaggggcctactatcttgttgcctgcaccccaggtctatttgtgctggggttggggktgcacagagcattgagctgcttggccgctstgtgsmrtaaatctagagaattcctggctcacttcttctratctcacacgctcattataaggcattaggamtkyggmwsgartggccaggaagttgatgttccttctgtcagcaagaggtacattagagatggagactacactgggtagattctagtttttaattcttattaatgtggggsgaataaattaataagtataatatgattctgatgtctattagactttctctgtgctctttgtgagtaaggtggsccacggagkkatgagggcatcmctgttagtttggtgaggtggttagtgactgatgtacaggaagtgtyttytacgtgggcactgacgtcagtagccatctatgcatcctaaatgcaggatcctcttgattctttctgccaatcaaatawatygttgctcttggttcaggtttgtgtcagaaactttaaaaacatacctattrattctaaattatccaaagattatgtacaaattttaaaataaatgtctttttcagmaaamaaawwwaaaaaaaaaaaaaaaaaa

SEQ ID NO: 1998 - DNA, 1521 bp, Rattus norvegicus
atcacgacagcctactacaggggtgccatgggtatcatgctggtctacgacattaccaatgagaagtccttcgacaacatccggaattccattcggaacattgaggagcatgcctctgcagatgtggagaagatgatactggggaataagtgtgatgtgaacgacaagaggcaggtgtccaaggaacggggagaaaagctggcactcgactatgggatcaagttcatggagaccagcgcgaaggccaacatcaatgtggagaacgcatttttcactctcgccagggatatcaaagcaaaaatggacaaaaattggaacccaacaaccctcaggagcagccatggagtcaagatcacagtggagcagcagaagaggaggagcttcttccggtgcagtctcctgtgaggacaaggtctctgcccatttgagcctgcgctcagcccagctgactgtgcctgccccgggcgagcctccacctccgatgctcggacacagmtgcycggactcaattgagaaattgattattttagtaaccgtctgatcttttccaccttcagagatggaccaagttagaattttgctgtttttcctgtgtcatctgccagtcaggcctatccgtcccctgccgcattgccatagatggagagaggtgggttggggcaaggcagcctccatctccagccttctgcccctccaccacagaagggaggtcagtggcagtggcagtgccagcctgcctggccccatactccaagcaccaccaccagggccactgagggcaagctggcaccctgccttcacccgttctcagttgtggacaagtgacaacttgtccactgtctccttacgtgtcaaaccaaagggaagcacaaactaaggaaagcccacttagaggactttggaagaagtggctggctcccatgaccagagcaggatgggagtctgcagtccagactgaggtgacgacatcaccaccactctcccatgacccactgcctcagtgggccccaaaaccggctccctcatcttctcctcctctgcctggctmtaatcggatgttccttttctagctaagatgattttttattttttcagattcctaacmccawraaawrawwmwrwmawtgattttctagcagcatacctgggagattcagaaccagcgtggttgccctgcgcccacagggcachtggtccytgagacccagacaagcattccatggcacagtgmtaccctgcagtcttcacccagttgtgttgtgayagcwmtgtsmtsytkdwwhkwytkwttkggwycagatgtcctgtgggaggggtgtcatctgagagcaccttcyttttcactctaacccttccccgatgctgctgtcagtcaagctgtcagcatcaaaatctctcccttttttgaaattaaaaccaacgtaccagcawwwrwmawmwrmmmwmmmmwvdmrtsyckgatgtaccatgtttacactgaccagtgcactcagaaaatcagattaaagtgtatttaagagg

SEQ ID NO: 1999 - DNA, 687 bp, Rattus norvegicus
gtcatcatcatcggctcccgcggcgtgggcaagaccagcctgatggagcgcttcaccgacgacacgttctgcgaggcctgcaagtccaccgtgggtgttgactttaaaatcaagactgtagaactaagagggaagaaaattagattacagatctgggacacagcagggcaggagcgattcaacagcattacctcagcctattacagaagtgccaaggggatcatactcgtgtatgacatcaccaagaaagagacgttcgatgacttgccaaagtggatgaagatgatcgataagtatgcttcagaagacgctgagcttctcctggyyggaaataagctggactgtgaaacagacagagaaatctccaggcagcraggagaaaagtttgcacagcagataaccgggatgcggttstscgaascsagtgccaaggacaatttcaacgtggwtgagatctttctgaaactcgttgatgatattttgaaaaagatgcctctcgatgttttgagaagcgagttatccaatagcatcctctctctacaaccagagcctgagatcccaccagagctgcctccacccagaccacacgtccgatgctgttgatttgatactttggagatggtgcaagccattgctagaaggggaaagcattcttgctctgcactacaatcacgtgacaacttcctt

SEQ ID NO: 2000 - DNA, 894 bp, Rattus norvegicus
accatcggaattgatttcaagatccgaactgtggaaatagaggggaagagaatcaaactgcaagtctgggacacagctggccaagaacgattcaagacaataaccacctcctattaccgtggagccatgggcattatcctagtatatgacatcacagatgagaaatccttcgagaatattcagaactggatgaaaagcatcaaagagaacgcgtctgctgaagtggagcgccttctgctggggaacaaatgtgacatggaagccaagcggaaggtgcagagagagcaggctgagaggttggcccgagagcacagaatccgattttttgagacaagtgccaaatccagtgtgaatgtggaygrsrckwksagttccctggcccgtgacatcttgctcaagacaggaggccggagatcgggaaacagcrgcaagccctcaagcactgacctgaaagtatctgacaagaagaacagcaacaagtgctccttgggctgaggracatttcttgcctcctattcaccctgaacctggaggctagacctgagggaggtggactgagrtwgactgatggaaamcagaggggaggavctgtggtggtvcctgraggggtggatgacakgggaggamggaaagatgaawtgggcagggaaaggagggcraggamccaaggacgtgaaaagtkaararaaggggtttkaraaragaaaaagaaraaggtctcaggtytcggmccgtccaacattaatgtcagtatgctgatctctccattcctggttcagggttcgggtcccraraggmtggctcgrccctacthtragggtctctcactccmcasatstttgttagtattaaaggccmctgtttggcwmrrawrwwmaaaaaaaaaaaaaaaaa

SEQ ID NO: 2001 - DNA, 2123 bp, Rattus norvegicus
atggcatccgctagtgagccccctgccagcccacgggacgctgccgaccagaaytttgaytayatgttcaaactgcttttgatcggraacagcagcgtaggcaagacctccttcctgttccgctatgccgatgactccttcacccccgccttcgtgagcacagtgggcattgacttcaaggtcaagacagtctacagacatgacaagaggatcaagctgcagatctgggacacagcaggmcargarcgctaccggacaatcaccacggcctactaccgtggagccatgggcttcctgctgatgtatgacatcgccaaccaggagtccttcacagctgtgcaggactgggctacgcagattaaaacctattcctgggacaacgcccaggtcatccttgtggggaacaagtgtgacctggaggatgaacgggtcgtatctgctgaggatggccagaggctcgctggtgatcttggttttgagttcttcgaggccagcgccaaggagaacatcaacgtgaagcaggtgttcgagcgcctggtggatatcatctgtgacaagatgaatgagtccctggaacccagctccagcccaggcagcaatgggaaaggcccakccctcggggataccccaccccctcagccgagcagctgcggctgttaggttcggcccttgacctccccacacctctccttcttgcctcttcatgggcagcggccaaggtgtsagctatggggactgtctcaaagctcagggcacccccttgcctytggtccacgtacccctcctcttgcacaagttcagctccctttctctccatgtcagaatgctcagacagtcctggttagagcccacgccccggggctctgctcagcattgtctggggttggcacacccacacaggcattcaatggaggtagctrtaggtgccatggcctttcctgaygatggaaggatgtcccatgccttccgcctcagaaccatttcccaggtgtgtgatctactcctctgttgttggctgaagatgtcacctggtgtgggtcgctgtccaacttagtcctggtagcctctccatctcaggtccaccastttggccttgaaatctgcctatgaactggccgctgccaaggatacaggcagatctgccatctccatctctgcctctctggcatcgactggaaagcctgctttcccgttatagagggatagagtcagagcccctgacacccgggactctccaaagtgcccttccaagcttctcctgaatccatgccactccccagaattaaattttggattattcagggccctawmmawrrarrmwraraattgcctcaccctttacagtacagctttctgtcagtttacctcagagccagggaactgaggctgcccagccaggtccccatctgtcccgtgttttaagcaacacttttgcaaaccttacatcctgtgtagaaacggaagtgaagaaagcaacccacagagggcgtgcccttgctagtcggtttctcatcgcaccatttgggcttctccacccgaggactcatgtatacacccaccgttggcatcattgtcaccatcagttggcccagggacactggggttgtggggaaggattggggagaaggcatcagtgggcaacccagtgtttttgtttgwacatcatgggagcaacaggccctcctgtgagttagggatgggcttcgggtgtgattgatgtctcwacaaagcttgagacttagcccmtaggatactckactcactccgytaggaagtcttttgactcaccgaccaaactcccctaaacgccatytgacatgcttggtccagktgacagwcggtcgctcagagtcagagtcacatacccctgattctgtatcagtgtgtcctccttcagtccccagagccaaaatsattytgcakccctahtgarmamarmmwhwwmmwrgggtgcgtacgacctacggtgcctgcttcaggtccagatgtgtttctaggcctgccagtggctgtcttcatacaaagtgagggcgtctgactactgkgaggaaagagtcatttttttttatgttgctttatcattaaatagtcmaamcmwwrraarwwaamaaaaaaaaaaaaaa

SEQ ID NO: 2002 - DNA, 6490 bp, Rattus norvegicus
gaattcagctacttttcaccagattcactttgcctcccaaaagtaagcagccgcctgagtggccatgagcactcgttcagactgtggcagtgtcctctgactgggccaccttttatgtcctcacctcccacctacttgtagagcactgagccgagacccgattcagccaatcccagggaaagaccagggaacagaactaaagttgagagtagcgagaataactctgaggatggatccctgttcagtattagaggaaaggggtgggggaggaagaggaggacgagaaagaaggggaagaggaggagaactggaagaataaaactagaacagagccattaagaagaatggtggctcccagtcaagttggggacacaagctgagttcgagcctgcttgctatgcattaaacctatcgagcagtgctgccccaggacctttacacatgtttgtccctctctctaaccctaaatatctgctaatagtagcttctgtctcccttcatccagggcactacacaaacacagctatcccagaggatccttccctgatcgctggaataaagattacttcttgctttattttaatttttattttattttgtggagttggtaaacccctgataccacaaacacccttgcttgattgacttccctataattcaactacgtgaataggaccttggttgtgtttactgctgggtcccccataccccgaccagtagctattgtgtgctagataagccacagtgaatgctggatgaacaaacaaaggcgaaaccatggggtaagtgtgagcacttcatgatggagaccatcagcccccctggtgtcggagacatgaaaacctttggactccaaaagaggttcctggcttggtctgctgggtagagagggctttccagtctgtacgatgggccagttaagatgacttccagaagtttgtgggaaagacacctacataacccttgcttaggtttctggcatccaggagagaagacatagccaaggaagacttctagccagaaccctcaaaagcatgagcatcccagggttggggtgtgttgggttgtgtaggagagacagagatcccacaaggtgccccttccttttgatcctacctccccagtgaacctgctggaagagactcagctacagtctccagagaaacagagccagagcctccaggggcctctgccagggctcagtgtcccaggcagtctgagaagcttgctggttatactatgcaactgggtgctggagacagaagcaagaagatggcagagtcatgcacctccactgacatttccacatccttccctgatttggattctcaatcatcaccacagttactcctggacattgtcattgttcctgggtatgtagtggacacggacttgggaagagcgtcatctcaacaaaattgtgtggactctactgtaggtgagatcctcagccaagtcctggccatcacgacccttaagaaaggcatttcccattgctcccctcggagcaaaaacggttttcttcttctctgtagaaacagatcaacctagacaccccccccgcatccccctccccaccttgggtctctagacacttccagaaggaatcctgttcacagaacagacccataagttgggtagagcctccctctccctccctcttttccttgggctgtccaccccagtttgaatagaatggcttgaagttttgatgatgattcccactacacatagataagccgggattctaagcttcctgtgaaagatcagatgttctctgagccattcccaggtggagaatgaccagataacactgtcagtaaatcatttttgtctccggtttgcccacctagacattttgagtctcactgtctcttgcccacttcgtccttggctcaacttctctgggtgtcaccatttctccgatcttctctagaggtctttgccccgtggccctgagtctctctctgaaccacctgaaatctgatttctaactcctatgctgtgcctggtatccctacaaatcacaagacagagtggagtccgaggtcagctccgaagtgaacactgaagtcagcacacagaggctggaggagtaggcactggagagacttgggcaggctgcaccggatagccaacgtgctatcgcgcttctatcgcgcttctgactgccagtctctgccctcctccctggttaggcagctgccccagcacagagttgcgggagggggcagttcctggccccagtggctaccctggggaccccaagctccgccctactacactcctattggcttgaggcgcccccgcccccagcctccctttccagctcccgggcttttaggctagcctggataaatagccccggggggcctggctctaagctaggggccaggacaccccaggacgcgactgctttcttcaccacacctctgacaggacaggacagggagggaaggtagaggacagcaggtgtgcattccaaccgtcagaaccattgtcattgtactattggggttcaggagtgacagaaagttaagacgactcttcaggcttgggttgagcgagaagcaggacccagaactgggacatggagctactatcgccgccactccgggacacagacttgctaggccccgacggctctctctgctcctttgcgacacgcgatgacttctatgatgatccgtgtttcgactcaccagacctgcgcttttttgaggacctggacccgcgcctggtgcacgtgggagccctcctgaagccggaggagcacgcacacttccccactacggtgcacccaggcccaggcgctcgcgaggatgagcatgtgcgcgcgcccagcgggcaccaccaggcgggtcgctgcttgctgtgggcctgcaaggcgtgcaagcgcaagaccactaacgctgatcgccgcaaggcagccaccatgcgtgagcggcgccgcctgagcaaagtgaacgaggccttcgagacccttaagcgctgcacgtccagcaacccgaaccagcggctacccaaggtggagatcctgcgcaacgccatccgctacattgaaggtctgcaggctctgctgcgcgaccaggacgccgctccccctggcgccgctgccttctacgcacctggcccgctgcccccaggccgtggcagtgagcactacagcggcgactcagacgcgtccagcccgcgctccaactgctctgatggcatggtaaggctgtgaccaaggaggatgacaagtggaggcagcgctagagtatctgcaaaacatttccaaggcccttggggtgggggtgtctttatgcccagatgctcatggtatctgtcactggagtgtttggagacccagggcatctatgattctgccaattaaaggtgttattagaaccctgctgcgcagaccctgggatacgcttttcctcctcaaatccttattaccctaatgcagattattgttcttgggtgactgtccactctcagtttggctctgcatgggacagcttccaatgagtgctggctcctacctcctaaatggggctgcaccagtcctggacccggcagctaacactaagggagtgagggaggggtgatgacaaggagtcttgcttgagacccactcgggccctataggctgacttcgtccgtccttgctattcgcagatggattacagcggccccccaagcggcccccggcggcagaatggctacgacgccgcctactacagtgaggcgtccagcggtgcgtattctcagctgttcccaactagcgggctctcatcggccttccgtgtcccccttgaaatttttctctgtccctaagcttggtaccctcttcccacctccaccacataagcacccatatcttggggtgactgagggaagcgttggggggtgggggaggggaagaacctatgatatgcgcctttcctctcccttttcccttgcagtctagcaagtcctcagtttcacttctacctcaaagttccgtgcctaggggcaagaaacttgagaagagacttaagttggattattaaccttcccctcccttcacagagcccagaccagggaagagtgcggccgtgtcgagcctcgactgcctgtccagcatagtggagcgcatctccacagacagccccgctgcgccttcgctgcttttgccagatgcgccaccagagtcgcctccgggtccgccagaggagacatcctcaagcgatgcagaacaggggacccagaccccgtctcccgactccacccctcagtgtcctgcaggctcaaagcccaatccgatttaccaggtgctctgagaggttggctgcagcagcagagggcgcccggtctgcactcatggggatggtgcccctgggtccttcatgcccccccaaaaatgaagcttaaatgacactcctcccaattgtcctttcaaagccattcttccagagggaagggaagagcagaagtttgttgtcctacatccggccccaaggaaaagacgaagtctggttgttgttgctgctgctgttgttgttgttgttgttgttgttgttgtagtcatggggttttttgtttgtttgttttgtttttcatgcgactcacagcgaaggccacttgctgtccctcactgggccagagctgatctttgagtggccaggacctctttcctttcctcacagtccctagcacagggtgagcctcgcacacttaagccctgccttccacatccctgttgtttgtggagacactgttcccactttctggagcccccccccgacacccactctttcccacagcttgcgaggccactcagatctcgggtgtaacaggtgtaacaaccataccccactctctcccttcccatgttcaggaccacttattttttttatattaagacttttgtaatctattcgtgtaaataagagttgcttggccagagctggagccccgtgggctgtatttatctccgaggcatgctgtgtagtgcaacaaaatctttgtatgtttattcctcaagcgggcgaagcctcgaggctcattcgctcaggtgttggaaataaagatgctaatttatacaacagtggctctggcttttcctagggggatcagaaagaaactccacaaactgagcagactgtctcccagcgacccctgtaggtggtagaagggtagcacagagactgggtgctgctgggtaatgaaggactaggcagacctccagctgtaggagattcctgaggccttgctgctcctccaaggaaaccagtgattgcagtggaaaggtcgcagtaggctgatgttagtttaaggataaaaaaggcggacatgctggctcatccctgcaatctcagcacattcaagaggttgaggcaggaggatggctgcgagctggaggccaccctggctagaaagtagaaaccctgccctcaaaacaaatactctctttaaaataaaaatgaaaactgagtgccgaggaggctcagttgatagcgcactggcctagcatgcacaaaatcccgcggcgcgctcagtccccagcaccatatagacctgttatggcggacacagctgcagtgtcaaagcccaggaggtagtacaggaaaatcagaagtacatggtcatgctcagctacacagcaagttccaggccagtctgggatacatgaatccctgccaatagatggattaattaattaagattccgcaagaatgaatctgtccagaaccagttattgttgctttccaaagatctccttttagggactctgaagtgtgtgctgagttgagaatggttcccgtccatgatgtgtgcagaaggcactgtgggagcttttggccctggagccacacaataccctcccaagggtggagaagggtgagatgctccagtgcaagaagagacacctacagggccctggggatgggttctgaaccgtgtggtgcatgcaagctcttaagaatagtggaactgcacagagacagcaccgtcagagccaacccttagaatatctgccactgtctcagctcatcagaaggtggaggctcagagcctgtggggggagggaggggcgcctgggaccagcgtatctctagagctgtggggcttccctcaggctgtgtagagggcagggggaggccattggtgcagccggagtgcaaggcaggctttctggacaaagtgctatttcagatgtgtcgggggagacaagtgtaggcaatgtacaatggctgtgagggacacacacacacacacacactacacacacacataacacaccacacacacacacacatacagacacccacagacaccacacacacacacacacacacacacacacactacagacaccacagacaccacacacacacacacacacagggacctctattcttccctggaatggcctggcacaaattctctgtccctttcacacttgtccctagggcctcagtacctcctgtattccatttgtatagatctccttgaattc

SEQ ID NO: 2003 - DNA, 4270 bp, Rattus norvegicus
ccctccctcttcgcgctccttcgccaccgcccgcccctcagctccgctgctcggctccgctcagagcagcgcagctccgcagccaaagcgaggcgggctcgggctccccaccgccagtgccacccgggctcctccagctttcgcctctgcagctcccgtcacttggagtaaaagtgtcctgacaggggtctgcaacatcagcagaaagttgggaggtcctcgagaatgaggctatctcccgcgcccctgaggcttagccggggtccggcgctgctggccctggcgctgcccctggccgcagcgctcgctttctcggatgagaccctggacaaagtggccaagtcggagggctactgcagccgcatcttgcgcgcccagggcacacggcgtgagggatacacagagttcagcctccgcgtggaaggcgaccctgacttctataagccaggaagcagctaccgagtgacactctcggctgcccctccctcctacttcagaggcttcacgttaattgctctcaaagagaaccgcgaaggcgataaggaagaagaccacgcgggcaccttccagatcatagatgaagaagaaacccagtttatgagtaactgtcctgtggcagtcactgaaagcacccctcggaggaggacacggatccaggtgttttggatagcgccacccacagggacaggctgtgtgattctgaaggccagcattgtacagaaacgcattatctattttcaagacgagggctccctgaccaagaagctgtgtgaacaggatcccacacttgatggagtgacggacagaccgatcttagactgctgcgcctgcggaactgccaagtacagactcacgttttatgggaactggtcggagaagactcatccaaaggattaccctcgtcgggctaatcactggtctgccatcattggcggatcccactccaagaactacgtgctgtgggagtacggagggtatgccagtgaaggggtcaagcaagttgctgaacttggctcaccagtaaaaatggaggaagaaattcgacaacagagtgatgaagtcctcactgtcatcaaagccaaagcccagtggccatcctggcagcctgtcaatgtgagagcagcaccctcagccgaattctcagtggacaggacacgccacttgatgtccttcctaaccatgatgggccccagtcctgactggaacgtgggcctatctgcagaggatctgtgcaccaaggagtgtggctgggtccagaaagtggtgcaggacctaattccctgggatgctggcacggacagcggggtgacctacgagtcaccaaacaagcccacaattcctcaggaaaaaatccgacccctgactagtctggaccatcctcagagtcctttctatgacccggaaggtgggtccatcacacaagtggccagagtcgtcatcgagagaattgcccggaagggagaacaatgcaacattgtacctgacaatgtggatgatattgtagccgacctggctccagaagagaaagatgaagatgacacccctgaaacctgcatctactccaactggtccccatggtcggcctgcagctcttccacttgtgaaaagggtaagaggatgcggcaacgcatgctgaaggcacagctggacctcagtgtcccctgtcctgacacccaggacttccagccctgcatgggccccggctgcagcgatgaagatggctccacctgtaccatgtcggagtggatcacctggtcaccctgcagtgtctcgtgtggcatgggtatgaggtcccgggagaggtacgtgaagcagttcccggaagacggctcggtgtgcatgctgcccacggaagagacagagaagtgcacggtcaacgaggagtgctctcctagcagctgcctggtgactgagtggggtgagtgggatgactgcagcgccacctgtggaatgggcatgaagaagcggcaccgcatggtcaagatgagccccgcggacggctccatgtgcaaggcggagacttcgcaggcggagaaatgcatgatgcctgagtgccataccatcccgtgcttgctgtctccttggtccgagtggagcgactgtagcgtgacctgtgggaagggcatgcggacgcgccagcggatgctcaagtctctggcagagctgggggactgtaatgaggatctggagcaggcggagaagtgtatgctgccagagtgccccattgactgcgaactcagtgagtggtcccagtggtctgaatgtaacaagtcctgtgggaaaggtcacatgattcgaacccggacaatccaaatggaacctcagtttggaggtgcaccctgcccagagactgtgcaacgcaagaagtgccgtgcccggaaatgccttcgcagcccatcgatccagaagctgcgctggagggaggcccgagagagcaggaggagtgagcagctgagggaagagtcagatggagagcagttcccaggctgtcggatgcgcccgtggacagcctggtcagagtgcaccaaactgtgcggaggtgggatccaagaacgctacatgactgtgaagaagaggttcaaaagctcccagtttaccagctgcaaagacaagaaggagatcagagcgtgcaacgtgcacccttgttagtaggggttcaactccccagggctgcattccagattctagtcaccaatggttgggtggtgtatttgcttgtttaagatgatttaaattgtgtccacatgttttcatttttaccggtgtggtttgcccaatagtcttatggaggccgagggacatcttgtctgaatacttcttggtgagtacaggccaagcggggcatcttgtccccaggcgccatcttcctgcactgagttgagtagtgttggttcaccttggtactaaactgaatcgtgtccctctggagcatcccctggtcaagcagggtggagactttggccatccacaaggagaagcaaccaggatgcagcatgcgggagacacagccattaattgcaaaggacagatcctcctctctcacctttggcctgctcactcttacagaaacctgtttgtccgcctccttttttatttagcacaactccaggcatcttggtaagtctccagggtcatgggttcywcgrkgccctkwwkkakwagcmcwgaskysaggtggcatttgttacamacctcccamtactgcwttactggyatcacamrgtcagcaggtgatgakggytacttcatttcattgtgagscgtgatttccgttgagttttgattgttggtgccataaatgtcctaggatgctggacggacacatcagccttgtcagcagatmcktctttgagccaatgtakacagtawgctgggcactggttccaaagmcamcttaraatcwtcctacacatatccagacctttttttargttgcccaaacttccttagaataaagcattttagctctgagaactacttgataagtctgccaggaagcccccamgtcaattcttcaacaaaaatactatcttcsctacytaattyyttttaagtcatgatatyttatagttagaggagagagagrcaatctaytcccatgactamgacacaaacytacaagaaagggktactcagtcaagcctgtgcctgacttctggaccaggccchtgattttcatggatagtccaaagkwmggccrrkggttcccactgactycaagccatcagcagcacccaaacccaggagcaacaaatattcagagmaagaggatgtttatctcagctatgagctcathggcaggttgtactcatgcatctgttaaaagcaccaccacatcmttttgcamgtctgtktattaccgcttcatycaaatacatwttgtggtcaagatssacacagtgctatgaatacagtactttaaggtctgcattaaacacatcagaatatttcctgmcacatctatgtacaacccctgaatatgtatttttccttaacacaagagagcctgttcaattaaamaamaaamamwmwvrrggcrracaawmrmwawwgsyrwamaccggcgcgttaacgcgaggtaactggatcatatgctggagccttgaatgaaaaagcgcatatcaagccgggagatcgtatggcgagacctcaggtctttcgtttctccgctctttttttcttatacgacaaactaacgatacactcaaataaacagaaaacgcgaccaaagagacaaaacgacgcagaaacacgaaataacaaaacacat

SEQ ID NO: 2004 - DNA, 486 bp, Rattus norvegicus
ggtaccagacaaaagtgagtcctgggttagaggcagatcaggatgtgtgggaaccatcctggactccataagtttctgatttaatattggacacccatggaagagaatctggggtgttcttacagcaaatgtactatacttgggttatagaatgatgataaagaacacagagaagaactgaagttcccattaatgcgttcaatgctctctctttctctgctcgagctgttctctgaacaccagtcctcaggagacactagaaaacatttcctcttcctgagggagctatggagtctgaggtctcctaaagcttctcttgaggaaaagtcaactcatccacgaaggtgcgtgacacttagaggtggatttgcttctgcatgtgacagtcacacaaatgttctctcttccattgacttcagtatgaggagctgcagatcacagctggcagacacggggacgacctgcgcaacaccaagcaggagatct

SEQ ID NO: 2005 - DNA, 1521 bp, Rattus norvegicus
attaagcacagtggaagagtttcattctcctctcaaatttcttggattatgccgggtactatcaaagaaaatatcatctttggtgtttcctatgatgagtacagatataagagcgttgtcaaagcttgccaactacaggaggacatcaccaagtttgcagaacaagacaacacagttcttggagaaggtggagtcacactcagtggaggtcaacgtgcaagaatttctttagcaagagcagtatataaagatgctgatttgtacctgttagattcccccttcggatatctagatgttttaactgaagaacaaatatttgaaagttgtgtctgtaaattgatggccagcaaaactaggattctggtcacatctaaaatggagcagttaaagaaagctgacaagatactcattttgcatgagggcagcagctatttttatgggacgttttctgaactacaaagtctacgtccagacttcagttccaaactcatggggtatgatacttttgaccagtttactgaggaaagaaggagttcaattctaactgagaccttacgcaggttctcagtggacgatgcctctaccacctggaacaaagccaaacagtcatttagacagactggagagtttggagaaaaaaggaagaactctattctaagttcattcagctctgtgaagaaaatttccattgtgcaaaagactccattgtccatagaaggagaatctgatgacctccaagaaaggagactgtccctggttccagactctgaacatggagaggccgctctgcctcgcagcaacatgatcaccgccgggcccacgtttccaggcagaagaagacagtctgttttggatcttatgacattcacacccagctcagtctccagcagtctccagaggaccagagcttctattcgaaaaatatccttagcccctcggataagcttaaaggaagaggatatatattcaaggcgattatcgcaagatagcacactgaacatcaccgaagaaattaatgaagaagatttaaaggagtgtttttttgatgatatggtaaagatccccacggtgacaacatggaacacataccttcgatatttcacgctccacagaggcttatttgcagtgctgatttggtgcgtgctggtttttctggttgaggtggctgcttctttatttgtgttgtggttgcttaaaaacaaccccgttaatggtggaaacaatggcactaaaattgccaatacctcctatgttgtggtcatcaccagttccagcttctattacattttttacatttacgtgggagtggctgacactttgcttgctctgagcctcttcagaggtttgcccctggtgcatacgttaatcacagcatcaaaaattttgcacaggaaaatgttacattctattcttcatgcccctatgtcaaccttcaacaagctgaaagcgggtgggattcttaacagattctccaaagatatagcaattttggatgactttctgcctcttaccattttgact

SEQ ID NO: 2006 - DNA, 1143 bp, Rattus norvegicus
ccaagtcaggtgtacccttcgtgacttatgctcagacttatggtctggggaccctgagtcaaaacccatctggaagtttgttaccacacggctctgaggccctccgagtgaacagtcagggaatctcctgaggcctcacttttcacagctgacatagctggcttcagaccacaaccttgtcatcagcttcctgccagaggtttcctggtcctccttgagcatccactacacttgccttccctcattgcccttctgctcctcaggtaagactcggaccaaggacaagtaccgcgttgtctatacagaccaccaacgtctagagctggaaaaggagtttcactacagtcggtacatcaccattcggcgcaagtcagagctggctgctaacttgggtctcacagagcggcaggtatgtgggccctccggctcagctcaagtagttgggctttcaggttgccatgctggacagagcccacaaaaaaaaataaaaaaaaggtagtctccagactactggcacacccccccactgaaccactgccataccaccaactaaacccaacattattccatacacacaaacagacatatgtatgtgtgcgcacacacacacacacacacacacacacacacacacacacacacacgcacgcacagaggctacagtggctggtgatcaatgctattcaaaccctgtggatgggcagtcacaggaacatgggggctctggaggactgggccttgtaggagtgttcagagaagggtgtctagagcacagggagaatgtggtgactggagcagaaagtggatcatgaagaccacctctcccagcccagctccttcctaaaatctgcaggataaaatctctgcaatcccacaggtaaagatctggttccagaaccgtcgggccaaggagcgtaaagtaaacaagaagaaacagcagcagcagcagcagcaacagcagcagcccatgcctcccacacagttgcccctgcccctggatggcacccccacaccatcgggccaccctgggagtctatgccccaccaatgctggtcttctgggcaccccctccccagtgccggtcaaggaggagtttttaccctagcccctcccagcctggggtccaggatctagggacttgaa

SEQ ID NO: 2007 - DNA, 3311 bp, Rattus norvegicus
gcgagagagccagcaagcgggaaccggagccccgcgccagagctgggcgcgccaggagctgaccctctcctcatctctcttcctgtctgtcctttcctggcccctgtttcctcctctctttgcctttgctgcttctgtcctcacccctagaagaccctggtctgctggacctagccatcccttttggggccatggaatcactgcttgggtttctggcactgctgctgctgtggggtgccgtggccgagggcccggccaagaaggtgctgaccctggagggggacctggtgctgggtgggctgttcccagtgcaccagaagggtggcccagccgaggagtgtggacctgttaatgagcaccgaggcatacagcgcctagaggctatgctttttgcactggaccgcatcaaccgcgacccccacctgctgcctggtgtgcgcttgggtgcgcacatcctcgacagctgctccaaggatacacacgccctggagcaggcgctggactttgtgcgtgcctcactcagtcgtggcgctgacggctcacgccacatctgtcctgatggctcctatgccacccacagtgatgctcctacagctgtcaccggtgtcattggtggctcctacagtgatgtctccatccaggtggccaatctcctgcggctgttccagatcccacagatcagctatgcctccaccagtgccaagctgagtgacaagtcccgttacgattactttgctcgcactgtgcccccagacttcttccaagccaaggccatggctgagattctccgctttttcaactggacatatgtgtctacggtggcatctgagggtgactatggtgagacaggcattgaggctttcgagctcgaggctcgggcacgcaacatctgcgtggccacttctgagaaggtgggccgtgccatgagccgcgctgccttcgagggcgtggtgcgagccctgttgcagaaacccagtgcccgtgtggctgtgctcttcacccggtccgaggatgcccgtgagctgcttgcagccacccagcgcctcaacgccagcttcacatgggtggccagcgacggctggggggccctggagagcgtggtggcaggcagtgaaagggctgctgagggcgccatcaccattgaactggcctcctaccccatcagtgactttgcttcctacttccagagcttggatccctggaacaacagcagaaacccttggttccgtgagttctgggaggagaggttccattgcagcttccggcagcgagactgtgccgcccactctctgcgggccgtgccctttgaacaggagtcaaagatcatgtttgtggttaatgccgtctatgccatggcccacgctctacacaacatgcaccgtgccctctgtcccaacaccacccacctctgcgatgctatgaggcctgtcaatgggcgccgcctctacaaagacttcgtgctcaatgtcaagtttgacgccccctttcgcccagcagatactgacgatgaggtccgcttcgaccgctttggtgacggtattggccgctacaacatcttcacctatctgcgggcaggcagtgggcgctatcgctaccagaaggtaggctactgggcagaaggtctgactctggacactagcttcattccatgggcctccccatcagccggacctcttcctgcctctcgctgtagcgagccctgccttcagaacgaggtgaagagcgtgcagccgggcgaggtctgctgttggctctgcattccctgtcagccctatgagtacaggctggatgagttcacctgcgctgactgtggcctgggctactggcctaatgccagtctgactggctgctttgagctgccccaggagtacatccgctggggtgatgcctgggcggtgggacctgtcaccatcgcctgcctgggtgccctggcgacactctttgtgttgggtgtctttgtgaggcataatgccacacccgtggtcaaggcttccggtcgggagctttgctacattctgctgggcggtgtcttcctttgctattgtatgaccttcgtcttcattgctaagccttccacggccgtctgtaccttgaggcgcctcggtttgggtaccgccttctctgtctgctactcagccctcctcaccaagaccaatcgcattgctcgcatatttggcggggcccgggagggtgcccagcggccacgcttcatcagtcccgcctcacaggtggccatctgcttggcacttatctcgggccagctgctcattgtcgctgcctggctggtggtggaggcacctggcacaggcamgrrgacagcccctgaacggcgggaagtggtgacattgcgctgtaaccaccgtgacgcgagcatgctcggctcwctggcctacaatgtgctcctcatcgcgctctgcacgctctatgccttcaagacccgcaagtgcccggagaacttcaacgaagccaagttcatcggcttcaccatgtacaccacctgcatcatctggctggctttccttcctatcttctatgtcacctccagtgattatcgggtgcagaccaccacgatgtgcgtgtccgtcagcctcagtggctctgtggtgcttggctgcctctttgcacccaagttgcacatcatccttttccagccacagaagaatgtggtgagccaccgggcacctaccagccgctttggcagcgctgcccccagggccagcgccaaccttggtcaagggtctggatyccagtttgttcccactgtttgcaacggccgtgaggtggtggactcaacaacgtcgtcgctttgaagatcccacactcctgccctgacatggctgctcccaaacccagcatagaccytcatccacgamcaggaggaagttggytgggagcactsmaataacacccaccccatgcmtgcccccagagccacttacccacctcytggattcccagccctttaggtcagaagccagagtccttagctggggagcctctgcaatggccagtaactgtccttgtagctatgccccgtgtttgccaggcctgggactcagagggggagatgaccagtgtctactgtgttmtagaacagtgtggctgaggacgacaggcccaacccccatgcaaaggtgcttccagaccagcccctgccccaggcctttttaattttttataagttactctgggatagagaggatggttactgtggggatyattccctcccctccttacccagtagtttgtcccgtggtttattttgtattacctgtaaataaagtgtctttmtttaaaaaaaaaaaaaaaaa

SEQ ID NO: 2008 - DNA, 3215 bp, Rattus norvegicus
gaattcggtgacgggctctttcagcccaatcctcccttatctgaaggacaggcaaaagattccacttggaaatgagagaagactagaaggaaacattggcttcaccaagtgatatctccaagagatatagaaacaggattcatgaagatgttgacaagactacaaattcttatgttagctttgttttcaaagggatttttactctctttaggagatcacaactttatgaggagggaaattaaaatagaaggagaccttgttttaggaggcttatttcctattaatgaaaaaggcactggaactgaagagtgtgggcgaatcaatgaagaccgaggtatccaacgcctggaggccatgttgtttgccatcgacgagattaacaaagacaattacttgctcccaggagtgaagctgggtgttcatattttggatacatgttcaagggatacctatgcattagagcaatcactggagtttgtcagggcatctttgactaaagtggatgaagccgagtatatgtgtcctgatggatcatatgctattcaagaaaacatcccactgctcattgcaggagtcattggtggttcatacagcagtgtttccatacaggtggcaaacctgctgaggctcttccagatccctcagataagctacgcctccaccagcgccaaactcagtgacaagtcgcgctatgattactttgccaggaccgtgccccctgacttctaccaggccaaagccatggccgagatcttgcgcttcttcaactggacctatgtgtccaccgttgcctctgagggtgactatggggagacagggattgaggccttcgagcaggaagcacggctgcgtaacatctgcatcgccactgctgaaaaggtgggccgctccaacatccgcaagtcctacgacagcgtgatacgtgagctcctgcagaaacccaatgcgcgggtcgtggtcctgttcatgcgcagtgacgactcacgagagctgatcgcggcagccaaccgcgtgaatgcctccttcacctgggtggccagcgacggctggggtgctcaggagagcatagtcaagggcagtgagcatgtagcctatggcgccatcacccttgagctggcatctcacccggttcgccagtttgatcgctacttccagagcctcaacccctacaacaatcatcgtaacccctggttccgagacttctgggagcagaagttccagtgcagcctccagaacaagagaaaccacagacaggtttgtgacaagcacctggccattgacagcagcaactatgagcaagaatccaagattatgtttgtggtgaatgcagtgtacgccatggcgcatgcgctgcacaaaatgcagcgcaccctctgtcccaacaccaccaagctctgtgatgcaatgaagatcctagatggaaagaaattgtacaaggagtatttgctgaaaatcaacttcacagctccattcaacccaaataaaggagcagacagcattgtgaagtttgacacttttggagacgggatgggaagatacaacgtgttcaacttgcagcagacaggtgggaagtattcttacttgaaggttggccactgggcagaaaccttgtctctagatgtggactctatccattggtcccggaactcagtccccacttcccagtgcagtgatccctgtgccccgaatgaaatgaagaacatgcagcccggggatgtttgctgctggatctgtatcccctgtgagccctatgaatacctggtcgatgagttcacctgtatggattgtggccctggccagtggcccactgcagacctatctggatgctacaaccttccagaggattacatcaaatgggaagacgcctgggcaataggcccggtcaccattgcctgcctgggctttctgtgtacatgcatagttataactgtttttatcaagcacaacaacacacccttggtcaaagcatcaggtcgagaactctgctacatcttgttatttggagttagcctgtcctattgcatgacattcttcttcattgctaagccatcgcctgtcatctgtgcgttgcgccgacttgggcttgggacctctttcgccatctgttattcagcgctgctgaccaagacaaactgcattgctcgcatcttcgatggggtcaagaacggcgctcagaggccgaaattcatcagccccagttctcaggtttttatttgcctgggtttgatactggtgcaaattgtgatggtgtccgtgtggcttatcctggagactccaggtactagaagatacacccttccagagaagcgggaaacagtcatcctgaaatgcaatgtcaaagattccagcatgttgatctctctgacctatgacgtggtcctggtgatcctatgcactgtgtatgccttcaaaacgagsamgwgkcctgaaaacttcaatgaagccaagtttataggcttcaccatgtacaccacctgcatcatctggttggcattcctccctatattttatgtgacatcaagtgactacagagtgcagacgacaacaatgtgcatctccgttagcctgagcggtttcgtggtcttgggctgtttgtttgcccccaaggtgcacatcgtcctgttccaaccccagaagaatgtggtcacacacagacttcacctcaacaggttcagcgtcagcggaactgcaaccacctattctcagtcctctgcaagcacatatgtcccaacagtgtgcaacggaagggaagtcctggactccaccacctcatctctgtgattgtgatacgcagttcagttctcatgtttttaggctgttagacaaagtgctcacatgctgctccagaacatggaaacagaacaaaacaacaaccctagtatctttttttttctttttttagaaacagtacaataaattatttttgaggacwrwawrrwawrwarwratgtgctacaactttctaggctgattttagtgccctaattaacagccccttccccaggacatggaaataaccattgtttacagagctgagcattggtgacagggtctgacagggtcagtctactaaaacgaaaaacaaaaaagacaaaamaaaaaaaawamagtggcaatattaggtaaccttttttcctatgaagtcttttgtaggttcttgttgtaactaatttagggtgagtttctacgttgtatattaaagttacattacgtgt

SEQ ID NO: 2009 - DNA, 3274 bp, Rattus norvegicus
ccgtcctgttggggtacagcccatcttgaataaggagcatcccttgcaagatgtccgcactaaggatctggctaatgcaagctttgcttattttcctcactactgagtctataggtcaacttgtggaaccatgtggttatatctaccctgagtttccagttgtccagcgtggctctaacttcactgccacttgtgtgctaaaggagaagtgtctgcaggtgtactccgtgaatgccacttacatcgtgtggaagacaaaccatgttgccgttcctaaggagcaggtcacagtcatcaacagaacggcatccagtgtcacattcacagacgtggtctttcagaacgtccagctcacctgcaatatcctgtcatttggacagatcgagcagaatgtgtatggaatcaccatactttcaggctatcctccagatatacctacaaatttgagttgcattgtgaatgaggggaagaacatgctgtgtcagttggacccaggaagggagacataccttgaaacaaactacactttgaagtcagagtgggcaacagagaagtttcctgattgtcgaacaaagcatggcacgagctcctgcatgatgggctatacccccatctattttgtcaacatcgaggtctgggtggaggccgagaatgcccttgggaatgtctcctcagagcctatcaattttgaccccgtggataaagtgaaacccagcccacctcataatttgtcagtgaccaactcagaagaattatccagtatattaaaactagcatgggtcaattcaggtttggacagtattttaaggctgaagtcggacatccaatataggaccaaagatgcctcaacttggattcaggtccctcttgaagatacagtgtctccccggacttcgttcactgttcaggatctcaagccttttacagaatatgtgtttaggattcggtccattaaggagaatgggaagggctactggagtgactggagtgaggaggcgagcgggaccacatatgaagacagaccatccaaagcgccaagtttctggtataaggtaaatgcaaaccatccacaggagtataggtctgcacggctcatatggaagacattgcccctttctgaagccaatgggaagatcttggattatgaagtggttcttacacagtccaagtcagtttcgcaaacttacacagttaacggcacagagttgatagtaaacctcaccaataaccgctatgtagcgtctctagcagcaagaaatgtggtcggcaagtcccctgcaaccgtcctcaccatccccggctcccacttcaaagcttctcaccccgtagtggatcttaaagcatttccaaaagataacctgctctgggtagaatggacaccgccatctaaacctgtgaacaaatacatactagagtggtgtgtgttgtcagagaactcaccctgcatcccagactggcagcaagaagatggcactgtgaatcggacccacttaagaggaagcctactggagagcaagtgctatctgatcacagtaaccccagtgtttcccggtgggcctggaagccctgagtccatgaaggcgtacctcaaacaagcagctccttctaaaggaccgactgttcggacaaagaaagtggggaaaaatgaagctgtcttagagtgggaccatcttcctgttgatgtccagaacggattcattagaaactactccatatcttatagaaccagtgttggaaaagaaatggttgtgcgtgtggattcttctcacacagaatacacactgtcctctttgagtagcgatacactgtacatggtccacatggcagcatacacagaagaaggtgggaaggatgggccggaattcacttttacaacactaaagtttgctcaaggagaaatcgaagccatagtcgtgcctgtgtgcttagctttcctcctgacaacgctgctgggagtcttgttctgctttaataaacgagacctaattaaaaaacacatctggccgaatgtcccagatccttcaaagagtcatattgcccagtggtcacctcacacccccccaaggcacaattttaactccaaagatcagatgtactcagatgccaatttcactgacgtaagcgttgtggaaatagaagcaaacaacaaaaagccttgtccagatgacctgaaatccttggacctgttcaagaaggagaaaataagtacagaagggcacagcagtggcattggggggtcctcgtgcatgtcctcttctaggcccagcatctccagcagtgaggagaaygagtctgctcagagcaccgcaagcacsgtgcagtactccaccgtggtgcacagcggctacaggcaccaggtgccgtcagtgcaagtgttctcaaggtctgagtccacccagcccctgctagactccgaggagcggccagaggacctgcagctggtggatagtswsgasrgcggtgmcgagatcttacccaggcaacagtatttcaaacaaagctgcagtcagcctggagccagtccagatgtttcacacttcgraaggtcaagccaggttccgtcaggcagtgaggaggattttgtcagmctgaaacagcagcaggtttcagatcacatttcagagccctatggctccgagcaacggaggctgtttcaggaaggttctgtggcaratgctcttggcacagggactgatggacagatagagagattcgaatctgttggaatggagacagcgatggatgaagacatttccaaaagttacttgccacagactgtaagacaaggtggmkamwtgscacagkgagggaaccggctcctgcgggacctcagcgggactgcgaagkmamgskaaaatgctcgtgacttcagatsggaaataakcttcagtccctgataaccattgcctttaagracaaaagtcacaactgggccatctccattccagagtatctggrattctccttccaagcactaccatgaacctgactttatcctctgaatagctggaggackctgcgctgtttcakaatgtttgcactgctgaaaactaagtgtgtctgagtttgtaaagcttttgttttgctccatagaaagtggggaatttaaatgagccgrgcygagccgtggcgtcgctcagctgtgctggtggtgagactgaccattcagatgccgggagcaaaggtctaaccctcctcagccagcagcttcatgtcagagttccccgggcagactgcccagattgtgtcacctatcaaaaaaaaaaaaaaaaaa

SEQ ID NO: 2010 - DNA, 1416 bp, Rattus norvegicus
  misc_feature (1399)..(1399): n is a, c, g, or t
gaattcccagggcaagctccaggctccgcaagacccgcgggcctccaggatgcagacaccgcacaaggagcacctgtataagctgctggtaatcggcgacctaggtgtaggcaagaccagcatcatcaagcgctacgtgcaccaaaacttctcctcccactaccgggccaccattggtgtggacttcgcgctgaaggtgctccactgggacccagagacggtggtgcgcctgcagctctgggacatcgcaggtcaagaaagatttggtaacatgacaagagtctattaccgagaagctatgggagcatttattgtttttgatgtcaccagaccagccacatttgaagcagtggcaaaatggaaaaatgatttggactcaaagttaactctccctaatggtaagccagtatcagtggttttgttggccaacaaatgtgaccaagggaaggatgtgcttgtgaacaatggactcaagatggaccagttctgcaaggagcatggtttcgtaggatggtttgaaacatcagccaaggaaaatataaacattgatgaagcgtcaagatgcctggtcaagcacatacttgcaaatgagtgcgacttcatagagtctatagaaccggacattgtgaagccccacctcacatcacccaaggttgtcagctgctctggctgtgccaaatcctagaaggcacctctgctggcatatgacagaaagaacccgtggccctcatgaatcgtgcykcagtttttccttatccattttgggtaagcatcaggatagggaagcacacgtgacaagccaaagataatatgactctatgtttcctgtcaaagaggaacagcaaatgttctttatgtgtttttccccaccgtcagcacagtgtttacaagcttttaaaatattagtctgttgcaatatgctgttttatcactgagcaaagtcactcagggacacagacagccttggtattcattcctttaaatcaacaaaagcttctggtcttcttgagaaggggactaagagagcaaggcagaggtcaagctaagtgtggggatttatcttgccytggtgcgtctttgttcaggtatcaatttgttcctgggtggtctgataggtctattaaataggaacactattttttccattcatggcagacctaagggttgcctgtgatgtttctcttcagagtcgtgtgcacaggcagcctgggcttttgttgttacttgctgtgccctgaatgctggtttaactggaaactgtatggaaagatctgctccctgtatgtgcctttctttcagctttctctgaytcaaactgcgggactgctctgtacatgtaagatatattatatatatttttcacaagtgaaaaataaaacattaaaagtgttctttcmmnvwmdwvaaaaaaaaaaa

SEQ ID NO: 2011 - DNA, 2999 bp, Rattus norvegicus
cagcgactttggccgaaacttttaagcacagccagtgcacctgaattgaatcagggcgagaccaatcctagctgctcaaaagactcccgcagagactgggagagcgggtcttccgggcaggtcctggggaggatctggaaccgcaaactccggtgcgagtcgcgctccatacacagactggaacacaagctcaggtcgggtggatccgcacggccgcgcgccagttccgccttcatctccaccccgcgccccggggccccgagggtgggaggacggaatttcccatcgcgggggctcgggtgttctgggccagccggcaggccctttctgtttacggagagaaaggggaaatggaaaaggcggggaggacgctggcgtcggctacgccgccccggggccagttcagacgccgagagtccggggctgcagcgtaccgctcctcccgctgcggatcgcccggcctttggtcggccgccggtcgtccggacgcccgtacgtctggctcccgctggcaagccacccgctgcccaccaagcccgagctccgggcgggcacacggaacactcagactccccagcaggcaccacagtgatggagtacatgagcaccggaagcgacgagaaagaagagattgatttattaattaaccatttaaacgtgtcggaagtcctggacatcatggagaacctttatgcaagtgaagagcctgcagtgtatgagcccagtctgatgaccatgtgtccagacagcaatcaaaacaaggaacattcagagtcgctgcttcggagtggccaggaggtgccctggttgtcgtctgtcagatatgggactgtggaggatctgcttgcatttgcaaaccatatctcgaatacgacaaagcatttttacagatgtcggccccaagaatctgggattttattaaatatggtaatcagtccccagaatggtcgctaccaaatcgactcggatgttctccttgtcccgtggaagctgacgtacaggagcattggttctggtttcgttcctcggggggcctttggaaaagtgtacttagcacaagacatgaagacaaagaaaagaatggcatgtaaactgatccctgtagatcagtttaagccatcagatgtggaaatccaggcctgcttccggcacgagaacattgccgagttatacggtgcggtcctatggggcgacactgtccatctcttcatggaagccggcgagggagggtctgtcctggagaagctggagagctgtgggcccatgagagaatttgaaattatctgggtgacaaagcacgttctcaagggacttgattttctgcactccaagaaagtcatccaccacgatatcaaacctagcaacattgtattcatgtctacgaaagctgtgttggtagattttggcctgagtgttcaaatgacagaagatgtctatctccccaaggacctccggggaacagagatctacatgagccctgaggtgattctgtgcaggggccattccacaaaagcagacatctacagccttggagccacgctcattcacatgcagacaggcaccccaccctgggtgaagcgctaccctcgatcggcctatccctcctacctgtacataatccacaagcaggcacctcccctggaagatattgctggtgactgcagtccaggcatgagggagctgatagaagccgccctggagaggaaccccaaccaccgcccaaaagcagcagacctactgaaacacgaagccctgaatcccccaagagaggaccagccacggtgtcagagtctggactctgccctctttgaccggaagaggctgctgagcaggaaggagctagaacttcctgagaacattgctgattcatcatgcacaggaagcaccgaggagtctgaagtgctcaggagacagcgttccctctacattgatctcggagctctggctggctacttcaatattgttcgtggtccaccaaccctggaatatggctgatggatgactctattggcaacagtagggcggatatttctctcctggatgttggtttcacagatcctacacagcagctctggatagtgaattttacccaatttttttaggaagcagggaggaggtctctagtgacacaagaatgtcaaagccctggccccctttgtgaagctcctctggcatgttccagagcccaaggttctcatttctcaggtggtgggactggacaaaagggagtggtgagctcaggaaagaatcatttctgatgacaattctattcactttgcactttaatggacattaaaaaatagctctcacaagatagtaacctaaaatacctgtttttggttcttatataaccatgggttcttcattcaactcagaagacctgatctgtgtatatatttgtgtgtattatatggtaactctttgtaccttggttggtagagtctagtataagtttagttaatagtattttgggtggatagaacaactctaatattacagcaattcactggactagtgtctcacaaatgactgatttactcagagccattaagcagcaggccactagtgagagtttctgttatgttcctatggaaacactgtgtattgtacgtgctatgcttaaaacatttaaaacacaatgttttaaatgtggacagaactgtgtaaaccacataatttctgtacatcccaaaggatgagaaatgtgaccttcaagaaaatggaaacakktgtaaattctttgtagtgwtwccywtktaattaatgaaactattkttctktaaagtgtwtctatattaaaaatagcwtactgtgtatgttttattccaaaattccttcatgaaycttkcmtatakatatgtgtatatattttaacattgtaaagkmtgagtwykcttatttaaagtatatttttacattatgcaaatgaacttcaacgttttagtccaatgtgactggtcaartaaaccaartaawctgwgwawwwwrwmwwaaaaaaa

SEQ ID NO: 2012 - DNA, 8381 bp, Rattus norvegicus
gaggcggaggagggagcccgcgagagggtccgcccggccccccgccgagccgccaccgccgcctcagccgcctcaggaacgagtcgctaggggaacatggcgccgggcccgccgtcgcagcggccgggatcgcggaggccggggcgcgctgagggccccccaaggctgggtctctgtgtagtcttggctgtcctggaactcactatttagatcaggtagccctcaaactcaaagagatctacctgcctcagtttctgcctcccaagtgctgagactaaaggcatatatacttcgtctggcctgactttcccttctgaatcgttgtcccaagaggaacttcactggcatcatacgttgaccgttagatactgagtcgtaagacatgacatgtacctagattattgtgtaaggaaggtctttggaatctcctgttgcttcgttgttttctgacgtattttaaacttcatttttacgtggtagtagacaagttaggaacgaatcagtattaaaagtttaccgtcctaccgaggtcgacgtcttcgaggcagacatgttggctatttgtcgatgagaagtaggaagaactgacatactggtttagaacactatgggacctaacatttgctgcttgggcagccagtgtccactggcactgctaagaagccctcactctactgcagaacactaatctgatcttggaagtggctgtttgtggcaggatgtttcgaagatgatgatggcaagaaagcaagatgtccgaatccccacctacaacatcagtgtggtgggattgtccggcactgagaaggagaaaggccagtgcggcattgggaagtcttgtctatgtaaccgctttgtgcgcccaagtgctgatgagtttcacctggaccacacttctgtcctcagcaccagtgactttggtgggcgggtggtcaataatgaccattttctgtactggggagaagttagccgctccctggaggactgtgtggaatgtaagatgcacattgtggagcagactgagtttattgacgatcagacttttcaacctcatcgaagcacggcactgcagccctacatcaagagagccgcagccaccaagcttgcttcagctgaaaaactcatgtatttttgcactgaccagctagggctggagcaagactttgagcagaaacagatgccagatgggaagctgctggttgacggtttccttctgggcatcgatgttagcaggggcatgaacaggaacttcgatgaccagctcaagtttgtctccaatctctacaatcagcttgcaaaaacaaaaaagcccatagtaatagtcctgaccaagtgtgatgagggtgttgagcggtacattagagatgcacatacttttgccttaagcaaaaagaacctccaggttgtagagacctctgcaaggtccaatgtgaatgtggacttggctttcacgaccttagtgcaactcattgataagagtcgagggaagacgaaaatcatcccttactttgaagctctcaagcagcagagtcagcagatagctacagcaaaggacaagtatgagtggttggtgagccgcattgtgaaaagtcacaatgagaactggctgagtgtcagccgaaagatgcaggcctcccctgagtaccaggactatgtctatctggaagggacacagaaagccaagaagctcttcctgcagcacattcaccgcctcaagcatgagcatattgagcgccggagaaagctgtacctggcagccctgccattggcttttgaagccctcatacctaatctagatgaagtagaccacctgagctgcattaaagcaaaaaagctgttagagactaagccagagttcttaaagtggtttgttgtacttgaagagacaccatgggatgaaaccagccacattgacaacatggaaaatgagcggattccctttgacttgatggatactgtccctgctgagcagttgtatgagacccacttggagaagctgaggaatgagaggaagagagctgagatgcgaagggctttcaaagaaaacctggagacctctcctttcataactcctgggaaaccttgggaagaagctcgtagttttattatgaatgaagacttctaccagtggctggaagaatctgtgtacatggacatctatggcaagcaccaaaagcagattatagaccgggcaaaggaagagttccaagagttgcttttggagtattcagaattgttttatgagctggagctggatgctaaacccagtaaggaaaagatgggtgttatccaggatgttctgggtgaagagcaacgatttaaagcattgcagaaactccaagcagagcgtgatgccctcattctgaagcacattcattttgtgtaccacccaacaaaggagacatgcccaagctgtccagcttgcgtagatgctaagattgaacatttgatcagttctcgctttatccgaccatctgataggaatcagaagaactctttgtctgaccccaatattgataggatcaatttggttattttaggcaaagatggccttgcccgagagttagccaatgaaattcgagctctttgtacaaatgatgacaagtatgtaatagatggtaaaatgtatgagctttctctgaggccaatagaggggaatgttgccgttcctgtgaactctttccagacaccaaccttccaaccccatggctgtctctgcctttacaattcaaaggagtcgctgtcctatgtggtggagagtatagagaagagcagagaatctacactgggcaggcgggataatcacttagtccacctccccttgactttaattttagttaacaagagaggggacacaagtggagagactctgcacagcttaatacagcaaggccagcagattgctagcaaacttcagtgtgtctttcttgatcctgcgtctgctggcattggttatggacgcaacattaacgagaagcagatcagtcaagttctgaagggactcctggactctaagcgcaacttaaacctggttagttctactgctagtatcaaagatttggctgatgtggaccttcgaattgtcatgtgtctcatgtgtggtgatccttttagtgcagatgacattctctctcctgtcctgcagtcccaaacttgtaaatcttcccactgtgggagcagcaactctgttttacttgaacttccaattggagtacacaagaagcgcattgagctgtctgttctttcataccattcctcatttagcatccgaaagagccggttggttcatgggtacattgttttttattcagccaaacgtaaggcctccttggcaatgttacgtgcctttctttgtgaagtgcaggatattatccccatccagcttgtcgcactcactgatggcgctatagatgtcctggacaatgacttaagtcgagagcagctaacagagggagaggaaattgcacaagaaattgatgggagattcacaagcatcccttgtagccacccccagcataaactcgagctcttccatcccttttttaaagatgtggtggagaaaaagaacataatcgaggccacacacatgtacgataatgtggctgaggcctgcagcaccactgaggaggtattcaactcccccagggctgggtcacccctctgcaattcaaacttacaggactcagaagaagatgtggagcctccatcgtaccacctttttcgggaagatgcgacattgccctccctgtccaaagatcattccaagttctcaatggagctggagggaaacgacgggctgtctttcataatgagcaactttgagagtaaactgaacaacaaagtacctccaccagtcaaaccaaagcctcctgtgcattttgagatcacaaaagatctttcttacttagaccaaggtcatcgggagggacagaggaagtctatgtcttctagcccctggatgcctcaggatggatttgatccttctgactacgcagagcccatggatgctgtggtcaagccaaggaatgaggaagaaaacatatactcagtgccccacgacagcacccagggcaagatcattaccattcggaacatcaacaaagcccagtccaatggcagtggcaatggttctgacagtgagatggacacaagctctctagagcgaggccgcaaagtatctgcagtgagtaagcctgtgctgtacaggacgagatgcacccgcctggggcggtttgctagttaccgcaccagcttcagtgttgggagtgatgatgagctgggacccatccgaaagaaagaggaggaccaggcatcccaaggttataaaggggacaatgctgtcattccttatgaaacagatgaggaccccaggaggaggaatatccttcgaagtctaaggaggaacaccaagaaaccaaagcccaaaccccgaccatccatcacaaaggcaacctgggagagtaactattttggggtgcctttaacaacagtggtgactccagagaagccgatacccattttcattgaaagatgcattgagtacattgaagccacaggactaagcacagaaggcatctaccgggtcagcggaaacaagtcagaaatggaaagtttgcaaagacrgywygakcaagatcacaatctggacctggcagagaaagacttcactgtgaacactgtggcaggggccatgaagagttttttctcggagctaccagaccccctggtaccatacagcatgcagattgacttggtggaagctcacaagatcaacgacagggagcagaagctgcatgctctgaaggaagtrctgaagaagttccctaaggagamccatgaagtcwtcaaatatgtcatctcccacmtgaacagagtcagccacaacaacaaggtgaatcttatgaccagtgagaacctgtccatctgcttctggcccacgttgatgcggcctgacttcagcagcatggacgcactcacagccactcgatcctaccagaccatcatcgagctcttcatccagcagtgcccmttcttcttctacaaccggccgatcagtgagccaccgggggctgcgctggctccccttcagccatggcacccactgtccccttcctcacctctacacctgctaccagtcagccatcacctccccagtcacctcctccaacccctcagtccccaatgcagccattgctctcctctcagctccaagccgaacacacgctgtgagccaccacagcccaggaagcaggaaaatcagttgtcttcttgacagggtggcatttggccttgaacaaaatcaggtctcctggggtggagctcacagccaagcgcctttttaagacttcagtggcagcaccagccagtgtccaccactgctgggcagttgagccctgctgttcgtttacctgccctggctatggctgtggcaagctcttaggccccgccttggtctgggccaatctgagaactgaactgaccagatggcggccccatcacccttactgctccttggaccccttggcccaacccgtttgcctgcaccagcgtcaggccccaccgtcagacatcaccccagcctctgccaggggagaggtaaccccagcaggctgcccctctacagaggacgtttcccagtttgtcctctctcatcatccacacacatacctgcaacggggtcttggggacatgtgggctatggctctgctaccccatgggacacactggggcactggcatggccaacagcacagcaagaggagagctttgtgcctagacccagtgtgtggctttcctccaacccckkccsaggcttctgatccattccctgccgcaaaggaacactggaagaaagatggactcctccacagagacagaaagaccgaaatcacggaaagaaaacagacctcaagtttccactcccacctgccaggtggccactgggtaacaatcccctttgtctatgtgtgacagcaaagtaaggacacctgggcagttactacaaacacagaccccaacccctacccccagagaagacagagcccttggaaagattattagcacgsccckgcccctgctgccaaccaacacactacatacatacatacatacactactatagaaacactgcaggcgtgtgcacacagcacccaggttggcgtgtttggtttgaagtggggtcatttcatcccatgctgtgaatgaaccagaaaaaggtgtctgggatatgagcaggcatagcaccttccagaaatgatgaactggctatggaatgagggatcctgttcttaggcacaggtacccatgcctggcttgttgtcacactgaccagccctgacacttcccccagcagcctccccatactcctcctgatatggcagcccttgtgggctcttgctttgcccccactttaatctaagcactgggccatgaaatctgacactaaggtaccctgagcataggaggggcatgggtcgcaccattgcactttagaaatagcatgtgggagtgttcccaagggcctcaggtggcctgccaccctgcctttacctctgtaggacaagagaaggatgcctggcctctggctagggtcctgccctagagaagctggctgtctmccwatctswagtacttggcaacataaggtgcttgcaaacactaaggctgccccctgcaaagtaatctccaagacaaaaccaaacgcaaggtacaaatgtgttatacgtaagtgtctcccttcctgggggtctgtgtcgggtgctgtggcctggaatcaataggagcataatgtgtgtagtgccccactaaggttgcagtccgtcctctgccctgacttcatgccccaagcctcagctattgaaatggcttccattcagtagcttctgtgttgggtctttgcaragatggaattggagccatcctgctgtgaacagagttatgaacccatctatgagctgctgcctattatgtcgacagggcagtgggtggcagacagaggtaggcacatggctagtagagccctgcttggagctcacttctgcttcaggcactctaagtgaccttcccactcatgacaagccaactggggarcymcmsacracagakcactcagggswkcarymsatggyrkktsagstgswgccctacccagaaagtagccctggaggtgaccacaacctggcaccacccaacattaccacggggcccagggctgggtttcgagtttcacactgggtagtatgcattccttctgcactgtcccatccttctcacctcaaccttttaagggatatggaaaggtctggtgctctgtcttcccccacgctctccattttctccagccaatgcaggcagcagcagtaacagacttcttagaaccttcacactgtatctaccactacatagggtgacaaaagagcaacttgtaggccagaggggtggggtgagccctcctgtggtctgtacctccacccctggtctagcgggaggaatccttgaagacctgcatcacctaagtgaggaccctacagggtaccttatgctctgctcccagaccctgacttaacattgggccaacaacgatcctcatcccccaaagtcatctacagatggcaggtggaagagggaggttctccattccacacccactaccagtgtgcatggggagggaatggggatgaactaggtcaatccagggacactagagaggctaaggctctagccctattacccagccatgaagccacccaagtagtggagccaggacataagttattgttcacattaaagaatcatgttccctgtgtacatttaagcaaagaaaagtcttggattgtatggaataaaacttgtttgaaaatttggaatagtgctgttgtcggcttatttttctggtacttgtatttcacatgttaaatgatctttatatgtgttggattaacaagtattttgagttttctgagaacaaacagaaacattaatggtattgaagtgtgttagtagtctggccgtgtgyyyaaacttctgttttgcagcaaaagtggaaacctgtctgtacagcgagtgtaatgatttcctgtatcgtggyycaaaccagggcctctctagttgctgttagcaatgtctcttcgtttccaggcttttttaaaaaatggttctgagctccagcctgttagtgcatgcagccatcacggcagccaagcatctctgagtgaggtgtttttgtttggttttggtttttaagatcatgtatttgctacaaagtattgtacttgtctcaatgggaatggtmkamarmaamagaaaagaaaaggccttatgtgatatgtaccatagttaataaatcaatcttgtaaaaaacataaataaaaacaggcctgagag

SEQ ID NO: 2013 - DNA, 2250 bp, Rattus norvegicus
ggcagcgaacacaagcgcatccggtagaacggaaagaacaggaattgcagagtgacttcaagtctccatacgatttactacccgggtgacggcagtgactcgacagagtagcggctgcaggtgggatggataacagggtctcgggaacgaccagtaatggagagacaaagccagtgtgtccagtcatggagaaggtggaggaagacggtaccttggaacgggagcaatggaccaacaagatggagttcgtactgtcagtggcgggagagatcattggcttaggcaacgtctggaggtttccctatctctgctacaagaacgggggaggtgccttctttattccctacctcatcttcctatttacctgtggcattcctgtcttcttcctggagacagcgcttggccagtacaccaaccagggaggcatcacagcctggaggaaaatctgtcccatcttcgagggcatcggctatgcctcacagatgatcgtcagccttctcaatgtctactacatcgttgtcctggcctgggccctcttctacctcttcagcagcttcaccactgacctcccctggggtagctgcagccacgagtggaatacagaaaactgtgtggagttccagaaaaccaacaattccctgaatgtgacttctgagaatgccacatcccctgtcatcgagttctgggagaggcgagtcctgaagatctcagatggcatccagcacctggggtccctgcgctgggagctggtcctgtgcctcctgcttgcctggatcatctgctatttctgcatctggaaaggggtcaagtccacaggcaaggtggtgtacttcacagctactttcccttacctcatgctggtggtcctgttgatccgaggagtaacactgcctggagcagcccagggaattcagttttacctgtaccccaacatcacacgtctgtgggatccccaggtgtggatggatgcgggcacccagatcttcttctcctttgccatctgcctggggtgcctcacggccctgggcagctacaacaagtaccacaacaactgctacagggactgcgtcgccctttgcattctcaacagcagcaccagcttcgtggccgggtttgccatcttctccatcctgggcttcatgtctcaggagcagggcgtacccatatctgaggttgctgaatcaggccctggcctggcattcatcgcctaccctcgagctgtggtgatgttacctttctcgcctttgtgggcctgctgtttcttcttcatggtggttctcctgggactagacagccagtttgtgtgtgtagaaagcctcgtgacagcgctggtggacatgtatccccgggtgttccgtaagaagaaccggagggagattctcatcctcatcgtgtctgtcgtctctttcttcatcgggctcattatgctcacagagggcggcatgtacgtgttccagctcttcgactactatgcggccagtggcatgtgtcttctctttgtggccatctttgagtccctctgtgtggcttgggtttacggagccagccgcttctatgacaacattgaagatatgattgggtacaagccgtggcctcttatcaaatactgttggctctttttcacgccagctgtgtgcctggcaaccttsctgttctccctgatywaatacacgccactgacctacaacaagaagtacacatatccatggtgggrggmtgccctggggtggctcctagctctgtcctccatggtctgcattcctgcctggagcatctacaagctcaggactctcaagggcccactcagagagagacttcgccagctcgtgtgcccggctgaagaccttccccagaagagccaaccagagctgacttytccagckayassgawkwygyccctccymagrytcmcagarstggagtctaactgstagggacgaggcctttgacacacctgcgagtctgtctgtggggacagctacagacacagagggcagaaccacccctccgtgctggggcagagagacaaaagggggtatttggaagctgccttytgaactgggaacctcctatcttgatacccstattccagggtggtacgcacattgtgacatgcccaaatcaacaacacccctttgaggcagcttakgaaagcccagggaggactggggaggtgaaagcctggcttgtcactgggttsgyttycttccattaaatycaacttcctcccacaaaaaaaaaaaaaaaaaa

SEQ ID NO: 2014 - DNA, 5617 bp, Rattus norvegicus
ccagcagatttctgggttcatataaaacaacaaaayacarkcaaaatgcatcaccaacatacacccaattgacatgctggaatcttagggtggtcttgcagagacaaagacaagagaagagctgttgggattgatttcaccatcctaacagcttctggctgtctcacaccagggtttgagacctaccgacaggactcgtagggcatacacaggaaatttggccttggcatcagtggtgctggaagcctgtgatatgacagtaggcctctgaagctattctggtgtatcactctgccccttctccttctgtgtttggagccaacatctggaggagcctcgaggcctgccaagcagccgaagtcctggcttagttctggcttcgtgttcttctctgagaaaagtgtgttctttctgattctgctctcctattgctggcaccacgccggtggtagttgaaggtgttggttctgcaagagtgaagtacctgatggtgccacagatgcccttacttaacatcatcgtttgtaaatgaatcagtgatctctcttgagcctcggtggccttctttttcagaacgttgcctccaaagtgtatcctccctttggcctggaagttctgtggctatcccatactactggggtctctgctttccagttggaaggggactactgggagagaggaaggggctgctggaagcgaagaagaaggaaaaaagagctgaaggagggtgcgcccctcccactgccgcctcccccatccctcccactcctctggggacccccattctccgtgacgttgtccaggrccacttcgaccctgtcgcccccagctccccccsgcsgcaccccagccccgagcatggggacggcgctggtccagcatgggggctgctgtctcctctgcctgtcgctgctgctgttgggctgctgggcagagctgggcagtgggctggagttcccaggcgctgagggccagtggacgcgcttccccaagtggaacgcgtgctgcgagagtgagatgagcttccagctgaagacacgcagcgcccgcggcctcgtgctmtacttcgacgacgagggcttctgcgacttcctcgagctcatcctgacacgcggcggccgcttgcagctcagcttctccatcttctgcgccgagcccgccacgctgttggccgacacgccagtcaacgacggcgcctggcacagcgtgcgcatccgccgccagttccgcaacaccactctctacatcgamcgcgctgaggccaagtgggtggaggtcaagtccaagcgcagggacatgacggtgttcagtgggctgttcgtgggcggcctgccgcctgaactgcgagccgctgcgctcaagctcaccctggcctcggtgcgtgagcgggagcccttcaagggctggatccgtgatgtmagggtcaactcgtcccaggcgctgccggtggacggcagcgaggtcaagctggacgaagagccgcccaatagcgggggcgggagcccgtgcgakgcgggcgatgagggcgacggcggcgtgtgcctcaacgggggcgtgtgctccgtggtcgacgaccaggccgtgtgtgactgctcgaggaccggtttccgtggcaaagactgcagccaagaagacaacaatgtagaaggtctggcgcacctgatgatgggcgaccaaggtaaaagtaaaggaaaagaagagtatattgccacattcaagggatctgagtacttctgctacgacttatcccaaaaccccattcaaagcagcagcgacgaaataactctgtcctttaaaactcttcagaggaatggactgatgcttcacacagggaaatcggctgattatgtcaaccttgccttgaaaaatggagctgtctctctggtcattaatttgggatcaggggcctttgaagcgctagtagagcccgtgaatggaaagtttaatgataatgcctggcatgatgtgaaagtcaccaggaatctgcgtcagcactcaggcattggacacgctatggtgacaatatcagtggatgggattcttaccacaacgggctacacgcaagaagattacaccatgctggggtctgatgactttttctatgttggaggcagccccagcacagccgaccttccagggtcaccagtcagtaacaactttatgggctgtctcaaagaggtcgtatataaaaataatgatgtaagactggagttatcgcgacttgccaagcaaggagatcctaagatgaagatccatggtgtggtggcttttaagtgtgaaaatgtggcaaccttagacccaatcacttttgagaccccagaatctttcatttctttgcctaagtggaatgcaaagaaaacaggctcaatatcatttgatttccgtacaacggagccaaatggcctcatcttgtttagccatggcaagccaagacatcagaaggatgccaagcacccgcagatgattaaggttgacttttttgctattgaaatgctggatggccacttgtacctcctcttagacatgggatcaggtactataaaaatcaaagcccttcagaagaaagtcaatgatggagaatggtatcacgtggatttccagcgagatggacggtcaggtaccatttctgtcaacacacttcgtactccctacacagctcccggtgagagtgagatcctagacctcgatgatgagttgtatctgggtggcttgccagaaaataaggctggcctggtcttccccactgaggtgtggactgctctgctcaactatggctacgtaggctgcatccgggatctattcattgatggccagagcaaagatatccggcagatggcggaaattcagagtactgctggagtgaagccatcctgctcaagggagactgcaaaaccatgccttagcaatccttgcaaaaacaatggcatgtgcagggatggctggaacagatacgtctgtgattgctctggaacaggctatctcggcaggtcctgtgagagagaggcaacggttttgagctacgatgggagtatgtttatgaaaattcagctccctgtggtgatgcacactgaggccgaggacgtttccttacggttcagatcccagcgtgcgtacggcattctgatggcgaccacttctagagactccgcagatacccttcgactggagctagatgcagggcgcgtgaaactcacggtcaatctagattgtatcaggattaactgtaattccagcaaaggtcctgagaccctttttgccggctataacctcaatgataatgaatggcacacagtacgtgtggttcggcgaggaaaaagtttaaagctaaccgtggatgatcaacaagccatgacaggccaaatggcaggtgatcatacaaggctggagtttcataacatagagacaggcatcatcacagaacgacgctatctttcttctgtcccctccaacttcattgggcacctgcaaagcctcacatttaatggaatggcatacattgacttgtgcaaaaatggtgatatagattattgtgaactcaatgccaggtttggattcaggaacatcatcgcggatcctgtcaccttcaagaccaaatcaagctatgttgccttagctacattgcaagcctacacttctatgcatctatttttccaattcaagacaacatccctagatggactaattctgtataacagtggggatggaaatgactttattgtggttgaattagttaaagggtacttacattatgtgtttgacttgggaaatggtgctaacctcatcaaagggagctcaaacaaaccactcaacgacaatcagtggcacaatgtgatgatttcaagggacaccagcaatctccacacagtaaagatcgacacaaaaatcacaacacaaatcactgcgggagccagaaacttagacctcaagagtgacttgtatattggaggagtggctaaagaaacatacaaatcgttgccgaaactggtccatgctaaagaaggctttcaaggttgcctggcatctgtggacttgaatggcaggcttccagacctcatatctgatgctcttttctgcaatgggcaaattgagagaggatgcgaagggcccagcacaacctgtcaagaggactcatgttcaaatcaaggcgtgtgcttgcagcaatgggatggctttagctgtgactgtagcatgacttccttcagtggcccgctctgcaatgaccctgggacgacgtatatctttagcaaaggtggtggacaaattacacataagtggcctcctaatgaccgacccagtacacgagcagacaggctggccatcgggtttagcactgttcagaaggaagcagtgttggtgcgtgtggacagttcctcaggcctgggtgactaccttgagctgcacatacaccaaggaaaaattggagttaaatttaatgttgggacagatgacatcgccattgaggagtccaatgcaatcattaatgatggaaaataccatgtagtgcgtttcacgaggagtggtggcaatgccacgttacaggtggacagctggccagtcatcgaacgataccctgcaggaaacaatgataacgagcgcctggcgattgctagacagcgaattccatatcgacttggtcgagtagttgatgaatggctactcgacaaagggcgtcagctcacaatcttcaatagccaagcaaccataataattggcgggaaagagcagggccagcccttccagggccagctctctgggctttactacaatggcttgaaagttctgaatatggcggcagaaaacgatgccaacatcgccatagtgggaaatgtgaggctggtcggtgaagtgccttcctctatgacaactgagtcgacagccactgccatgcagtccgagatgtccacctcaatcatggagaccaccacaaccctggctaccagcacagctcgacgaggaaagccccccacaaaggagcctatcagccagaccacggatgatatccttgtggcctcggcagagtgtcccagcgacgatgaggacattgacccctgtgagccgagctcaggtgggttagccaaccccacccgagtgggcggccgcgaaccatacccaggctcggcagaggtgatccggkagtctagcagtaccactggcatggtggtggggattgtcgcagcagcagctytgtgcatcctcatcctcctytatgccatgtacaagtwcagaaaccgggatgaaggctcatatcacgtgratgagagtsgaaactacatcagwaactcagcacagwccaatggggctgtggtcaaggagaagcagcccakcagtgcgaaaagcgccaacaaaaacwagaagaacaaggataaggagtattatgtctgatctcaagattcgaaaaggacacttgyatagaaatagtcttcattttatctgagacataatataaacttatttactttcctttttatgaagcacatacaaaagaagacagggaatgckatcaggagggaaaactctttttaaaaaaaaacaaacaagtatgtcatgctcttgyytctcmraawwaaaacatacacaaaaaaaaggaaagagagaaaaaaaaaaaaamstcgtgccg

SEQ ID NO: 2015 - DNA, 6436 bp, Rattus norvegicus
ggaaggcgggggaggggctccaccgcccccgtcgccggcgttgccttccggggacgtggacacgtgagccccagcggctgggtccatggcattgtgaatcgacgagggagccccgctccgcgcgaggggcgcccggccccctccccgccccatgcgcccgcggctctgaagcctgagcggggccgggggccgggcggcgtcggggccgccggaggcatggctctcgggagtcggtggcgaccgccaccccagttgccgccgctgctgttgttgctggcgctggtggcaggcgtccgtggcttggagtttggcggcggccccgggcagtgggctcgctacgcgcgctgggcaggcgcggcgagcaccggcgagctcagcttcagcctgcgcaccaacgccacgcgcgcgbtgmtgctytacctggacgacggcggcgactgsgacttcctggagctgctgctggtggacgggcgcctgcggctgcgcttcacgctgtcttgcgccgagcccgccacgctgcagttggacacgccggtggccgacgaccgctggcacatggtgctgctgacccgcgacgcgcggcgcacggcgctggcggtggacggcgaagcccgtgcggccgaggtgcgctcaaagcggcgcgagatgcaggtggccagcgacctgttcgtgggcggcatcccacccgacgtgcgcctgtctgcgctcacgctcagcaccgtcaagtacgagccgcctttccgcggcctcctggccaacctgaagctgggcgagcggccgccggcgctgctgggtagccagggtctgcgcggtgcggccgccgaccccctgtgcgcgcccgcacgcaatccctgcgccaacggcggcctctgcaccgtgctagcccccggcgaggtgggctgcgactgcagccacactggcttcggcggcaagttctgcagtgaagaggaacaccccatggaaggtccggctcacctgacgttaaacagcgaagtagggtccttactgttctccgaggggggggccgggagaggaggagccggcratgtgcaccagccaacaaaaggcaaggaggaatttgtggcaaccttcaagggcaatgagtycttctgctacgacctgtcacacaacccgatccagagcagcactgatgagatcacactggccttccgcaccctgcagcgcaacgggctgatgctgcacacggggaagtcggctractacgtcaacctgtccctcaagtccggggctgtctggctgrtcatcaacctaggctcaggtgccttcgaggccctcgtggaacccgtcaatggcaagttcaacgacaacgcctggcacgacgtccgggttacccgaaacctgcgccagcacgcagggattggacacgctatggtaaacaaactgcattatctggtgaccatctcggtggacgggatcctgaccaccacaggctacacgcaggaggattacaccatgctgggctctgatgacttcttctacattgggggcagccccaacacagccgacctgcctggctcccctgtcagcaacaacttcatgggctgtctcaaggacgtggtctacaagaataatgacttcaagctggagctatcccgactggctaaggaaggggacccgaagatgaagctgcagggggatttgtctttccgttgtgaggacgtggctgccttggaccctgtgaccttcgagagtcctgaggcctttgtcgcactgccccgctggagcgccaagcgcactggttctatctccctggacttcagaaccacggagcccaatgggttgctgctcttcagccagggccggcgggctggggccggggtaggcagccacagttccagccagagggccgactactttgccatggagctrttggatggctacctcyatcktstgctggacatgggctctgggggcatcaagctgcgggcgtccagccgcaaggtcaacgacggcgaatggtgccacgtggacttccagagggatgggcgcaaaggctccatctctgtgaacagccgcagtacaccattcttggccacaggagagagtgaggtcctggacctggagagtgagctgtacctgggcggtctccctgaggggggccgagtggacctgccattgcctcctgaggtgtggacagctgctctccgggctggctacgtgggctgcgtgcgagacctcttcatagatggacggagtcgagatctccggggcctggctgaggcacagggagctgtgggcgttgcacctttctgctctcgggagaccctgaagcagtgtgcatcggccccctgtcgtaatggtggcatctgtcgagagggctggaaccggttcgtctgtgattgcatcgggaccggctttctgggtcgggtctgcgagagagaggccacagtcttaagctatgatggctccatgtacatgaagatcatgctgcccaatgccatgcacacggaagcagaggatgtgtccctgcgattcatgtcccagagggcttatggactcatgatggccaccacctctagggagtcggccgacactctgcgtctcgagctggacggggggcagatgaagctcacagtcaacctcgactgcctgcgcgtcggctgcgcacccagtgctgcagctaaaggccccgagaccctctttgcggggcacaagctcaacgacaatgagtggcacacgctgagggtggtacggcgtggcaagagcctgcagctgtctgtggacaacgtgactgtggagggacagatggcaggagcccacacgcggctggagttccacaacatcgagacaggcatcatgacagagcgacggtttatctctgtggtgccctccaacttcatcggccacctgagcgggctggtgttcaatggtcaaccctacatggaccagtgcaaagatggagacatcacctactgtgagcttaatgcccgctttgggctgcgtgccatcgtggctgatcctgttaccttcaagagtcgcagtagctacctggcgttggccacgctccaagcctatgcctccatgcacctcttcttccagttcaagaccacagcccctgatggacttctgctgttcaactcaggcaacggcaatgacttcattgtcatcgagctggtcaaggggtacatccactacgtgtttgacctgggaaatagcccgtccttgatgaagggaaactcagacaaaccagttaatgacaaccagtggcacaacgtggtggtgtccagggacccaggcaacgtgcacacgctgaagattgactcccgcacggtcacgcagcattccaacggtgcccgaaatctggatctcaaaggggagttgtacatcggtggcctgagcaagaacatgttcagcaacctgccaaagctggtggcctctcgggatggctttcagggctgcctggcttctgtggacctcaacgggcgcctcccagacctcatcgcagacgccctgcaccgaatcgggcaggtggagaggggctgtgatggccccagtaccacctgcaccgaagagtcctgtgccaaccagggcgtctgcctgcagcagtgggacggctttacctgtgactgcaccatgacttcctatggaggccctgtctgcaatgaccctgggaccacatacatctttgggaaggggggagcgctcatcacctatacatggcctcccaatgaccgacccagcacaaggatggaccgcctggccgtaggcttcagcacccaccagcggagcgctgtgctggtacgcgtggacagtgcctccggcctcggggactacctgcagctgcacattgaccagggcactgttggggtgatttttaatgtgggcacggatgacattacaattgatgagcccaacgccatcgtgagcgacggcaaatatcacgtggtgcgcttcactcgaagtggtggcaatgccactttgcaggtggacagctggccagtcaacgagcggtacccggcagggaactttgataacgagcgcctggcgattgctagacagagaatcccctaccggcttggtcgagtagtagatgaatggctgctcgacaaaggacgccagctgaccatcttcaacagccaggctgccatcaagatagggggccgggatcagggccgccccttccagggccaggtgtccggcctctactacaatgggctcaaggtactggcgctggccgccgagagcgaccccaatgtgcggaccgaaggccacctgcgcctagtaggggaagggccgtccgtgctgctcagtgcagagaccactgccaccactctgctggccgacatggccaccaccatcatggagaccaccaccaccatggccaccaccactactcgccggggccgctcccccacaatgagggacagcaccacccagaacacagatgaccttctggtggcctcggctgagtgtccaagtgatgatgaggacctggaggagtgtgagcctagtactggaggagagttaatattgcccattatcacggaggactccttagacccccctcccgtggccacccggtcccccttcgtgcccccgccccccaccttctacccctttctcacgggcgtgggtgccacccaagacaccctgcctccgcccgccgcgcgccgcccgtcctccgggggcccgtgtcaggccgagcgcgacgacagcgactgcgaggagcccgtggaagcctcgggcttcgcctccggggaggtctttgactccagcctcccccccacggacgacgaggacttttacaccaccttccccttggtcacggaccgcaccaccctcctgtcaccccgcaagcctgcgccccgacctaacctcaggacagatggggccacgggcgcccccggggtgctacttgcgccctccgccccagcccccaacctgcccgcgggcaaaatgaaccaccgagacccactgcagccgctgctggagaacccacccctggggcctggggtccccacggccttcgagccgcggcggccgcctcsccwgcgccccgghstgacctcagtccccggtttcccccgtctgcccacagccaaccccacgggtccgggggagcgcggcccgccgggcgcggtggaastgatccgcgaatccagcarcaccacgggcatggtggtgggcatcgtggcggcggcggcgctctgcatccttatccttctctacgccatgtacaagtaccgcaaccgcgacgagggctcctaccaagtggaccagagccggaattacatcagtaactcggcccagagcaatggggcrgtggtgaaggagaaggyccccgctgyccccaagacgcccagcaaggccawgaagaacaaagacaaagagtattacgtctgagcacccagtccakgcaycgcgccccactgccagctgctcctcccgggaaggsccgggaggagggtgcggccctctccctgcasggggatctggggaccctctccmcggctgcctcaggsttctcccwcgaagaggaaacgcaaaaagaaaaggaatataactactacgtgctcatccccttccctcccactgccctcggcgccgcactgtcagctctggggctggctgtcctcygcyswrykcytgkcaggcagggcacgtgctcacagccctgggttgatttattttttaaggggcgtagttttattttggtggggctgggcgggaaggaaggctggggttttgtaaagtgtccactgcgccgttcgtttatttccctcgattttcttcttcctcccagctcctcccgccttccttcttcgcagccctcctgtcctggttcaggcttgctgtgtcttttgtccctaccctcctccaccccatcccccctttctttccttttcttttctcttcttttcctttctttcttttttaaattctgttttctctgcttcccttcctttgggtttccagagtcgctgggagaagaagggtgggcttgggtggctggggccgggcagtggggctcattcccctggtgccgcaagtcccctcgtgaggagaaactcctgcctgggtctgcccaaggattgggcttggacctggccaaggcctgttgtgtgtgtcgctgccgggcaacgtgcattgctgggaagccgctggaggagcggggtggggggcggggggagggggaaaggcaaatgcagatatatattaaaaacaawtrrccgaggtaccagagctgcgtctgtggcaccagctcgctgcaggcgcagaggatggtgggagtgaggctgtgtctgcggatggctggggtcacttctccgcccatgggctccctgctcccccagttttttttctctttgttaacaaatgtgtctgagtcttggaaaacaccccaaacccggaaatgtgtgggaaaaagaaaacaaaaactttccaaawwmmaaaaaaaaaaaaaaaaaaaaaaaaa

SEQ ID NO: 2016 - DNA, 2608 bp, Rattus norvegicus
cggaacagtctaagggtgttcactttggggactcagtgagtccccctctgttatggagtacagtgtctcttgaatcttacttctggaaatccacggacaagaagactggtgacctatcgattttgtgatgcccacccctggctcctggttccctctctagaggcagaagagccaggcgcagctaatgggacgctttcggagatgctgcgtctgacaggtgcgaagcaacatgtgcaactcctttcttcttcctcccctcagatcctcctccatcttcacccatctttagaggaagagcctacagaaagaagatggctcctgagcaaagagaaggggcctctcaggtgtcagtgacatttgaagatgtggctgtgctctttactcgggacgagtggaagaagctggatctgtctcagagaagcctgtaccgtgaggtgatgctggagaattacagcaacctggcctccatggcaggattcctgtttaccaaaccaaaggtgatctccctgttgcagcaaggagaggatccctggcaggtggagaaagagggccccagatacttctctctcggattgaagtgcagtcatagaaccactaagtcaactcaaacacaagactcttcatttcaggaactgattgtaagaaaatctaaaagaacctttgccttcgaacctttgaacatgaagtcagaaaatcttttcatacatgaaggcaaattagaggaaaagtgggataagaatactttgactgtagaaagaagccataaaaacaatgaatttagcccaaagtcccatagagaaaaacggtcctcagaatgtaaaaagcagatatcttatttatctaacccaccaggaatcacaccggataaacgctataaatgtagcatgtgtgagaaaaccttcattaacacctcatctcttcgcaaacatgagaaaaaccatagtggagagaaattatttaaatgtaaagaatgttcaaaagccttcagccaaagttcagcccttattcaacatcaaataactcacactggagagaagccttacgtatgtaaagaatgtgggaaggccttcactctcagtacgtccctgtataaacatctcagaacccacactgtggagaaatcctacagatgtaaggaatgtggtaaatcctttggccaaaggtcaggtctttttatacaccagargatccatgcccgagaaaaccctcatagatataacccaggaaggaaggcatccgcttccctctctggatgccagagagctcattccaggaagaagacctacttgtgtaatgaatgtggcaacaccttcaagtctagctcctccctccgttaccatcagagaatccacaccggagagaaacctttcagatgtagcgaatgcggcagagccttcagtcagagcgcatcacttattcagcacgaaagaatccacacgggagaaaagccctacaggtgtggcgagtktgggaaaggcttcacttctatctcaagactcaatagacaccggataattcatacaggagagaaattgtataattgcaatgagtgtggcaaagccttaagttcccactcaactcttattattcacgaacgaatccacactggagagaaaccgtgtaaatgtaaagtttgtgggaaagccttcagacagagttcagctctgatccaacatcagagaatgcacactggggaaagaccctataaatgtaatgagtgcgggaaaacattcaggtgtaactcatccctaagtaaccaccagcgaatccacactggagagaaaccttatcaatgtatagaatgtgggatgtcgtttggacaaagttctgctcttattcagcaccgaaggattcacacgggagagaaaccgtttaaatgtaacacatgcggaaagacctttaggcagagctcctcacgtatagcacatcagcgaattcatactggggagaaaccctacgaatgtaacacgtgtgggaaacttttcaactataggtcatcccttaccaatcattataaaatccatgtggatgaggacccttaaaaagtaaatttgcatgtaaaaaagccttamacsaragctcttcagagaatgggcttgagagctgtaataaacatactatggcgtccctgtagtcatttagttactgtcaactaaattccatggataaatcctgtgtaacaggtaggagtgaaatattcatgcctgtccaacactttaaaaaaattgcttgaaatccggtggttatgtgtagtcctggctaccggggaccctgaggattgcttgactccacaagtttgaagagcaaatgttatggagctttccatctcagaagattagtgacctgaaatgaagaattcacagctgaaggccttgacttcaggtatttggaaaatggtgcttttctctctgcaacagtgtgtgctagatacaattgtaatcataggcatctaagtgaacaraggagtgggatggacttagcaaaacacaaaactctactgttgtgatacttttatactattttaataatatccaaaagggatcaacacawwtcaaaaaaaaarccgaaataaaagatttawatgaactgtaawmwaaaaaaaaamaaa

SEQ ID NO: 2017 - DNA, 2421 bp, Rattus norvegicus
cctcgagatccattgtgctctaaagtcagcacatccactttcagagaacagagtctctgctgtcttgccaacggctgctccttcctctctgagtgcctcacatcaagataagctagaagtgagcttcactggaccaggcagacttcttctcctataaaggtgacagaagaccacatttgtcgaggggtcttcctaagccctgggaggagaagcccccaccatctcactccctacccagcccagcctcctgcagcccttgccatgctccaggttgttctgggtgctcctcagcggttgctgaaggaaggaaggcagtcccgcaagctggtgctggtggtggtgttcgtggctctgcttctggacaacatgctgctcactgtggtggtgcccattgtgcccaccttcctgtacgcgacagagttcaaagacagcaactcttctctgcataggggtccttctgtaagctcccagcaagctctcacctctcctgccttctctaccatattctccttctttgacaacaccaccacgactgtagaagaacatgtacccttccgtgtaacttggacaaatggcaccatccctcctccagtcactgaagccagctcagtaccaaaaaacaactgcttgcaagggatagagttcttagaagaagaaaacgttcggattgggattctatttgcttcaaaagctttgatgcaacttctggtcaacccatttgtaggacctcttactaacaggattggctatcacatccccatgtttgttggctttatgatcatgtttctctccacactaatgtttgctttctctggcacctatgccctgctatttgtggcccgaactctccaaggcattggatcttcgttttcatctgttgcaggacttgggatgctggccagtgtctatactgacaactatgagagagggagagccatgggaattgctttggggggcctggccttgggacttctggtgggagcacctttcggaagtgtgatgtatgaatttgtgggcaagtcctcaccattcctcatcttggccttcttggcacttctggatggagctctccaactttgcatcctatggccttcgaaagtgtctcctgagagtgccatggggacttcgcttttgacgcttctcaaagacccttacatcctggtagcagcaggttccatctgcttggccaacatgggagtcgccatactagagcccacgctgcccatctggatgatgcagaccatgtgctcccccgagtggcagctaggtctggctttcttgcctgctagtgtggcctacctcattggcacgaacctctttggtgtgttggctaacaagatgggtcggtggctgtgctcccttgttgggatggtggcagtaggtatcagcttgctctgtgtacctctggctcacaatatttttggtcttattggccccaatgcaggccttggctttgccataggaatggtggattcctctctgatgcccatcatgggatacctggtggacttacgccacacctctgtgtatgggagtgtctatgccatcgccgatgtggccttttgtgtgggctttgctattggcccatctactgggggtgttatcgtacaggtcattggctttccttggctcatggtcatcattggtaccatcaacatcatttatgctcctctctgctgcttcctgcagaacccgccagctaaggaggagaagcgtgcaattctaagccaggaatgccccacagagacccagatgtacacattccagaagcccacaaaggcgtttccactaggagagaacagcgatgatcctagcagcggggagtaactgcggagggcgatatctgagcctcacatctacagggaccagtctactacagattcaataattttmactttcctctcctccaggscactgccttcctcccttcttattgatacctttcctttactcacctgtaagtgcaacccaccaytytccctctgtgstttgacaccacccatggcccactttttgtgggaggacagtgctatttcctgccaggccaaagcgaagctgattaaagctgagttgtgacaagttctgcaaggggtgactcacttcctgcaggcaggactgaacaatgtgcgtgcgaaatcagggggacaaatgacaagcctgcctttcttctctgattgttttttttttttttttgacatattaccaatatgtcctaaaatttgacttgtgtcctgtgaaatgctttccccttattttttccagtttagcttctatacatacgggtttttgcttattttatgtgctaaaattgtttaccttcattaagtgaggccttcctactttcttcatcgcccaattgagaggaaataaacaactttcttaggcttgaaaaaaaactttagagcacaatggatctcgagg

SEQ ID NO: 2018 - DNA, 4033 bp, Rattus norvegicus
gccgtggtggagaccctgcggcgcgggagtaaattcatcaaatgggacgaggaggcctccagtcggaacctggtgaccctgcgactggaccccaatggcttcttcttgtactggacaggacccaacatggaggtggacacactggacatcagctccatcagggacacaaggacaggtcgttatgcccgcctgcccaaggaccccaagattcgagaggtactgggctttgggggtcctgacacccggctggaggagaaactgatgacagtggtagcaggaccagatccagtaaacaccacattcttgaacttcatggccgtgcaagatgacacagtcaaggtctggtcagaggagttgtttaagctggctatgaacatactggctcagaacgctccggaacacgttcttcggaaagcatacacgaaactgaagctgcaggtgaaccaggatggacggattccagtcaagaacattctgaagatgttctccgcggacaagaagcgggtggagactgcactgatctgcggcctcaacttcaaccggagtgagtccattcggcctgatgagttttccttggaaatcttcgagcggttcttgaataagctgttgctgcgaccggatattgacaagatcctgctggagataggtgccaagggcaagccgtacctcactctggagcagctcatggactttatcaaccagaagcaaagagacccaagactcaacgaggtgctgtacccaccgcttcgctcctcacaggctcggctgctcattgagaagtatgagccgaacaaacagttcctggagcgcgaccagatgtctatggagggtttcagccgctatctgggaggggaggagaatggcatcctgcccctggaggccctggatctgagcatggacatgacgcagccactgagcgcatacttcatcaattcttcacacaatacctatctcactgcgggccagctggctggaacatcgtcagtggagatgtaccgccaggcgctgctgtggggctgccgttgtgtggagctggatgtatggaagggacggccaccggaggaagagcccttcattacccatggtttcaccatgaccactgaggtgccattgcgtgatgtgttagaggccatcgccgagacagccttcaagacctcaccctaccctgtcattctctccttcgaaaaccatgtggactcggcaaaacagcaggccaagatggcagagtactgccgctctatctttggggaagcgctgctcattgacccactggacaagtacccgctgtctgcgggcaccccccttcctagtccacaggacctgatgggccgtatcctggtgaagaataagaagcggcatcggcccagcacaggtgtccctgacagctccgtggccaagcggcctctggaacagagcaattcagccctgagtgagagctcagctgccacagagccctcctcaccccagctggggtcccccagctctgacagctgccctggcctaagcaatggggaagaggtgggacttgagaagaccagcctggagcctcagaagtctctaggtgaggagggcctcaaccgaggacctaatgttctcatgcctgaccgtgaccgagaggatgaggaggaagatgaagaagaggaggaaacaacggatccaaaaaagcccaccaccgatgagggcacagccagcagtgaggtcaacgccacagaggagatgtcgacactcgtcaattacgttgagcccgtcaagttcaagtcctttgaggcttctcgaaaaaggaacaagtgctttgagatgtcgtcctttgtggagaccaaggcgatggagcagctgaccaagagccccatggagttcgtggaatacaacaaacagcagcttagtcgcatctaccccaaggggacccgtgtggactcctccaactacatgcctcagctcttctggaacgtgggctgtcagcttgttgccctcaacttccagaccttggatttgccaatgcagctcaacgcaggcgtgtttgagtacaacgggcgcagtgggtacttgctcaagcctgagtttatgcggcggccggacaagtcttttgaccccttcactgaggtcatcgtagatggcatagtggccaacgccttgcgggtcaaggtgatttcggggcagtttctgtctgacaggaaggtgggcatctatgtcgaggtggacatgtttggtctcccagttgacacaagacgcaaatatcgcacacggacatcccaggggaactcattcaaccctgtgtgggatgaagaaccctttgacttccccaaggttgtgctgcccacgctggcctcacttcgcattgcagcctttgaggagggtggcagatttgttgggcatcgtatcctgcctgtctctgctatccgctcaggataccactacgtctgcctgcgaaatgaggccaaccaaccgttgtgcctgcctgccctgcttatctacactgaagcttctgactacatcccasaygassaccaggactatgcggaggccttgatcaaccccatcaagcacgtcagcctaatggaccagcgggccaagcaactggctgctctcattggggagagtgaggctcaggccagtacagaratgtgtcaggagaccccgtctcaacagcmaggctcacagctctcctccaaccccgyacctaacccactggatgmctcacctcgatggcccccaggtcctaccacctcccccactagcacctccctcagtagcccagggcagcgagatgatctgatcgccagcatcctttctgaggtgaccccaacacccctagaggagctccgaagccacaaggctatggtgaagctccggagccggcaggatcgagacctgagggaactgcataaaaaacaccagcgcaaggctgtggccctcacccgccgccttctggatggcctggcccaggccagggctgaggggaagtgccggccctcctccagcgccctgagcagggccaccaatgtggaagacgtgaaggaggaagaaaaagaggcagccagacagtatcgagagttccagaaccgacaagtacagagcctgctggagctgagggaggcccaggcagatgcagagacagaacggaggctggagcatctgaaacaggctcagcagcggctcagggaggttgtcctggacgcacatacgactcagttcaagaggctgaaggagttgaatgaaagggagaagaaggagcttcagaagatcctggacaggaagcgcaacaacagcatctcagaggccaagacaagggagaaacacaagaaggaggtggaactgacagagatcaatcggaggcacatcactgagtcagtgaactccatcaggaggctggaagaggcccagaagcagcgccacgaacgcctcttggcagggcaacagcaggtcctccagcagctagtggaagaggagcccaagctggtggcccagctgacccaggagtgtcaggaacagcgagagaggctgccccaggagatccgtcggtgcctgctgggcgagacatcagagggattgggggatggccccmtggtggcctgtgccagcaatggtcatscagctgggagtggtgggcaccagtccggcgctgactcggagasccaggaggaaaacacccagctttgaactggcggagcaagaggtgsccacaagactgggtgggcamtgggctgtgggtagaagacactaatactttgggttttttttaaccttttatctttagaaattttatttttttaaaatccgaggcaaatcskmaywcgtrtacacccttcattttcttgggacctcttcagttgtcagcctccccttctaacttcaggcctakggaaagggctagggcttgttccctataacattcacctaagataggygctccccaattcccaagaggcagcaagtggagccctggaactctgagtagtagaaaccaatcctttatatttggggattttttttatatcaataaaagtggacttcmgggaaaaaaaaaaaaaaaaaa

SEQ ID NO: 2019 - DNA, 3264 bp, Rattus norvegicus
aggccacaggcactgcctccttcatttgtgggagtctacaaggatggaggatagttcccacccggctgtgtgaagtgtggctgtgccagccctcctagttgtgaagacctggcactgaggacagagactggacaggcctggttcatcctactgggttccgggagtggactgaagccttagcaggagcatgagtgaggacacggtccccgaggcagcctcaccgccaccctctcaggggcagcactactttgaccggttctctgaggatgaccctgaatacttgcgacttcgcaaccgtgcagctgacctgcgacaagacttcaacctgatggagcagaagaaacgggtcaccatgatcctgcagagcccttctttcagggaggagctggaaggcctcatccaggaacagatgaagaagggtaacaactcctccaacatctgggccctccgacagatcgcggacttcatggccagcacctcccacgcagtcttcccagcttcctccatgaacttctccatgatgacacccatcaatgacctccacactgccgactccctgaacctggccaagggggagaggcttatgcggtgcaagatcagcagtgtctaccgtcttctggacctctatggctgggcgcagctcagcgacacctatgtcacgctgagagtgagcaaggagcaggaccacttcctgatcagccccaaaggggtttcctgcagtgaggtcacggcatccagcctgattaaggtgaacattctaggagaggtcgtggagaagggcagcagttgcttcccagtggacaccaccggcttcagtctgcactcagccatctatgcggccaggccggacgtgcggtgtgccatccacctgcacacgcctgccacagcagcggtgtcagctatgaagtgtggcctcctgcctgtctcccataatgccctgctggtgggggacatggcctactatgacttcaatggggaaatggagcaggaagctgatcgaatcaacttgcagaagtgccttggacccacctgcaagattctggtgctaagaaaccatggtatggtcgccctgggtgacaccgtggaggaagctttctacaaggtcttccacctgcaggctgcgtgtgaggtacaggtgtcggctctgtccagcgctggggggaccgagaacctcatcctcctggagcaagagaaacaccgtccgcatgaggtgggctctgtgcagtgggccggcagcacctttgggcccatgcagaagagccggctgggagagcatgaatttgaagccctcatgaggatgctcgacaacttaggctacagaacaggctatacgtaccgccaccccttcgtccaagagaaaaccaaacacaaaagtgaagtggagatcccagccacggtcactgcctttgtgttcgaagaggatggtgtcccagtccctgctctgcgccagcacgcccaaaagcagcagaaggaaaagacccgctggcttaacactcccaacacctacctgagggtgaatgtggccgacgaggtgcagaggaacatgggcagtccccgaccgaagaccacgtggatgaaggctgatgaagtggaaaagtccagcagcggcatgcccatacggattgaaaacccaaaccaatttgtgcctctctacactgacccccaagaagtgctggacatgaggaacaagattcgagaacaaaaccgacaagatataaagtcagccgggcctcagtctcagctcttggccagcgtcatcgccgagaagagccggagtccggtacagcagagactgcccccaactgaaggggaagcttatcagactcctggggctgggcaggggacccctgagtcctcaggcccactcaccccatgaccttaggtgctgggctcttgctgcacagtgaagggccaccacacaggtggctgtgaggtccagggaggacaatgttggctcactcctgggtgcaccagatagggagcaacaaggagcatctgttcataggaaggcttctggccagccccacacctcccgccatgagactccacgaggccctctctcagtgtcctgctgaattctggtggcccaagtgtttctgacccctggtttggatgtagcatcatcaggatacagggagggggttgtggctaggactgctgtgctatggggtgggaagggtaaaaagtagccatacaaacgtagttagcattagaaagcatgacgtcactgtttctgtgtttgaggggatggcatcttgtctagggcttaggagcagatggcattgcaattctgccttgcgtggcatcatggctgttcatggcttgtggcaaagggtgtgacactttcctagacaatggctaatgggacgtgccagggcccatcactctctgcagagcatgttaacgtgatatggctgcagatcaggcagctgcaggctcgaccctcacatctgcttcctgacctcccccagctcagccaagtcagtgaactctgagcatgccatagaatcaaggttagaaatgacccgtgatcccagggggatgagagatgagcacagggcaggactgtcgttcagcagctctgtccttcacagcaggagttctcagtggagtcctcatcctccttgggggtctatcttagactccctttgactctgaaacccgttgaaatagcctatgtgctctgatgagtgcagcccataaagtggtgaccagaaaccatggttgctctgggctcacctccctgagatctcactctgttctcctcctccgatygrmastgakgccttctgataggccacagtgaggaaactgacttagggaaaggacagaagggtctgggttcagtcststcttgagcaagagggaccagatgattsagagccagggattcaactgaggtgcagagcagaggttctgtcagtgcccctgccagggcctcagggcctggcctcttggtcaccatgactccaggattcactgcttggactgagaatgctgaaggccctgtatcttattgttttaatgctgtgtgctgaggctgctcttgagggacctgggggaaggcagtgggggagagggctggggaggggcagcagggragagggctggcatgctgcttgctctagccaatgctatgcttgctagactttgtctgactaaatttgggccaccaaatgtatgcacagtcatggcttggaagtgtccgtagatgggaatgcaataaaggtatgtcttctgcttgggaaaaaaaaaaaaaaaaaa

SEQ ID NO: 2020 - DNA, 5616 bp, Rattus norvegicus
gaattccacggatgtttgtctgcccaagaatcgagaagatggaagaatgattgaatgagcctagatccaggaggaggtttcttaggtgtcaactagtggctggcgtgcgggcttctctagcaatacagatcttactctgtcaacctcataataataacgtgtgtgtgtgtgtgtgtgtgtgtgtgtgtgtgtgtgtgtgttttattcctgtttggcaagatgggaaaatagcaaatcagtgtcttaagggaattgacaagacatgtaattagacacaatcaatcaccataaaagagctcgacttttcttacatcagataaacgcagcttagcctaaagtagtattgcttaactcaataaggtctcgaggtcataagcagccgtagcagactcactcgctgtgaaatgaacaaatcacagttgctaggtagggaagggagtgctgccaggagggtagagtcagactcttaactttctaacaccttgagcaggacacatgccatttttcacttcaggccccccctttttttttttcaacgtgaaggaaataaacaaaacagtctgctaagctcgtccaattttaatcgtgtctagacttagaatcctaaaaggaggtcagagaaaagataacattctgaaattcctacctcaggggggaaagtgtatgcccatttgtcaaaactggtagggagcgtcgcaggacctccttttagaccagtgttatttccctttcttcatttaggatgtgtgaggtttttaaaagatgtttcccaaattacctagttcaagttcgggacgacttaagtgcatagggaataaaaggtcgtgtttctcctaaaagaggttttgcctgaatcgtttttggttgttaggggaagattaaacttcatgcttatttattccataccttcacacacaggaagtaggtttcaaatgttttagttccacaatctggggtagatgtgtatttaaaggaagattgttgcgtaacacaaagcctcttcctaaaacgcaccagaccagagccagttttagaaaacgcaaataagaagtgggtgtgccttgaaaactgtgtgaacagaaggatcttcaattgatatttgtggggtttctgggaaatatctttgaggcacttgtcaaaagaaaagtatgtgtcactgaagggtctgtgtaggtcccgtttctaagccccatttctgaagtcaaccctgcttgtttctttcacaaaatgctttactgttgctctgttagaggcaacgagtaacgtgttctaaatgagtaagcaaactgcacagagctcactgacaaactcacgcttgtctgacacttagctaagaaacagtacttatggtttctatagaattggattgacactcaccatgatgaaagtggtgctctctctctctctctctctctctctgcwctcacayagcacagctasmcaacacagcagcgacgacgacsyctgagcaacctgcagcacatccccttcaggatggagggatactaatcccttctttgtggtttgactaaggaaaatgattgtcaaagtttcaaggtgaacctgcaactcaggtgctccaatcccagttgtagcttcttctgtgccctcccctcgtctacatggaataacacagtaccttagaaaggtggcaaggaaatggaccttagaatcagacagatttaggttccgattcagattctggtgctgcctggccagtgtccatgggcaagtgatttgcctctttgagccccattggagctaaaaatacccccgtgggattgtgggaaggattaaatgcaataatgcacaaacggaatgtccctaaatgtcagccattgttatgttattatgtaatctacaaagtatgtttgcttattccatgtgaaagacttttggtctatcaaatataatacacgtgaaatcaaaccttgaaaattaatttttttccgcaacagtcacttgccagctgcaaaggttggtgtttcatgaaatcttagtcttggtctgatgttttttttaaatgggaaggaaaaactatcattttctttctgtagttttaaaatggacttcagaaaacacatttttaatataatgaattatatgaaattgtgggggttttttaaagacagaaaaggcccagtggtggcaggttcacatgacatagcctaaaagattagctaattatccagccaacaaatacaattaatacagttaacacttttataattacaaaggagttacttaagaaattgtttgaaaagaagatcatgcagackkgagagacagctcagtggttaagagcattggctgacttccagaggaccagggttcgattgccagcactcacaaaggcagcttgtgtgttgatactatctgtatattcagtcctagggaatctgatgctctctttctcctgacctccaaaacatgcacaaacgtggtgcacagacaaacacagagwtwwkwytyssrkgykywtaacataagtaatgtagtttatttttttttattttcaaaaagaaaattcttgcattttcgttttcaatgcatccctggatatccaccatataacaagaaaaatgatgccacactcccaagaattaagaataacacccccaccccaactctccccaagtgcgtacacatcaattcctaaagaaatgcaaagggcgaagttactgccttggtgcggttgcctgcatgttctmaaggagggaggacgccaaaaaaatatttttcaccaagtgtgcttagaaactctgtakctgttggagtcacctcctgtgttcttgccaaataactgaaagggaatacactgggtgtctgcraatgggggtgtcatttatgagtgmtagaggagggtagtacctggatgtgaacaccggtgtmtaagtgatccgcactccatgtctccaccggagcccttgtgtgtgtttctttcagcttgcttctgggtgttcctgagtttgyytmkwgccacctctctgtgttggaccaggagacagctgtcgtctccagcatgagcgggcgcgggtgtgtctcggtgtctgtggctgtggttcggcataagtctgagcacgtcccagtcagsagggtgcgtttgtgcctgtgtgtgcgtgtccgggtgagcttgttctttctgttcctaaaagaaaatgcacccactgccactggcgtccagagaccttccaacccgcacaggtgacctacatgaacaggtagcacttccagacagcgcctgggtggttggcgggtcgcacagcagtcccagatttctctctcgggagccccagctagggtagctggaagggagtggtggcctggcctccggggagcagcttgggccccgcccgggccaaccccaggaggaggcgggctaggcaaggagggttggcccttagtgcctcgcccctccgggcatgcgacggtgccattggctcaaagttgctgcacgtcactgggtcaagtcccctaaagtctagtgcacataaygggcagggtgcactgcaaggctgcttctcccgcgttcaggctgcagctggcaggcatcgcgagcccggagcacccacgagctcagtgtgcaggacgcgcccccagcacaagccacctacggtctctgaatgaagcttccaggagtccgcccccggagcrsstgacgcccatcggaggtgcacccgctgagagmgtctgggcactgaaagccggtgcgctcacctgcccggccatggagccacacgggaatgacagcgacttcttgctggcacccaatggaagccgagcgccaggccacgacatcactcaggaacgggacgaagcgtgggtggtgggcatggccatcctcatgtcggttatcgtcctggccatcgtgtttggcaacgtgctggtcatcacagccattgccaagttcgagcgactacaaaccgtcaccaactacttcataacctccttggcgtgtgctgatctagtcatgggcctagcggtggtgccttttggggccagtcatatccttatgaaaatgtggaattttggcaatttctggtgcgagttctggacttccattgatgtgttgtgcgtcacagccagcatcgagaccctgtgcgtgattgcagtggatcgctatgttgctatcacatcgcccttcaagtaccagagcctgctgaccaagaataaggcccgagtggtcatcctaatggtstggattgtgtcgggccttacctccttcttgcctatccagatgcactggtaccgtgccacccacaagcaagccatcgactgttatgccaaggagacttgctgtgacttcttcacgaaccaggcctatgctatcgcttcctctatcgtatctttctacgtgcccctggtggtcatggtctttgtctattccagggtcttccaggtggccaaaaggcagctgcagaagatagacaaatccgagggcagatttcatgcccaaaacctcagccaggtggagcaggatgggaggagcgggcacggactccgaagktcctycaagttctgcttgaaagagcacaaagccctcaagactttaggcatcatcatgggcaccttcaccctctgctggctgcccttcttcattgtcaatattgtccacgtcatccgggccaacctcatccctaaggaagtttacatcctccttaactggttgggctatgtcaactctgccttcaatcctcttatctactgtcggagtccagatttcaggwwtgccttccaggagcttctgtgccttcgccggtcttcttcgaaaacctatgggaacggctactctagcaacagcaacggtaggacagactacacaggggagcagagcgcatatcagctggggcaggagaaagaaaatgaactgctttgtgaggaagcccctggcatggaaggctttgtgaactgtcaaggtactgtgcctagccttagcattgactctcaagggaggaactgtaacacaaacgactcgccactgtagtgtaggctttctactctttaagaacggcccctccctgacaggacactaaccagastattttacttgagtgtaataactttagaataaaattgtatagagattttgcagaaggggcacatccttctgccttttttattttakktttttaagctscaastgagagagagagggagagagagcagagagagagagagaagaaagagagagagagagactgtatttcagtgcttaatgttttccttgtacagttcagttcctctttgccatggaacttaaaagtttctgtctgaagtgtttgttggtctgtctgtttggayggtgtttccatgtatctacctcactggtcaagtattaaggataatatatatatatattgctgctggaaattcatatgtaaaggagagagttttcttcctgtacccttggacttgaaatatcctgtgtcttggacctttctgctgtgaatgtggactctctctcactccacttattcgctcaaatggagtgttgwaggcagggatttgagggacaacatcagttgtttttytgagcaaagtytaaagtttacagtaaataaattgtttgrccmtgamwwmawwrmaammwrwwtctccaaaacctcttgactctgg

SEQ ID NO: 2021 - DNA, 2011 bp, Rattus norvegicus
tccggcttctaccactgtctgggatgaagcagccagcaaccatgaagtggagcgcatccatttccttccttctcctgctaaattttgctgaacccagagtactgcacacaaatgagtttggaatagaatccacgttagactcttcccaatgcccgacagagaaaaatatgtttaacgtagctaccattgtcgttgcccagtttgttcaggmkgccrcaaaggycgaagtaaacaaaatgagtagcgatgcgtyggcygcaatgaaggaaaacactggcgatgggtgtttagaaaaccagctatctgtgtttctggatgaaatttgccacgakacggaactctctaacaagtatggattctcaggttgctgcaaccaaagyggggtggaaagacaccartgtctgctggctcgcaasaagacygctccagaytctgtcccacccttccactttccakaaactgmygasagttgcccagcatacgaasaaaasakggcgatgtccataaacacgttcatctacgaygtgtmraagaggaaccccttcstgtaygctccmaccmttcktkmcktagccgctcagtatgacaaggcagttccagcrtgctgcaaagctgacaacatggagraatgcttccagacaaagagagcatcaatggcaaaggaattaagagaaggaagcatgctcaatgagcatgtgtgtgcagtaataaraaagtttggatcccggaayctscaggcygywctcawcrtbarmctrwgycaaaagtttcccaaagcaaatattactgagattcggaagctggccctggacgtggcccacatccacgagcagtgctgccacggcaacgcgatggagtgcctacaggatggggaaagcgtcatgacacatatgtgttctcaacaagaaattctgtcgagcaaaacagcagagtgctgcaaactacccaccatcgagctcggctattgcataattcatgccgaaaatggcgacaaaccggaaggtttaactctgaacccaagcgagtttttgggagacagaaattttgcccagttttcttcagaggaaaaactcctgtttatggcaagctttcttcatgaatattcaagaaatcaccccaaccttcctgtctcagtcattctaaaaactgctaagtcataccaggaaattttggagaagtgctcccagtctgaaacgccatcgaaatgccaggacaatatggaagaagaattgcaaaaacacatccaggagagccaggcactggccaaacaaagttgtaatctctaccagaagttaggaccctactacttacaaaatctgttcctcattggctacacgcggaaggctcctcagctgacctcagcagagctgatagacctgacagggaagatggtgagcattgcctcaacgtgctgccagctcagtgaggagaaacggtccgcctgcggtgagggactggccgacatttacattggacacttgkgtytaaracatgaggcarrccctgtgaactccggtatcaaccactgctgcagttcctcgtattccaacaggaggctctgcatcaccagctttctgagggacgaarcctacgtycctsyaccattctstgmagacaaattcatcttccacaaggatctgtgccaagctcagggccgagcmcywcrgwccatgaaacaagagcttctcattaacctrstgaaamwwawbcctkwratgacmgaggagcascmcgcggctgycactgctgatttytctggcctmytgswraagtgytgcaawgmccagsatcaggamgcctgtttcgcamaagagsgtccaaagttgwtttccaaaactcgtsaggcywtgggggtttaaacatctccarkaggaagaaaggmcaaaaaaatgtgtcsacgctttggtgtgagcttttcgstttgatggtaaytggtggagacttccatgtgrgatttmtatscctwaggawtaamgactttkcrrstgttwmaraaaaaaaaaaaaaaaaa

SEQ ID NO: 2022 - DNA, 8990 bp, Rattus norvegicus
agtagtgaatttcrrmmkcskwkykarcctkryaggtccaagggtagccaaggatggcagcagcctcatatgatcagttgttaaagcaagttgaggccctgaagatggagaactcaaatcttcgacaagagctcgaagataattccaatcaccttacagaactggaaactgaggcatctaacatgaaggaagtacttaagcagctgcagggaagtattgawgatgagactatgacttccggacagattgatttactagagcgccttaaagaatttaacttagatagcaatttccccggagtgaaactacgctcgaaaatgtccctccgatcctatggaagtcgggaaggatctgtatcaagccgttcargagaatgcagtcctgtccccatggggtcattcccaagaagagcatttgtwaatggaagcmswsrwrscvctsgrkmcttagaakwgcttgagaaagagagatcattactccttgctgatcttgacaaaraaraaaargaaaaggaytggtattatgctcagcttcagaacctcacgaaaagaatagatagcctgcccttgactgagaacttttccttacagacagacatgacaagacggcagctggagtatgaagcacggcagatcagggccgcaatggaggagcagcttggcacctgccaggacatggagaaacgagcacagcgaagaatagccaggattcagcaaatagagaaggacattcttcgtgtacggcagctcttacagtcccaagcggctgaagcagagaggtcatctcagagcaagcatgaaactgcctcccatgaagctgagcggcagcttgaaggtcaaggagtggcagaaagcaacttggcaacttctggtagtggccagagttcagctgcacgtgtggatcatgaaacagccggtgttttgagttctagcggcacacactctgctcctcgaaggctgacgagtcacctgggaacgaaggtggaaatggtgtattcattgttgtccatgcttggtactcatgataaggacgatatgtcacgaactttgctagctatgtctagctcccaagacagctgtatatccatgcgacagtctggatgtcttcctctcctcatccagcttttacatggcaatgacaaagactctgtgttgttgggaaattcccggggcagtaaagaggctcgggccagggccagtgcagccctccacaacatcattcactcacagcctgatgacaagagaggcaggcgtgaaatccgggtccttcatcttttggaacagatacgagcttactgcgaaacctgttgggagtggcaggaagcccatgaacaaggcatggaccaggacaaaaatccaatgccagctcctgttgagcatcagatctgccctgcggtgtgtgttctgatgaaactctcatttgatgaggagcacagacatgcgatgaatgagcttggggggctgcaggctattgcagagttactgcaggtggactgtgagatgcacgggctcactgatgaccactacagtgtcactctacgacggtacgctggaatggccttgacaaacctgacctttggagatgttgccaacaaggctacgctgtgttctatgaaaggctgcatgagggcactcgtggcccagttaaaatccgaaagtgaagacttacagcaggttattgcaagtgttttgcggaatttgtcttggcgagcagatgtaaatagcaaaaagacgttgagagaagttggaagtgtgaaagcgttgatggaatgtgctttggaagttaaaaaggaatcaactctcaaaagcgtcttgagtgccttatggaatctgtccgcacactgcactgagaataaggctgacatatgtgctgtggacggggcactggcatttctggttggcaccctcacttaccggagccagacaaatacgttagccatcattgaaagtggaggtgggatattacggaatgtgtccagcttgatagctaccaacgaagaccacagacaaatcctaagagagaacaactgcctacaaactttattacagcacttgaaatctcacagcttgacaatagtcagtaatgcatgtggaactctgtggaatctctcagcgagaaatcctaaagaccaggaggctctgtgggacatgggggcggtgagcatgctcaagaacctcattcattccaagcmcaaaawrawmrmwawrrrgagcgcagcagctttaaggaatctcatggcaaacagacctgcaaagtataaggatgccaacatcatgtctcctggctcaagtttgccatcccttcacgttaggaaacaaaaagctctagaagcagaattagacgctcagcatttatcagaaacctttgacaatattgacaatttaagtcccaaggcatctcatcgcagtaagcagagacacaagcagaatctttatggtgactatgtctttgacgccagtcgacatgatgacaataggtcagacaactttaacactggaaacatgactgttctttcaccatacttaaataccacagtattgcccagctcttcttcatcaaggggaagtttagacagttctcgttctgagaaagacagaagtttggagagagaacgaggtattggcctcagcacttaccattcagcaacagaaaatccgggaacctcttccaaacggggtttgcagctctctgccactgcagcccagatagccaaagtgatggaagaagtgtccgccctccacacctcccaggacgacagaagccccgcctctgccgctgagctccactgtgtggcggaggagaggactgcagcacgaagaagctctgcgtcccacacacatccaaacacacacaacttcgctaagtcggaaagctcaaacaggacatgctccatgccttatgccaaggtggaatataagagatcttcaaatgacagcttaaacagtgtcactagtagtgatggctatggtaaaaggggccagatgaagccctcggttgagtcctactcagaagatgatgaaggtaagttttgcagttatgggcagtatcctgccgacctagcccataagatacacagtgcaaatcatatggatgataatggtggggagctggacacaccaataaactacagcctcaagtactcagatgagcagctgaactcaggaaggcagagcccctcacaaaatgaaaggtgggcaagacccaagcatgtgatagaagatgaaataaagcaaaacgagcaaaggcaatcaagaagccagaacaccaattttcccgtctactctgagaacactgatgacaaacacctcaagttccaacagcattttgggcaacaagagtgcgtttccccatataggtccaggggaaccaatggttcagaaacaaatcgaatgggttctagtcatgcagttaatcaaaatgtgaaccagtctttgtgtcaggaagacgactatgaagatgacaagcctaccaactacagtgaacgttattctgaggaagaacagcatgaagaagaagagagaccgacaaattacagcataaagtataatgaagagaaacaccatgtggatcagcctattgattatagtctaaaatatgccactgacatatcttcatcccagaagccatcattttcattctcaaagactccatcagtacagggcactaaaactgaacataactctccaagcagtgaggctgcatctgcaccttcatctwacgccaaaaggcagagtcagctgcatccaagttcagcacaaagaaatggtcagactccaaaagggactgcctgcaaagtcccctccatcaaccaagagacaatgcagacttactgtgtagaagacaccccaatatgtttctcaaggtgtagttccttatcatcgctatcatcagctgaggatgaaataggctgtgatcagacaacacaggaggcagactctgcgaatactctgcaaatagcagagataaaagagaatgatgtgacgcggtcagctcaagaccctgcgagtgacgtcccagccgtgtcccagagtactagaaccaagcccagcagactccaggcttccggcttagcttcagaatccgccaggcataaagctgttgagttttcttcaggagccaagtctccctccaaaagcggtgctcagacacccaaaagtcccccagaacactatgtccaggagacgccccttgtattcagcaggtgtacttctgtcagctccctggacagttttgagagtcgctccatcgccagctctgttcagagtgagccatgtagtggaatggtgagtgggattgtcagccccagtgaccttccagacagcccagggcagaccatgccaccaagcagaagcaagacccctccccctccccctcccccacagccagtgcagaccaagagagaggtgccaaaaactaaggtgcctgctgccgagcagagagagggtgggcctaagcagacggccgtgagtgcggctgtgcagagggtgcaggtcctcccggatgccgacactctgttacactttgccacagagagtactccagatgggttttcttgttcctctagcctaagtgctctgagtctggatgagccctttatacagaaagatgtggaattaagaataatgcctccagttcaggaaaacgacaatgggaatgaaactgaaccagaacagcctgaagaatctaatgaaaaccaggataaagaggtagaaaagcctgactctgaaaaagacttattagatgattccgatgatgatgatattgaaatattagaagaatgtattatttcagccatgccaacaaagtcatcacssaaagccaaaaagctagcccagactgcttcaaaattacctcctcctgtggcaaggaaaccgagtcagctgcctgtgtacaaacttctgccgtcacagagcaggctgcaggcacaaaaacatgtcagctttacaccaggggacgatgtgccccgagtgtactgtgtggaagggacgcctataaacttctccacagcaacatctctgagtgatctcacaatagaatcccctccgaatgagctggctgctggagatggggttagagcaagtgtacagtcaggtgagtttgaaaaacgagataccattcctacagagggcagaagtacagatgaggctcagagaggaaaagtctcctctatagctataccagacctggatggtagcaaagcagaggaaggagatattcttgcagaatgcatcaattctgccctgcccaaaggaagaagccacaagcctttccgagtgaaaaagataatggaccaagtccaacaggcatccatgacttcatccggaactaacaaaaatcaaataracacwaaraaaaaraarcctacttcaccagtaaagcccatgccacaaaatactgaatacagaactcgtgtgagaaagaatacagactcaaaagttaacgtaaatactgaagaaactttctcagacaataaagactcaaagaaacagagcttaaaaaacaaccccaaggacttgaatgacaagctaccggacaatgaggacagggtccggggaggctttactttcgattcaccgcatcattacgcacccattgaagggactccttactgcttctcacgaaatgactctttgagttctctagattttgatgatgacgatgttgacctctccagggaaaaggctgagttaagaaagggcaaagaaagtaaggactccgaagccaaagttacctgccacacagaaccaagctcaagccaacagtcggctaggaaggcacaggctagtacaaaacatccagtgaacagagggccgtctaaaccactgctgcaggaacaacccactttcccccagtcctctaaagacgtaccagacagaggggcagcaactgacgaaaaactgcagaattttgctattgaaaatacaccggtttgcttttctcgaaattcttctctgagctcccttagtgacgttgaccaagaaaacaacaataacgaagaaactggaccagtcagagacgctgagcctgccaacgcgcaaggacagccaggcaagcctcaggcatctgggtatgcgcccaagtcctttcatgtggaagacacccctgtgtgcttctccagaaacagctctctcagctctctgagcattgattctgaggacgacctgttgcgagagtgcataagctctgctatgccaaaaaagaggaggccttccagactcaagggtgagggtgagtggcagagtcctaggaaagtgggcagcgtgttagccgaagatctgacactcgacttgaaagatatacagaggccagagtcagaacacggtttatcccccgawtcagaaaatttcgactggaaarctattcaggaaggtgcaaactccatagtaagtagtstgcaccaarctgccgccgccgcygsgtgtctgtccagacaagcgtcrtcggactcagactccatcctgtccctgaagtcgggcgtctccctggggtcgccttttcaccttacacctgaccaagaggagaagccattcacaagtcataaaggcccaagaattctcaaacctggggagaaaagcacattagaagcaaaaaaaawaraawmmraaaacaaaggaatcaaaggtggaaaaaaggtttataaaagcttgattacaggaaagattcgatctaattcagaaatctccagccaaatgaaacaaccccttcagacaaacatgccttcaatctcaagaggcaggacaatgattcacatcccgggagttcggaacagctcctcaagtacaagccctgtctctaaaaaaggcccacccctcaagactccagcctctaaaagccccagtgaaggtcctgtagctaccacttctcctcgtggaactaagccagcagtgaagtcagagctgagccctattaccaggcaaacttcccacattagtgggtcaaataaggggccctctaggtcagggtctagagactccactccctcgagacccacacagcagccattaagtaggccgatgcagtcgccagggcggaactcgatctcccccggtagaaatggaataagcactcctaacaaactctctcagctgcccagaacatcgtctcccagtactgcttcgaccaagtcctcggggtcggggaaaatgtcctacacatccccaggccggcagctgagccagcaaaacctcagcaaacaaacaggcttgtccaagaacgccagcagcatccccagaagtgagtcagcatccaaaggactgaatcagatgaataacagcaatgggtctaataaaaaggtagaactttctagaatgtcttcaactaagtcaagtggaagtgaatcagacaggtcagaaagacctgcattagtacgccagtccactttcatcaaagaagccccaagcccaaccctaaggaggaaactggaggaatctgcctcatttgaatccctttctccatcttctagaccagattctcccaccaggtcccaggcacagacsccagttttaagcccttcccttcccgatatgtctctgtccacacatccatctgttcaggcaggtggatggcgcaagctcccacctaacctcagccccactatagagtacagtgacggaaggccctcaaagcggcatgatatcgcacgctcccattctgaaagtccgtccagactaccagtcaaccgagcgggaacctggaagcgtgaacwcrgcraaywttmcysrkcccyycctcgagtgagcacttggagaagaactggaagctcatcttctattctttctgcttcttcagagtccagtgaaaaagcaaaaagtgaggatgaaaagcatgtgaactctgtgccaggacccagacaaatgaaagaaaaccaggtacccacaaaaggaacatggaggaaaataaaggaaagtgaaatttctcccacaaacacggtttctcagaccacttcctcaggtgctgccagtggtgctgaatcaaagactctgatctatcagatggcacctgctgtttctaraacagaggacgtttgggtgagaattgaggactgccccattaacaaccctagatctggaagatctcccacaggtaacacccccccagtgattgacagcatttcagaaaagggaaatccaagcattaaagattcaaaagacacccaaggaaaacaaagtgtgggcagtggcagtcctgtgcaaaccgtgggtctagaaaaccgcctgaactcctttattcaggtagaggccccggaacagaaaggaactgagactaaagcaggacagrgtagccctgcccctgtagcagagactggtgagacctgcatggcagagcgcacccctttcagttcaagtagctccagcaagcacagttctcccagtgggacggtcgctgccagagtgacgccttttaattacaacccaagccctargaaaagcagcgcagacagcacttyagcccggccatctcagatccccackccggtgggcagcagcacaaagaagagagactcgaagactgacagcactgaatctagtggagcccagagtcctaaacgccaykmkgggtcttacctcgtgacgtctgtttaaaagagctagaaggagaaatgtakgaaaagctggtgttaatcacaactgctgtatagagactttatttcaaaggaaactttaaaggttgaaaatttttgwaaataggtttgattctkgttawaggggttktgttctgsaawccatatttgatagtacacagtcctcactggtcattttgggaggcactcctgttaggtaagaaaaaatggtaaagccacgtatatctatctgtacagtgtgttttacatgtatttaagtagcatccgttccattgtcctttaaatatcgcctgtcttaaaataacactacagatagacactatgatatattgctgttatcaatcatttttagattataaagtaaattcacatcacggagaaattggtaattatgcaaaaaaattagtcc

SEQ ID NO: 2023 - DNA, 2384 bp, Rattus norvegicus
cgactatggagcgtcaggtgctgctgagtgagccccaggaggcggcagcgctgtaccggggccttagccgccagccttcgctgagcgccgcctgcctgggtccggaggtcaccacgcagtatgggggcctctatcggaccgtgcacactgagtggactcagagggacttggagcgaatggagaacatccgattctgccgccagtacctagtgtttcatgacggagactcggtggtgtttgccgggcctgcaggcaacagtgtggaaacccggggggagctgctgagcagagagtctccttcaggcaccatgaaagctgtgcttcgcaaggccggaggcacagtctcaggagaggaaaaacagttcttggaggtctgggagaagaaccggaagctcaagagtttcaacctgtcagcgctggagaagcatgggcctgtctatgaggatgactgctttggctgcctttcctggtcacactcagagacacacttgttgtatgtggcggagaagaagcgtcccaaggctgagtccttctttcagaccaaagccttggacatcagtgccagcgatgatgagatggccaggccgaagaagccagaccaggccatcaagggggaccagtttgtattttatgaagactggggagaaacgatggtttccaaaagcatccctgtgctctgcgtgctagatatcgacagtggcaacatctctgtgcttgagggagtccctgaaaatgtgtcacctggtcaggctttttgggcccctggagacacgggggtggtgtttgtgggctggtggcatgaacccttcaggctcggcatccgctattgcaccaatcgcagatcagctctgtactatgtggacctgagcggagggaagtgtgaactactctcggatggttccctggccatctgttctcctcggctcagcccagaccagtgtcgcatcgtctacctacagtatccatgtctagcccctcatcaccaatgcagccagctctgcctgtacgactggtacaccaaggtcacctcagtggtggtggacattgtaccccggcagctgggagagagcttctctggaatctactgcagtcttcttcctttgggatgctggtcagctgacagccagagagtagtctttgactctgcccagcgcagtcggcaggacctgtttgctgtggacacccagacgggcagcatcacctccctgacagctgcggggtcagcaggaagctggaagctgcttacaattgacaaagaccttatggttgcccagttctccacacccagtttgcccccaagcctgaaagttgggttcctgcctcctcctgggaaggagcagtctgtgtcatgggtgtccctggaggaggctgaacctattcctggcatccactggggcgtccgtgtgctacacccacctccagaccaagagaatgtacaatatgctgaccttgactttgaagcaatccttttgcagcccagcaatcctccagataagacccaggtccccatggtagtcatgccccatgggggaccccattcgtccttcgtcactgcctggatgctgttcccagccatgctctgcaagatgggctttgcagtacttctggtgaactatcgtggctccactggctttggccaagacagcatcctttctctcccaggcaatgtgggccaccaggatgtgaaggatgtccagtttgcagtggagcaggtactccaggrggaacamtttkatgcaagacgcgtggcccttatgggtggttcccatggtgggttcctcycctgccacctgattggtcaatacccggagacctacagtgcttgtatagcccggaacccagtgatcaacattgcctccatgatgggctccactgacatccctgattggtgtatggtggagactggcttcccttatagcaacagctgcctcccagatctgaatgtgtgggagsagatgctggataagtcacccatcaaatacatccctcaggtaaagacmccagtgttactgatgytggsccaggaggaccgacgggtacccttcaagcagggtatggrgtattaccgtgccctcaaggcccggaatgtgcctgtccggctcytgctgtaccccaagagcaaccacgckctgtcagaggtggaggcggagtcagacagcttcatgaacgctgtgctttggctgcacacacacttgggcagctgaagccctatgttcttcttgagctgggcarcccgtcttgcactttgctcttggtaagctccaggatctgaccgaacagccaaacagtctcctaggctgtggactcagygaatgggcagaggrctaagaactatgttawcataataaaggaagmcmcmgarmmwrraaaaaaaaaaaaaaaaa

SEQ ID NO: 2024 - DNA, 6829 bp, Rattus norvegicus
ccatagtgggaccactgtagtcaatcttccccatcatgatataatttgtgaaagtttgtttcactttggaagttaaaaaaaatctagaagacagctcaatctggaaaggtctcagtagccaacctgagggcctgagcctgagccccagcacacacataaataaaaagccagggaaaggcactgcatacttttaatcccaacattgcagagagagagacaagtagatctctgagactcactgaccagccagcctaccctacatgatgaattcgaggacagtgaaagaccctgtaaaaagaaacattttgggtggtggctgatgaacgacattcatagtaacacagtattcctttggccttcgtgtgtgtgtgtgtgtgtgtgtgtgtgtgtgtgtgtgtgtgtgtgtgtgtgtgtgtttctctgtgtgtttctctgtgtgtttctctgtgtgtttctctgtgtgtttctctgtgtaaagagagatccttccaacttttagaatgcttccttattcacaaattgcttttatacattggatctgttttcagtccctgcagccttctgagggaggtatttttagtttcaattttctgtgaggatatctgtaaagacaactttgatgctgtggaaacaacttaggcttcagatttttcactcctgtgtttgaatctgtatagtgctttcagctatggaaagctgaatcatttttcctgttcatttttctgaatttcctctctacaaccttccctctttccttttgccattgtttattcactgctattagccctctctttcattgtcagtctataaaagagaataatcctcctggctctgagacatacgttcattctagtctaccactttgcctgtgcattcaattcccttggactaaaaccattcaaaagctttggtagatgtgaggctgtaatgactattcaaatagggtcttcaaagtatctgtgcgttttgaaacacttcactagaatagtgaaaaattagccattttacagtttgtcagcttttgaataactttgcttttttttttttttttggaccctacggagtgatttgtgaaactaagcaaaaagcaatacaataatcacaataaggcctcagctgctatccttacagcagataatttttcacctgggcaggaggaagcactctcaggtcattttgttctaaaagattacttcatgctgttttccaagggttgtggacctgatgagagcacaactaatgtagaaaaaacctggaaagtttatgttctgctaacatggggaacataacaatgtccttgcttcacttctttatctgtgaaacagagttgatcatgcatactgcttttttttcccttgaggtttcagttaactccttcagtcaaggtaaaccctcagtataatggagaaagccctccccctcactgtagaggcctgtaaatgtggaaatggctggtatgattgcatagtccaccaaacccagaatttcagaagctgaatcagaaggatcatgagttcaagatctgtctgggggtatgaaacaaatccctatctcaaaagaaagataaaatgactccctcctcccccaaatacccattcttttacttgctgggacagatctagaggtataaagtcttttacaagtgctggggtctacagcctttctctaaggacattttctctataggtctactcttgatctttctattgctcttttgtctttacagttgggaatatcctacatcatattcatctgttctaacctgtccattaaaagaaagatcagccctctgtgatttctctacccaggataagaattttcaagtgcaaacaatttggacatctaaaggcttctatacaaacaacactttggacaaaatcgaaggttcatgtgtgcatgacaagtgtttttgacatttgtgtttgcacacttgtctgagtgatttttttgcctttgcaaatctggagaaatcaaacagtgtaagttacaggcaattcccaacagaaagaagggcaagaaatgaggtagaaatgaccactggcttcttgggcccagaattcccagagtaaatggcttggtgtcgggaattccccatctacgctactggaggatctcaaaggtttctgcaagagttgctttggctgcagcttgttctttaatctcttgggactctcccttctgcttgtcctggtgggccctgggggagagggtacctaagaacaattggtagccggtacttctaatgccccttcctccctcggagaatctgttttgggattgggttcaggaatgaaatccggcctgtgctaaccttttgaggagccggtaggcttgtctgttaaaaaatcgctccaagttaaagcttctgctttggagtctaaagcccggttccgaaaaacaagtggtatttggggaaaaggggtcttcagaggctacagggagtccttccagccttcaaccatactacgccassactatgttctctaaagccaccctgcgctassttgcggtgaggggaggggagaaaaggaaaggggaggggaggggaggggaggggaggggagagaggaaaggaggtgggaaggcagggaggccggcccgcgggggcgggaccgactcacaaactgttgcatttsstttccacctcccagcgccccctcggagatccctaggagccagcctgctgggagaaccagagggtccggagcaaacctggaggctgagagggcatcagaggggaaaagactgagytagccactccagtgccatacagaagcttaagggacataccacgccagccccagcccagcgacagccaacgcctgttgcagagcggcggcttcgaagccgccgcccagaagctgccctttcctcttcggtgaagtttctaaaagctgcgggagactcggaggaagcgaagaaagtgtccggtaggactacgactgcctttgtcctcctccctcctacccctacccctcctgggtcccctctccctgagcggactaggcaggcttcctggccagccctctcccctacaccaccagctctgccagccagtttgcacagaggtaactccctttggctgaaagcagacgagcttgttgcccattggaagggaggcttttgggagcccagagactgaggagcaacagcacgctggagagtccctgattccaggttctcccccctgcacctcctactgcccgcccctcaccctgtgtgtgcagctagaattgaaaagatgaaaagacagttggggcttcagtagtcgaaagcaaaacaaaagcaaaaagaaaacaaaaagaaaatagcccagttcttatttgcacctgcttcagtggacattgactttggaaggcagagaattttccttccccccagtcaagctttgagcatcttttaatctgttcttcaagtatttagggacaaactgtgaaactagcagggcagatcctgtctagcgcgtgccttcctttacaggagactttgaggctatctgggcgctcccccccctccctgcaagttttcttccctggagcttcccgcaggtgggcagctagctgcagatactacatcatcagtcagtagaactcttcagagcaagagacgaggaggcaggataagggaattcggtggaagctagagacaagctaaaggatggaggtgcagttagggctgggaagggtctacccacggcccccgtccaagacctatcgaggagcgttccagaatctgttccagagcgtgcgcgaagcgatccagaacccgggccccaggcaccctgaggccgctagcatagcacctcccggtgcctgtttacagcagcggcaggagactagcccccggcggcggcggcggcagcagcaccctgaggatggctctcctcaagcccacatcagaggcaccacaggctacctggccctggaggaggaacagcagccttcacagcagcagtcagcctccgagggccaccctgagagcggctgcctcccggagcctggagctgccacggctcctggcaaggggctgccgcagcagccaccagctcctccagatcaggatgactcagctgccccatccacgttgtccctactgggccccactttcccaggcttaagcagctgctccgcagacattaaagacatcctgagcgaggccggcaccatgcaacttcttcagcagcagcagcaacagcaacagcagcagcagcagcagcagcagcagcagcagcaacagcagcaggaggtaatatccgaaggcagcagcagcgtgagagcaagggaggccactggggctccctcttcctccaaggatagttacctagggggcaattcgaccatatctgacagtgccaaggagttgtgtaaagcagtgtctgtgtccatggggttgggtgtggaagcactggaacatctgagtccaggggagcagcttcggggcgactgcatgtacgcgtcgctcctgggaggtccacccgccgtgcgtcccactccttgtgcgcctctggccgaatgcaaaggtctttccctggacgaaggcccgggcaaaggcactgaagagactgctgagtattcctctttcaagggaggttacgccaaagggttggaaggtgagagtctgggctgctctggcagcagtgaagcaggtagctctgggacacttgagatcccgtcctcactgtctctgtataagtctggagcagtagacgaggcagcagcataccagaatcgcgactactacaactttccgctcgctctgtccgggccgccgcaccccccgccccctacccatccacacgcccgcatcaagctggagaacccgtyggactacggcagcgcctgggctgcggcggcagcgcaatgccgctatggggacttggctagcctacatggagggagtgtagccggacccagcactggatcgcccccagccaccgcctcttcttcctggcatactctcttcacagctgaagaaggccaattatatgggccaggaggcgggggcggcagcagtagcccaagcgatgctgggcctgtagccccctatggctacactcggccccctcaggggctggcaagccaggagggtgacttctctgcctctgaagtgtggtatcctggtggagttgtgaacagagtcccctatcccagtcccagttgtgttaaaagtgaaatgggaccttggatggagaactactccggaccttatggggacatgcgtttggacagtaccagggaccacgttttacccatcgactattacttcccaccccagaagacctgcctgatctgtggagatgaagcttctggttgtcactacggagctctcacttgtggcagctgcaaggtcttcttcaaaagagctgcggaagggaaacagaagtatctatgtgccagcagaaatgattgcaccattgataaatttcggaggaaaaattgtccatcgtgtcgtctccggaaatgttatgaagcagggatgactctgggagctcgtaagctgaagaaacttggaaatctcaaactacaggaagaaggagaaaactccagtgctggtagccccactgaggacccatcccagaagatgactgtatcacacattgaaggctatgaatgtcaacctatctttcttaatgtcctggaagccattgagccaggagtggtgtgtgccggacatgacaacaaccagcctgattcctttgctgccttgttatctagtctcaacgagcttggcgagagacagcttgtacatgtggtcaagtgggccaaggccttgcctggcttccgcaacttgcatgtggatgaccagatggcagtcattcagtattcctggatgggactgatggtatttgccatgggttggcggtccttcactaatgtcaactctaggatgctctactttgcacctgacctggttttcaatgagtatcgcatgcacaagtctcgaatgtacagccagtgcgtgaggatgaggcacctttctcaagagtttggatggctccagataaccccccaggaattcctgtgcatgaaagcactgctactcttcagcattattccagtggatgggctgaaaaatcaaaaattctttgatgaacttcgaatgaactacatcaaggaacttgatcgcatcattgcatgcaaaagaaaaaatcccacatcctgctcaaggcgcttctaccagctcaccaagctcctggattctgtgcagcctattgcaagagagctgcatcaattcacttttgacctgctaatcaagtcccatatggtgagcgtggactttcctgaaatgatggcagagatcatctctgtgcaagtgcccaagatcctttctgggaaagtcaagcccatctatttccacacacagtgaagatttggaaaccctaatacccaaacccaccttgttcccttttcagatgtcttctgcctgttatataactctgcactacttctctggcatgkgccttgggggaaattcctctactgatgtacagtctgtcatgaacatgttccccaagttctatttcctgggcttttccttctttctttttcttcttctctgcctcttttaccctcccatggcacattttgaatccgctgcgtgttgtggctcctgcctgtgttttgagttttgttgtatttcttcaagtctgtgatgatcttcttgtggcccagtgtcaactgtgcttgtttatagcactgtgctgtgtgccaaccaagcaaatgtttactcaccttatgccatggcaagtttagagagctataagtatcttgggaagaaacaaacagagagagtaaaaaaaccaaaaaacaaaacaaaaaaaccaaaaagc

SEQ ID NO: 2025 - DNA, 5784 bp, Rattus norvegicus
ggatccaaactaaaagctgcaaagatactctatagaaacaaaaattcctaggacacaagtgggcaagtggcttaacacccttggctaaggacgaggtggctataagtaatggagatgctgtgcagagcagggaagatggctttcaaacagtgtccaatctcctgaggaaggaagatccaagccttcttcagagggatgctacactagtctcaaatcgttgcctggacttgagtgtgaaatgtctcactttccttcctgtctggctgtgcttgggtaactagctctgtgaacaacttctcttactgtggctggtgtgtggaggctatgcgcatctatgaagtctgaaactgttgtgtgcattgctctcctgaggggaagagcctcaagataattgtgatgccactgtagcattgaggagggctttacggtccctcttcagtgagaattctgtagcttgtgtgcataagctgtctatgtggcctgttcggacgccacataggatcattgctgtcttctcgttgattggctacccctaccgtccaagcagttctgagtatgtttaccatttatgcaaactgaaggtgtatacatgaggaaatttccattggtggtagactaccttgtctctttcaaaagtggatgatagaaactttgatttttcaatactaaagctttcggccatttctgcactattgactggaggtaggttatttttgtgttcagcaactcatcgtggacagaaacataattcttttctggtggacttaccctgcataatgagtgctgtgcgtgtatgtctttacgagtctatgttccacagctgataagtagaaagaaagttagcacggtagagttaaaggaattctacttgttactactaagaggcacaatgcttccggtaagtaactcagaagtcttccaccacctgacgtaaccttggtttggtccataggtatgtcttaattttgcttcttattcaattttagttgggtttgcagagcgtgcttaaagatgcaagccaaattctaagagtgatttaactttgtggtatgttgttaagaggcatcatagggaacttcaaatgcacagaaaagaaaatccctagctgccagttccaaagtgtgtaaaatactactcagctttgtaaaggtatgacaactcagtgttacacaaccgcgcgcgtgcacacacacacacacacacaggagttctgctaatgagaagttgcgctctctttggtttgccaaaacaagccatccaagtaccatgggagtctggagagatgtccgcacgtgaaaggcattgattgatccggacttgaatgcctttccttgaggactagtccagctttcccctttctcttgttttcatacctcctcaggcacatcattagaacaaacctactgaaaacgaattgtttggaaataagcaaaaccttctcagatgcagtaaaacctagagatgtgctctctagttcctaaagtttcttcatgacaccagacaaatcctgtttggcctttagcttccctatctgaaaaacaccgtggtccgaagtgctgtcacactgcctctagggagaaaggcccgtcccagctctcctgctcagagctgcagccagccgccctctagccactactgtttccaccacacattcctaccaaggactgtgctgctgacttgaaaggaagattactattccacttgcagttgttgcttagtaacatgtgtgattgtgtttctggtgacggcgtgaacagagatcattaaaaattaaacccccagagctgctaaagtgggaggaagtgggagcggggaagccacagtgccgtcacttgcttagaaaccgtttactctcaggcttacatgtaaatcttgaggaaaacactgcatgtctctggtttatattaagctacatacagcacggtaactgacattgatttgtgtcccctgcaggtggagtggatcagtaagacattaaaaaaaaaagaaaaagaaaaaaagaaagaaaaaaggtctgaaattacaagcagatgggccacatggtgtccccaagaamgcywwggwcakarccwgckkmtktgtcygwsktgstagtmcttcmymcagttccaccaggtgagaagagtgatgaccatccttttccttactatggttatttcatacttcggttgcatgaaggctgcgcccatgaaagaagcaaacgtccacggacaaggcaacttggcctacccagctgtgcggacccatgggactctggagagcgtgaatgggcccagggcaggttcgagaggtctgacgacgacgtccctggctgacacttttgagcacgtgatcgaagagctgctggatgaggaccagaaggttcggcccaacgaagaaaaccataaggacgcggacttgtacacttcccgggtgatgctcagcagtcaagtgcctttggagcctcctctgctctttctgctggaggaatacaaaaattacctggatgccgcaaacatgtctatgagggttcggcgccactccgaccccgcccgccgtggggagctgagcgtgtgtgacagtattagcgagtgggtcacagcggcagataaaaagactgcagtggacatgtccggtgggacggtcacagtcctggagaaagtcccggtatcaaaaggccaactgaagcaatatttctacgagaccaagtgtaatcccatgggttacacgaaggaaggctgcaggggcatagacaaaaggcactggaactcgcaatgccgaactacccaatcgtatgttcgggcccttactatggatagcaaaaagagaattggctggcggttcataaggatagacacttcctgtgtatgtacactgaccattaaawksggmasrtagtggatttatgttgtatagattatattgagacaaaaattatctatttgtatatakacataacagggtaaattattcagttaagaaaaagataattttatgaactgcatgtataaatgaagtttatacagtacagtggttctacaatctatttattggacatatccatgaccagaawgaaacagtcatttgcgcacaactttaaaagtctgcatwacattcctcgataatgttgtggtttgttgccgttgccargaattgwraacaaaaagttaaaaaaaataataaattgcatgctgctttaattgtgaattgataataaactgtccctctttcagaaaacagacaaaaaaamaaaaaamaaaaaaargccaaaaacaaaaatttgaaccaaaacattccgtttacattttagacactaagtatcttcgttcttgttagtactctgttctactgctttcaacttctcatagcgttggaattaaaactatgtcaaggtgctgttgtcattgctttactggcttaggggatggggaacgggaggggtagatttctgtttgttttgtgttttatttcgtttgtttgtttgttttgtttttttagttccacccggagtagggatggagaaaatttcttcactctcctattctggttgataaagcgttacatttgtatgttgtaaaaaatgtttgcaaaatccaatcagatgactggaaaacgaataaaaattaaggcaactgaataaaatgctcacacaacactgcccatgatgtatctcccctggtcccccaggtcactcttctggcatgggtcagggaaagctgcttttattggaaagaccagcatttgtttaaagcacattctttccctccctcctcccattttggtccctttcttttttgttttgttttaagaaagaaaattaagttgcgcgctttgaaatattttatcactgctgtgaacagatgaacaatgtgtgtcatttcatgacactcgtggaaaacagtgattttttttttattttttgccctaaggagaaacaagtaagaataaccgaaaatgttctttttttttaaaggcataaacagtggataagttataatatggcctaacaatgtttgcagataaaagatattgcatacagccagatactagagcagggatccacactgccactgaaatgcgactgaatggccctgtggaggctaagtggagctgacatactatttcctggcaragcaggaggaatttctgagtggycatcctgaggtctagatggaggtggggaatggtacttgagacattcctaaaggaaggctcggaagcacccttcagagcaggctctggaatgatgtgtcaagtttcttargccttctgctttaagtgcctacgttasstaacartgctcaagaggttctcaattggagaaccacactcaaatccatttatggcctccatcccattttaaataattatggataaagttggattaacctggagcagctttggatccaaatatggcatagcagtgatgctatcagtgcagcatgatgggaaatgtttgctgtgaagagacttaactttctttgcgcttagacttcaggaagcctaggttttatttatttatttttttgagacattttggtgaaarraaaaaaraaaraagaaaacaaacaaacaaaaccagaaaaagcaccaaaacttaggcagaatgagcaatgtctgtctgtaagggctagaatgacaaggcataggaaggtgctttcactgtgaaagagacaagaacacaggaggaaatactgcttaagtgaagagcacagaaagctcctgatagttctgtccattcagcacaagggtcccttctacactttacctcttggggttaggagaagtcaagctggaagcctgaatgaatggccccaatgagaactagtgttaagcccatttccctagtgaggttttccgccacgcgaatgtgttagtggttacctgactgggctcctgggcatcagaaaaagaggcaaacaattgcttcatcttaggagtggaaagggtgaaacaaagtggctgtccactgtgactcagggagtgaagataccatcagcaaatagtttctttttgttcaactgttcctttagaactagtctgtcttctggagtcccactgaatcccctgtttttggaagacttcacgtagcctagattgttttgtgcctttgacaacattaatctctgtcatcatttttaacctattaaggaatgctttgaatatctgctatatgctaactttttgcagcttcattctgagagacgttagtcaaacaaataaaaggagccccatcacaatctcacggtattgcaagggccaggtcgattaggtggcttcataggagaccctccgcaactgtgtggtcagtggctggctctcatacccactaagatacatcatagctccatgtcggtggtttatgttgactctaactaaacaattttagagaggagacaaagacaagcaagacaaaggcaggacaagacaagacaagacaagactttcagaacgacaccagagaaaaaccgtcttcacaaagtacgtaccgtcgtccggactacgaaaaatatcactaagggtaactttgacattcatttacagacaccggaacaagagagatacccatttctataataagtggtacattttgttctttttataaataacataaaatcatataaatatattaatacaataactttttttaaccgtaattttgaattggtgtagtcttcggataacatttatgtccaagataaattcacatggttaattgtatattatatacaaaatttatatcttaaaaattacaaaaatttatataaaagtttcatgtattttagacccccaagacccaaaaaa

SEQ ID NO: 2026 - DNA, 5607 bp, Rattus norvegicus
  misc_feature (3081)..(3081): n is a, c, g, or t
  misc_feature (3921)..(3921): n is a, c, g, or t
cgctggtgcaactcgaagacctatctccttcccgggggggcttctccggcatttaggcctcggcgtttggaagtacggaggtttttctcggaagaaagttcactggaagtggaagaaatggatttatctgctgttcgaattcaagaagtacaaaatgtccttcatgctatgcagaaaatcttggagtgtccaatctgtttggaactgatcaaagaaccggtttccacamagtgcgaccacatattttgcaaattttgtatgctgaaactccttaaccagaagaaaggaccttcccagtgtcctttgtgtaagaatgagataaccaaaaggagcctacaaggaagtgcaaggtttagtcaacttgttgaagagctgctgaaaatcattgatgcttttgagcttgacaccggaatgcagtgtgcaaatggttttagtttttcaaaaaagaaaaatagttcttctgagcttctgaatgaggacgcttctatcatccagagtgtgggctaccgaaaccgcgtcaaaaaacttcaacagattgagtctggaagtgccaccttgaaggacagtctcagtgtccagttgtctaaccttgggattgtgagatcaatgaagaaaaataggcagacacaacctcaaaacaaatctgtctacattgctttagaatctgattcttctgaggagagagtaaayryrcccgatggctgcagtgtgagagatcaggaattgtttcagatcgcccctggaggagctggagatgaaggcaagttgaactctgcaaaaaaggctgcttgtgacttttctgagggcataagaaacattgaacatcatcaatgcagtgataaagatttgaaccccactgagaatcatgcaactgaaaggcatccagaaaaatgtccgcgtatttctgttgcaaacgtgcacgtggagccgtgtggcacagatgctcgtgccagctcattacagcgtgggacccgcagtttattgttcactgaggacagactggatgcagaaaaggctgaattctgtgatagaagcaaacagtctggcgcagcagtgagccagcaragcagatgggctgacagtaaagaaacatgtaatggcaggccggttccccgcactgagggaaaggcagatccaaatgtggattccctctgtggtagaaagcagtggaatcatccgaaaagcctgtgccctgagaattctggagctaccactgacgttccttggataacactgaatagcagcattcagaaagtgaatgagtggttttccagaactggtgaaatgttaacttctgacaatgcatctgacaggaggccwgcgtcaaatgcagaagctgctgttgtgttagaagtttcaaatgaagtggatggatgtttcagttcttcaaagaaaatagacttagttgcccctgatcccgataatgctgtaatgtgtacaagtggaagagacttctccaagccagtagagaatattatcaacgataaaatatttgggaaaacctatcagagaaagggaagccgccctcacttgaaccatgtgactgaaattataggcacatttactacagaaccacagattatacaagagcagcccttcacaaataaattaaaacgcaaaagaagtacatgccttcatcctgaggactttatcaagaaagcagatttaacagttgttcaaaggatttctgaaaatttaaatcagggaactraccaaatggagccaaatgaccaagcaatgagtattaccagtaacggtcaggagaacagagcaacaggtaatgatcttcagagagggagaaatgctcatccaatagaatcattgagaaaggaacctgctttcacagctaaagccaaatctataagcaacagtataagtgatttggaggtagaattaaatgttcacagttcaaaagcacctaagaaaaataggctgaggaggaagtctaccaggtgtgttcttccactcgaaccaatcagtagaaatccgagcccacctacttgtgctgaacttcagatcgagagttgtggtagcagtgaagaaacaaagaaaaacaattccaaccaaaccccagccgggcacattagagagcctcaactcatcgaagacacagaacccgcagctgatgccaagaagaacgagccaaatgaacacataaggaagagaagtgccagtgatgcgttcccagaagagaaattaatgaacaaagctggtttattaactagctgttcaagtcctagaaagcctcaaggacctgtcaatcctagccctgagagaaaaggaatagagcaacttgaaatgtgccagatgcctgataataacaaagaactcggggatttggtcctgggaggagagcccagtgggaaacctactgaaccatctgaggagagcaccagtgtgtccttggtacccgacacagactacgacacccagaacagtgtctcaatactggaagcgaacactgtcagatatgcaagaacaggatcagttcagtgtatgactcagtttgtcgcaagtgaaaaccccaaggaacttgtccatggttctaacaatgctggaagtggctcggagtgcttcaagcacccattgagacatgaacttaaccacaatcaagagacaatagaaatggaagacagtgaacttgatactcagtatttgcagaatacatttcaagtttcaaagcgtcagtcatttgctttattttcaaaacttagaagtccccaaaaggactgtactctggtaggtgcccgctctgtgccctcaagggaaccaagtccaaaggtgacttctagaggtgaacaaaaagaacgtcagggacaagaagagtctgaaatcagtcatgtacaggcagtcacagtcacagtaggcttacctgtgccctgtcaggaaggtaagccaggtgctgttacaatgtgtgctgatgtttctaggctttgtccgtcatctcattatagaagctgtgagaatggactcaacaccacagataaatctggaatttcacaaaactcacattttagacaatcagtttctcccctcaggtcatctataaaaactgacaatagaaaaactctgacagagggncgatttgagaaacatactgaaaggggratgggaaatgagactgctgttcaaagtacaatacacacaattagtctaaataacagaggagatgcttgtctagaagccagctcaggcagtgttattgaagtacattccactggtgaaaacgtccaggggcaactagatagaaacagagggcctaaggtaaacaccgtgtctctattagatagtacacagcctggtgtctctaagcagagtgctcctgtaagtgataagtatcttgaaataaagcaggagagtaaggctgtcagtgcagacttctctccatgtctgttctcagatcatcttgaaaaacctatgagaagtgataagacttttcaggtttgctctgagacacctgatgacctgttggatgatgttgaaatacaggaaaatgctagcttcggtgaaggtggcataacggaaaagtctgctatttttaatggaagtgtcctgagaagagagtccagtaggagccctagccctgtaacccatgcatcgaagtcgcggagtctccacagagggtctaggaaattagaattctcagaagagagcgactccactgaggatgaagaccttccctgcttccaacacttgctgagcagagtaagcagcacacccgaacttaccagatgcagcagtgtggtgacacagcgtgtgccagagaaagcgaaggggacccaagcaccccggaagagtagcatcagtgactgcaataatgaggtgatcttgggagaggcatctcaggaatatcagtttagtgaggatgcaaaatgctctggcagcatgttctcctcacagcacagtgctgccctaggttcncctgcaaatgcactctcccaggatcccgattttaatccaccttccaaacaaaggcgtcaccaggctgagaatgaggaagcctttctaagtgataaggaattgatttcagatcatgaggacatggcagcttgcctggaagaggctagcgatcaagaagaggacagtataatcccggactcagtggcgtctggatatgagagtgaagcaaacctctctgaagactgctcacagagtgatattctaaccactcagcagagggcgaccatgaaggataacctgataaagctccagcaggaaatggctcagctggaagctgtgctagagcagcatgggagccagccgtctggccaccccccttgcctcccagctgacccttgtgccctagaagacctgccagatccagaacaaaacagatcaggaacagcaattttaacttcaaagaacattaatgagaatcctgtaagccagaatccaaagcgcgcctgtgatgacaaatcccaaccacaacctccggacggtctccccagtggagataaggagtcaggaatgagaaggccttccccttttaaatctccactgaccagcagtaggtgctctgcacgaggccactccaggagtcttcagaatagaaactccacstcgcaagaggagctccttcagcctgctgrattggagaagtcatgtgaaccacacaacttaacagggcggtcttgcttgccaaggcaagatctcgaaggaaccccatacccggaatctggaatcaggctagtctccagcagagaccctgattctgaatcccctaaagtgtcagcccttgtttgcactgcaccagcttcaacctctgcactgaaaatatcccaaggtcaagttgctgggtcttgcaggagtccagctgctggtggtgctgatactgcagtggtagaaattgtgagcaagataaagccggaagtgacgtctccaaaagaacgagcggagagagatatatccatggtggtgtcaggcttgacccctaaagaagtaatgattgtccaaaagtttgctgaaaaataccgccttgctttaactgatgtaattactgaggaaactacgcatgtaattataaaaacagatgctgagtttgtgtgtgaacggacactgaaatattttctgggcattgcaggaggaaagtggatagttagctattcttgggtgatcaagtctatccaagaaagaaaacttctgagtgtgcatgaatttgaagtcaaaggagacgttgtgactggaagcaaccaccaaggtccaaggcgatccagagaatcccaggaaaagctctttgaaggcctacagatctattgttgtgagcccttcaccaacatgcccaaagatgagctggagaggatgctgcagctgtgtggggcttctgtggtgaaggagcttccattgctcacccgtgacacaggtgctcatccaattgtgctcgtgcagccaagtgcctggacagaagacaacgactgccctgatattgggcagctgtgcaagggacgtctagtgatgtgggactgggtgttggacagtatatccgtctaccggtgtcgggatctggatgcctacctggtacagaatatcacctgtggccgtgatggtagcgagccacaagactccaatgattaatttaagaaatggtcttcccgtcccgggagcatctct

SEQ ID NO: 2027 - DNA, 1882 bp, Rattus norvegicus
gggcccttgtctacgttctgcagagcctccggtccaactttgttccaaatgagcctcactgctgctctttgggttgctgtattcggaaaatgtggcccaccacctgatttaccctacgccctgccagcaagtgagatgaaccagacagactttgaaagtcacactaccctgagatacaattgtcgccctggctatagtagagcgagctcaagccagagtctctactgtaaacctctggggaaatggcagattaatatcgcctgcgtcaaaaagtcatgcaggaatccaggagacttacaaaatggaaaggtggaagttaagacagatttcttgtttggatcacagatagaattcagctgctcagagggatatatcttaattggctcatccactagttattgtgagatccaaggcaaaggagtttcctggagtgatcctctcccagaatgtgtaattgccaagtgtgggatgcctccagacatcagcaatgggaagcacaatggtagagaggaagaattcttcacatatcgttcctcagtcacctataagtgtgatcctgacttcacactccttggcaatgcctccattacctgcactgtggtgaacaaaacagtaggtgtttggagcccaagccctcctacctgtgaaagaatcatctgtccttggccaaaagttttgcatggaacaattaattctggattcaagcatacctataaatacaaagactctgtgagatttgtctgccagaaagggtttgtcctcagaggcagcggtgtaatccattgtgaggctgatggcagctggagtcccgtaccagtgtgtgagctcaatagttgcactgatattccagacattcctaatgctgccctgataaccagtcccaggccaagaaaggaagatgtatatccagtgggtactgtgctccgttacatctgtcgtcctggctatgaacctgctacgagacagcccatgactgtgatttgtcagaaagatctcagctggagcatgcttagggggtgtaaggagatatgctgtccagtaccagacccaaagagtgttagagtcattcaacatgaaaaggcacatcctgacaacgactgtacttacttctttggtgacgaagtgtcatacacatgtcaaaatgatataatgcttacagctacttgcaagtcagatggcacctggcatccccggacaccatcatgtcatcagagttgtgattttccgcctgccattgctcacggacgttatacaaaatcttcttcatactacgtcagaactcaggttacatatgaatgtgaagaaggatacagactggttggagaggcaaccatctcctgctggtattcacaatggacaccagcagctccacagtgtaaagctctatgtcggaaaccagagataggaaatggagtactgtctactaataaagatcaatatgtcgaaactgaaaatgtcaccatccaatgtgactcgggctttgtcatgctaggttcccaaagcatcacttgttcggagaatggaacctggtacccaaaggtgyccagatgtgagcaggaggtccctaaagactgtgagcacgtgtttgcaggcaagaagctcatgcaatgtctgccaaattcaaatgacgtgaaaatggccctggaggtctacaagctgactctggagattaaacaattacagctccagatagacaaggcaaagcacgttgaccgggagttatgagcgggtgttctctcaaggaggaagaagtacctcatgggctttctgacttcagtgccaagcagaacgtctgcatttttagcaacctttgtaactttggcaccaatgttcatggtaataaatatctgcttagaataattcattaaagcataatgtaagc

SEQ ID NO: 2028 - DNA, 7100 bp, Rattus norvegicus
gaattcaatacaatatgtaactctattcgattctggttggttttgaaacagggtctcaagtagcccaggactctatatcatcctacctgtacctctttagtggtgataggactgaagtcatgtgccacacctggctacattctgaagtatctaatacaatgtgtgacttagaaaacgtctagaatgtacctacccaccttttaatcttattaccaaatcttattactgagtgccagtaggtatgagcgttgctcagctcccagagagcatcaggtaaaatgttgcaggagccttaacacgttcaaatggtttgaaccaaatttacacaatctgcaaagtaggtttcttcacttgctcgtccccttactccgagcattaatttttctacaataacagagtagttacttcctggatttgctttcgtttctttgaggtttattttcagaagatatagaaatgaattgggggaaaaaactttattctggaatgctgagtgagaaagcaggacacggggatgatgaagacatggttcagttggtagaatgcttacccagggtgggcaaagccatcccagtgtgcgcagaccaagcatcctaacgcacacctggaaaccccagtcctgcagaggcagagggtagtgcttggaataagaaataccctgcacaggctcctgtgtttgaacacttggtccccggttggtggtggtgtctgggggagactgaggaggctgggccttgcgggaggaagtgtgtccttgggggtgggtttcgagaatatgtggctgcatcccgcacgtagttctctccctctctctctctctctctctctctctctctctctctctctctctctctctctctttcctgatgttataactcagttttctgctcctgtctcaaaatgcctgctcctcaccggtgttccctaacccctacatcattgactcttatccctctggaacagtaagtcaaaataaatgtcttctgaaagttgcttctggtcatggtgttttatcccagcaacaggaaagcagctgctatgagggcacgatatcagggttcactgtcatcttcagctatgcagagaattwkwkktywkykywkwwtacatgagaacgtgttttaaaaacaaaaacaaacaaacagacaaacaaacagaattaggagaagcatagcaaagcagttacatgttccacatactccattttaagcctctttcaccctcacgtatgtgtaagagataaaacattggtgaaaaggacatttaataccatctgtgatttttttggggggagggatatataagtctatagtttgtaagccttacatgtatgcttacatgttaaaaaagaagtcatagaaacaagtttgcctctggtgtctgtgtttcccctttctccaatactgggtgagttgcatgcatggtacatgatgaacggagagtacgggcacatgggtcctcgtgcctcaggatctgtgcccataagtagtcaccaaggtaaacctgggctctctttagtgctaaagcggggaggcagaggtgaaacaggcggggctacaagccacggccatacagaaaactaacttctttagaattagaattttgtcttcatctctagctgctcaggcctgatccatggtggactattgacagtgttggggaggcatctgcaccctccccttacggccaaggctctttataaaacgaagtaattctcttttctattgtgctttctgctgcctctccacttcctcagcttacctcttatagccccggtgaagagacgtaaatggaaatgtggagaagactctgtttcttgaagagcgggtggacctgagtaaataactggatggcgaggctgttcctggggcaccatcgcccccatcatccaaggcgtacacacacttctcctttctttacttctgctatccaagagggacgtgttatccatagcgatcccctgaatagctaatctcttctctttagcctgggctttagatatcccgatatcaggatcaataacacgatggtttgtgccggtgtattttacttcactgagctctgagcagtcagagaacagcatttccgaaacagcaactctattcactgccaacagaatactcatgtttgtatgaataaaacagtaaggaggtggtctgccgaactcagggcttggaattaccttgaggaatcggggatcaggtttcaactacttgaagcgataggggatatttatagttgtctccacttaaactgtgattggtttgcaatcctgaaaaggatgggtaggcattctgcttaggtagccagtataaattcatcgccgctgttgtgagcacacaacaccttattttaaaacgcaagacaggacaagatcagagcctgcctggtttctccgttctttttgttcccgtggaaataactctttaggaatctaaggcaacagtaacagaaacggggaagaaagaaagagccccaagtcagacaagactcgtccacacaaagaaggaaggagagcacatgactggggcttctgtttgccttgctcaggtgtattctagctacggaggaaaaggtctgctctgctcctctcaacactgacctgctagacaagcagcaggctctggccatgagtggataggactggagttttgattgtgtctctgtaattgtgcgactttgagcgagttctttatttactgtcctatacctcagcttcccgggccgcttaacaatcgcagtatcagtatataacttacagtgttgctgggtcaactaagcaaatatggtaaaaaaacaccctgatagtcgaacagtccctggcatacaggaagtactcacggagttctaacttaaaattggtgttacacttaattactgaattaactgtgtgtgtgtgtgtgtgtgtgcgtgtgtgtgtgtgtgtgcgtgtgtgtgtgtgtgtgcgtgtgtgtgtgtgtgtgcgtgtgtgtgtgtgtgggggggcaagcttttcggagtcagttttctccaccacgtggacctgggtattaaattcaggttgtcaggcttggcacagagttctcctatccactgagccatcttgctagctccatattttcttatttttatttatgttttctttttgtggtgcggctccacatatgctaagtgaatactttaccactgagtcaaacaagacacgtccagccatgtgcatgaacgtgtgtgtgtgtgtgtgtgtgtgtgtgtgtgtgtgtgtgtgtgtgtgtgaagacatttgatagttggtacttttcttctacctcatgggtcctgaggattaaactttgtttgggtcctaggtctcaggcagtaagtgactttctccactgatccattttgctggtcccatgggattttagacatgactgtcactgcctttatgggcttcacattctagggacagtgtagatgtagattagcaaaagacaccaaaacatggcccaatgaatgaaattttacaattgtgttaagaacaatgtacaaaaaaataacattgattagatcaatttgtgactgttttcccaagggattgcaaaacttacaattttaccaatctctgttaccacatctttgtcaaatcaagaacaagttttggagtgtcctcagtcacgtgcccacagcccacagcccataatcaaggtgaaagttgagaaggtttattttgaaaatgacagcatcaaggtgtttaaagataatttctagcaactgatagaaaatctttaacctattgattaaaatgaaaaataagcgacaaagtcaccaaatatttacaaacattagtaaatgttttactttctagctttttttattttttgaatcggagtttcatatcccagtctggtctcaaaggagccatgaagctgaagatgacctttgatttctgaaccttagcttctacctccggagggctgggagtaacggcctgcgccaccgcacagtttatatggtcctggcgactaaactcggggctttctgcatgctagacactcaaccttccgagccacatcctcagaccttcacagatccccctctccccaaagacaaagagctttctattattctccagtgtcaggggagaaaatggaggagtctgttactgcagttaatacaggccactttggcacagtgggccaagtgacaagtcagatttcccctctcacagaggaggaaatccgtacagatctgtaggaagattaaacagttcctgagcgtttttacaataaattattggtatacagcttggtaaatgataatctgagtgagagaagttagaaaaagaactacccaccaattagtaccaaataaataagcaaagtgagaaaacgttgcacagaggaattggtccccgaactgtgactctcagaggtcagagagcaccgcctttcggtccccacccatctccccagcctcttcccatcccggggtccacctcccggagcccactgctcgccccaccctccttccaatcctgtcccttctagagtttcagtggccaatcaggaggcggccgtcccgagaggtggggggtggtgctgattggcagagcctgaagtcaccactccagcgggcctgactgacgcgattgcctaccccgggtggagaccgtgctcgtccggccctcttgcctcacgttctgcagctctgcagctccgcaatcctacaccatggcggacagccgggacccagccagcgaccagatgaagcagtggaaggagcagcgggcccctcagrwayccrrtgtcctsasmrccksaggcgrgaacyyrrkaggmgakmrastwaatatcatgactgcggggccccgagggcccctcctcgttcaagatgtggttttcaccgacgagatggcacactttgacagagagcggattcctgagagagtggtacatgcaaagggagcaggtgcttttggatactttgaggtcacccacgatattaccagatactccaaggcaaaggtgtttgagcatattgggaagaggactcctattgccgtccgattctccacagtcgctggagagtcaggctcagctgacacagttcgtgaccctcgtgggtttgcagtgaaattctacactgaagatggtaactgggacctcgtgggaaacaacacccctattttcttcatcagggatgccatgttgtttccatcctttatccatagccagaagagaaacccacaaactcacctgaaggaccctgacatggtctgggacttctggagtctttgtccagagtctctccatcaggttactttcttgttcagcgaccgagggattccagatggacatcggcacatgaatggctatggctcacacaccttyaasctsgttmmtrmgamtssakakgcagtktactkcamkttccwytrcaagactgaccagggcatcaaaaacttgcctgttgaagaggcaggaagacttgcacaggaagacccggattatggcctccgagatcttttcaatgccatcgccagtggcaattacccatcctggactttttacatccaggtcatgactttcaaggaggcagaaaccttcccatttaatccatttgacctgaccaaggtwwggmmkcasmagswstayymtyttrtamsasttkgyawrctsstcttaaacagaaatcctgctaattattttgctgaagttgaacagatggcttttgacccaagcaacatgccccctggcattgagcccagcccggacaagatgctccagggccgcctttttgcttacccagacactcaccgccaccgcctgggaccaaactatctgcagatacctgtgaactgtccctaccgtgctcgcgtggccaactaccagcgcgatggccccatgtgcatgcatgacaaccagggtggtgctcccaactactaccccaacagcttcagcgcaccagagcagcagggctcggccctggagcaccatagccagtgctctgcagatgtgaagcgcttcaacartgctaatgaagacaacgtcactcaggtgcggacattctatacgaaggtgttgaatgaggaggagaggaaacgcctgtgtgagaacattgccaaccacctgaaagatgctcagcttttcattcagaggaaagcggtcaagaatttcactgacgtccaccctgactacggggcccgagtccaggctcttctggaccagtacaactcccagaagcytaagaatgcaattcacacytacgtacaggccggytctcacatagctsccaagggaaaagmtaacctgtaaagcacgggtgctcagcctcctcagcytgcaytgaggaratccctcatgaagcagggcacaagcctcaccagtaatcatcgctggatggagtctcccctgytgaagcgcagactcacgytgacgtytttaaaacgataatccaagyttytagagtgaatgatasccatgcttttgatgrcatttcccgagggggaaattaaagattagggcttascaatcacttaacagaaacatggatytgcttaggacttytgtttggattattcatttaaaatgattacaagaaaggttttytasccagaaacatgatttgattagatatgatatatgataaaatcttggtgattttactatagtcttatgttacctcacagcytggtwtwtatacaacacacacacacacacacmcamamamamammamaamacacatacactatacacacacacacacacacacactaaaacacacatacacaacacacacatacactacacacacagaacacacaacacaaacatacacacataggcacacacacacacacacacacacacacacacacacacacacacacacatgaatgaagggattataaagatggcccacccagaatttttttttatttttctaaggtccttataagaaaaaccatacttggatcatgtcttccaaaaataactttagcactgttgaaacttaatgtttattcctgtgtagttgattggattccttttccccttgaaattatgtttatgctgatacacagtgatttcacatagggtgatttgtatttgcttacatttttacaataaaatgatcttcatgg

SEQ ID NO: 2029 - DNA, 421 bp, Rattus norvegicus
gagwcskcacskgttcctgtctgactctggcagcactcactgacagcaagcagcacagaaaaatgagcgctaagaaatctcccgaagaaatgaagagcatttttcaaaaatatgcagccaaagaaggcgatccaaaccagctgtccaaggaggagctgaagctgctgattcagtcagagttccccarcctcctgaaggcttcaagtactctagacaatctctttraagagctggataagamcgrtgatggagaagttagctatgaagaattcgaagttttcttcaaaaagttatcacaatgaagccagaagaaggagctccgacaccacctactgattgaatcctatccaatcccaaagatctagctgtgagagcaagatactgttaataaagcaaattctgagamawrwmaaaaaaaaaa

SEQ ID NO: 2030 - DNA, 4095 bp, Rattus norvegicus
gcggccgcarctgcccgcgggcggagcgcgctcggacccgggagcgcaaccgcgggccaagtcggctgcarccgggagccccgcgctcgcgacccgccgggaggagccggtakctgcgcttgcatccakcasaagccgrgtgatgaasacaagggcggctccggggcacaagcgaacctgaggagagtcgctgcctcgaaactccctgctgcgagagatcggggttcggtasagaggaccggacggtctgggarattcggggaggcgcggaggactcsagtgggacagcyacctgcagcacggctgccagatatgaccagtaatggcatctacttcagctctgagttgctcagtgaactgtggattgactgaaccatattctttcccatcatgatagacaacgcaaaggctctctactttgctgcattctgactagtggccaagcacgtgacatcccgaacttctgcaaaggtacaataagggccgaccatttaattttggataaccagttggtgtgttcttccttggactatgtcagagagtcacaatgaccttgcacagtaacagtacaacctcgcctttgtttcccaacatcasctcktsctgggtgcacagtccctcggaggcagggctgcccttggggacagtcactcagttgggcagctacaacatttcacaagaaactgggaatttctcctcaaacgacacctccagcgaccctctcgggggtcacaccatctggcaagtsgtcttcattgccttcttaacyggcttcctggcattggtgaccatcattggcaacatccttgtcattgtggccttcaaggtcaacaaacagctgaagacagtcaacaactacttcctcttaagcctggcctgtgcagacctgatcatcggggtcatttccatgaacctgttcactacctacatcattatgaaccgttgggcactggggaacttagcctgcgacctctggctctccattgactatgtggccagcaatgcctctgtcatgaatctgctggtcatcagctttgacaggtacttttccatcactaggccactcacctaccgagccaaaagaacaacaaaacgasstggtgtgatgattggtctggcttgggtcatctcctttgtcctatgggctcctgccatcttgttctggcaatactttgtagggaagagaactgtgcccccaggagaatgtttcattcagtttctgagtgagcccaccatcaccttcggcacggcgatcgctgccttttacatgcctgtcaccatcatgactattttatactggaggatctataaggaaactgagaagcgtaccaaagagctggctggcctacaggcctctgggacagaagcggaggcagaaaactttgtccaccccacaggcagttctcgaagctgtagcagctatgaactgcaacagcaaggygtgaaacgatcatccaggaggaagtacggtcgctgtcacttctggttcaccaccaagagctggaagcccagtgccgagcagatggaccaagaccacagcagcagcgacagttggaacaacaacgatgctgctgcctccctggaaaactctgcttcctccgatgaagaggacattggctcagagaccagggccatctattccattgtcctcaagcttccaggccatagctccatcctcaactctaccaagctaccrtcctcagataacctgcaggtgtccaacgaggacctggggactgtggatgtggagagaaatgctcacaagcttcaggcccagaagagcatgggtgatggtgacaactgtcagaaggatttcaccaagcttcccatccagttagagtctgcygtggacacaggcaagacctctgacaccaactcctcggcagacaagaccacggctactctacctctgtccttcaaggaggccacgctggctaagaggtttgctctcaagaccagaagtcagatcaccaagcggaagaggatgtcgctcatcaaggagaagaaggccgcccagacgctcagtgccatcttgctagccttcatcatcacgtggaccccctacaacatcatggtcctggtgaacaccttcygtgacagctgcatacccaaaacctattggaatctgggctactggctgtgctatatcaacagcaccgtgaaccctgtgtgctatgccctgtgcaacaaaacattcagaaccaccttcaagaygctcctcttgtgccagtgtgacaaaaggaagaggcgcaaacagcagtaccagcagagacagtcggtcatttttcacaagcgagtgccggagcaggccttgtagaaaaggggtatgttgagagcagtgaccacgcaagcgcgtcagcccacacagcctagcaggagtctggcgcaggtggggggagccatccctgatggtgataaaatgggtttttatcgacctcacgggagagaagctacctgtttactgatccattgaataactgattttggtccaatgccaattcagcaggaaagaaggagaggcataccgctaaacatgaagagatgtgttctgaaacagacttttaagtggattttgtttcctctaagagaaaaagaaattattgtctcagagcaagtatcctcagaaattggtctgcctgggtctcttaattcctatcagctctggaatcactggtgagcctcaaggcactagatgccatgtgctctccctaagggtcccaaagtgtccatccagatcccatgtgaagcacggcwagcttgaaaaaaaaaatctgtggtcctgagttattttgtatattgcaaagctgacaccacttgtccccaatcagcttctgtcctctttcagtgtgttgtcaaactctattcgtggatttgactcttggttcttgcaacgtactgtttcgtgctgttcaagtttcacacaaataaaattgtacaggaacatgcatacctatacatgtgtgagtttccgcacgcacgcacattgtgtatataacgtgatggggaacactgaactgaaaggaagttcctaccatactttggtaactgaaactcwckaggatcctcaaatgatatgaaactgaactaagcccagtttgacgttgtgttttggtctgggtttttgacactggagctatttcccacaaaccatcctgaagaataatatccagcacagagaatccagaccttctcagcaaacctgtgctagacagacagtcttgagggtcagtcggcaccgtgtcttgactggactcagtacgcactgtctcctgcactgttagctctctgtcgatggagctaaataaaccagggcccctttgagctcaaaagaacgaacttctgtacatgtttgaatttagtcgtccaaatctgaatgtttcaaaacaaaatttctgggatctgaactgctcgaaactcaatcctagagtcacctttgaatgtcacacacagcaatataatstacatttacatagaaaaatcaaaggaaacgctgtgctcggagctgacggaggaaagtattgtattccacttcctgctacctggcaccttctgaaaggaaggtgggcttacctcctgtcacttagcaggagtcagaacccttctggtagtcactgtataaccttcacctaggagtggttggtgtctaggaagccatgcatcctctgaagaaagaatggcactagaaaaagtattacttcgaaatcgatttctttccattgtgacaaccgaatttcgcatcatcctttgaattgccccaagtgcaccgtgtttcctctgggggaggggtctgctgctctcattcttctggctgctgtattgttgggtttcttcttttccttctgctgggactgtgtggggagcgggtggggtggggggtgggagggctgtggagaacccttcccttgtgcagggcatccatccgtgttgtgaacccagagctgggggccaaagctgcttttgtattcagtgtgaggtggtgtttacagccgactttgacatcagtgggtgtgttctcagtggtgtgtctgtacctgaactatttaatgttgtgtcatgtttatataaagaatatttatgcatamwwwaaaaaaaaaa

SEQ ID NO: 2031 - DNA, 1447 bp, Rattus norvegicus
  misc_feature (1369)..(1369): n is a, c, g, or t
  misc_feature (1432)..(1433): n is a, c, g, or t
tcaccaccacctccacagcaaagacagacactcaggagccagccagccagggtcccaaaggccgtcaccatgccgttcggcaacacccacaacaagttcaagctgaactacaagtcgcaggaggagtacccagacctcagcaaacacaacaaccacatggccaaggtgctgactcctgacctgtacaataagcttcgagacaaggagaccccatccggcttcactctggacgatswcakscagactggggtggacaacccgggtcaccctttcatcatgacggtcggctgtgtggccggcgatgaggagtcctacactgttttcaagracctgtttgaccccatcatccaggaccgccatggtggcttcaaacccacagacaagcataagaccgacctcaaccacgagaacctcaagggtggagacgatctggaccccaactatgtgctgagcagccgcgtgcgcactggccgcagcatcaagggctacactctgcccccgcactgctcccgcggagagcgccgtgctgtagaraagctgtccgtggaagctctcaacagcctgacaggcgarttcaagggcaaatactaccctctgaagagcatgacagagcakgagcagcagcagctcattgatgaccacttcctgtttgacaagcccgtgtcacctctgctgctggcctcaggcatggcccgagactggcccgacgcccgtggcatctggcacaacgacaacaaaagcttcctggtgtgggtgaatgaggaggaccaccttcgcgtgatctccatggagaaaggrggcawtatgaaggaagttttccgccgcttctgcgkgggcctgcagaagattgaggagatcttcaagaaggctggycmccccttcatgtggaacgagcacctgggctacgtgctcacctgcccctccaacytgggcaccgggytgcgcggaggcstscacrtgaagytggcgaacctsagcaagcmccccaagtttgaggagattctcacccsccttcktctgcagaagcgcggcacaggtggcgtggacaccgctgcggtgggcsccgtgttmgacatctccamcsccgatcggbtgggmtcttccgagswckarcmggtgcrscwsgwggtggatggcgtaaagmttwtgktggagatgragaaraagytggaaaaagscmasyccatbgasgacatgatccctgcgcaraartaggcbccgcrcagagcgcrccagtcagcggyytgcakytggagccccsccccbtggaagtccamccaaccgactykgccctytgggttytggccaatragaacstgcmtbtccggggccccgcccgcctgytggaactcctgcamttggrsgbtgnttccccmcsccctgccttaaataaaagbycrtggtggtcttdaaaaaaaaaaaaaaaraaaanntagttgtgcggccg

SEQ ID NO: 2032 - DNA, 3742 bp, Rattus norvegicus
ccaagaggaagaaacatgaagtttttgctgcttagtgcacttttatttttgcatagttccttagcttggacaagagaaaagcattattacatcggaattactgaagcagtttgggactatgcttctggcagtgaagaaaaggaacttatttcagttgacacggaacagtccaatttctatcttcgaaatggtccrgmwcgtaktggaagaaagtataagaaggccctttattctgagtacacagatggcacctttacgaagactatagacaaaccagcctggmtagggyttttaggccctgtcatcaaagctgaagttggagacaaagtttctgttcacgtaaagaactttgcctctaggccctacacttttcatgctcatggggtaacttacaccaaggcgaacgagggggccatctaccctgacaacaccactgattttcaaagagccgatgacaaactgtttcctggacagcagtatttgtacgtgctgcgtgccaatgagccaagtcctggcgagggagacagcaattgtgtgaccaggatttaccactctcatgtggatgctccaaaagatattgcatcaggactcataggaccgttgatactctgtaaaaaaggttctctgcataaggaaaaararraaaawawwgaccaagaattcgtactgatgttctctgtggtggatgaaaatctcagctggtacctagaagataacatcaaaaccttctgctctgaaccagagaaagtcgataaagacaatgaagacttccaggaaagcaacaggatgtactctataaatggatatacatttggaagcctcccagggctctcgatgtgtgcagaagacagagtgaagtggtacctttttgggatggggaatgaagttgacgtgcattcagagctctttcatggtcaagccctgaccagcaagaactatcatactgatataatcaacctgttccctgccactctaattgatgtttctatggtggcccagaatcctggagtctggatgctcagttgccagaacctgaaccatctgaaagctggtttgcaggcctttttccaggttcgtgactgcaacaagccctcaccggacgacgatatccaagacagacatgtgagacattattacatcgctgccgaggagaccatttgggactatgctccgtctgggacagacaccttcactggagagaacttcaccagtctgggaagtgattcaagggtcttttttgagcaaggtgctacaagaattggtggctcttataaaaaattggtttatcgtgagtacacagatgattccttcacaaaccggaaggaaagaggccctgatgaggaacatcttggaatccttggtcctgtcatttgggcagaagtaggagacatcattagagtcacctttcataacaaaggacaatttcctctcagcattcagccaatgggggtaagattcaccaaggaaaatgagggaacatactatggcccagatggccgttcctcaaagcaagcctcccatgtggctcccaaagaaacctttacgtatgaatggactgtccccaaagaaatgggacccacttatgcagatcctgtgtgcctatctaagatgtattattctggagttgacctcaccaaagatatatttactgggcttattgggccaatgaaaatatgcaagaaaggcagcttacttgcagatgggagacagaaagatgtagacaaggagttctacttgtttgcaacagtgtttgatgagaatgagagtttactcttggatgataatatcagaatgttcacaactgcacctgagaatgtggacaaggaagatgaagactttcaggagtccaacaagatgcactccatgaatggattcatgtatggcaatctgcctggcctcaatatgtgcctaggagaatccatcgtgtggtatttgttcagcgctggaaatgaggcagacgtgcatgggatatacttttcaggaaatacctatctgtccaaaggagaaagaagagacactgcaaatctgtttcctcataaaagtctcacccttctcatgacacctgacacagaagggtcttttgatgttgagtgtcttacaacagatcactacaccggcggcatgaagcaaaagtacactgtgaaccagtgcaaggggcagtttgaagatgtcactctctaccagggagaaaggacctactatattgcagcagtggaggtggaatgggattattcaccaagcagggactgggaaatggagctgcaccatttgcaagagcaaaatgtttcaaatgcatttttggataaggaagagtttttcataggctcaaagtacaagaaggttgtgtatcgagagtttactgacagcacattcagagaacaggtgaagagaagagctgaagaggagcacttgggcatgctcggtccactgattcatgcagatgttggagccaaagttaaagttgtctttaaaaatatggcaacaaggccatattcaatacatgcccacggagtgaaaacaaagagttctacagttgctccaacgttgccaggtgaagttcgcacttatatatggcaaattccagaaagatcaggtgctggaacggaggattcaccttgtatcccatgggcttattactcaaccgtggatcgagttaaggatctctacagtgggctaataggcccattgattgtwtgtcggaaatcttatgtgaaagtattcaatcctaaaaagaaaatggagttttcccttttgtttctagtttttgatgwgaatgaatcttggtacttagatgataacatcaatacataccccgatcmccctgagaaaswwaacaaagacaacgwggaattcatagaaagcaataaaatgcatgctatcaatgggaaaatgttcggaaacctccaaggtctcacgatgcacgtgggagatgaggtcaactggtatgtgatggctatgggcaatgaaatagacctgcacactgtacacttccacggccacassttccaatacaassacaggggaattcatagttctgatgtctttgacyttttycctggaacataccaaaccctagaratgtttccccaaacgcctggaacctggttactccactgccatgtgactgaccatattcatgcggggatggtaactacctacactgttttaccaaatcaagagactawgtctggctgaaagaaataaattggtgataagtggaatwcgagmacrakgasgttgktttwaacatttaaaaaaatcaaagccacacaamtgttcatttgtgagggaattggtaatgccgatggacagatsaacagactgtatcatgacatgtatttgtttgctgggtaacagaatcgctttacatastccacttacacctgcactgaaaggactctgmaaagtggmaamaaataagcaaaaccgwatgatcagatgctgtccttgactgtcctcacaggatcactataargtccactaaacygkcwcsrrskcttctcatcaagtcctctaacaamccwtggggtaagrgggtatagaaaagaaggaaagatgaagataccaagatgcactttgtaaaaatctgaaaaacagttgaaggatgctctcggaaaatagagaaagtcaggatccaattwtgttacattttgaaaaaatgaaatggagataataaagtaataaattttaaaatgccawwrrraaaamwwmaaaaaaaaaaatttaaaaaaaaaaaaaaaaa

SEQ ID NO: 2033 - DNA, 1822 bp, Rattus norvegicus
acccttcagtcgtacagatggcgttctcccagtatatctccttagccccagagctgctactggccactgccatcttctgtttagtgttctgggtgttgagaggcacaaggacccaggttcccaaaggtctgaagagtcctcccggaccctggggcttgcccttcattgggcacatgctgaccctggggaagaacccacacctatctctgacaaagctgagtcagcagtatggggacgtgctgcagatccgcattggctccacacccgtggtggtgctgagcggcctgaacaccatcaagcaggccctagtgaagcagggggatgacttcaaaggccggccagacctctacagcttcacacttatcactaatggcaagagcatgactttcaacccagactctggaccggtctgggctgcccgccggcrcctggcccaggatgccctgaagagtttctccatagcctcagaccccacatcagtatcctcttgctacttggaggagcacgtgagcaaagaggctaaccatctaatcagcaagttccagaagctgatggcagaggttggccacttcgaaccagtcaaccaggtggtggaatcggtggctaaygtcatcggagccatgtgytttgggaagaacttcccyaggaagagcgaggagatgctcaacctcgtgaagagcagcaaggactttgtggagaatgtcacctcagggaatgctgtggacttctttccggtcctgcgctacctgcccaacccagccctcaagaggtttaagaacttcaatgataactttgtgctgtytctgcagaaaacagtccaggaacactatcaagacttcaacaagaacagtatccaggacatcacaggcgccctgttcaagcacagtgagaactacaaagacaacggtggtctcatccctcaggagaagattgtcaacattgtcaatgacatctttggagctggatttgaaacagtcacaacagccatcttctggagcattttgctacttgtgacagagcccaaggtgcagaggaagattcatgaggagctggacacggtgattggcagagatcggcagccacggctttctgacagaccccagctgccatatctggaggccttcatcctggagatctaccgatacacatcctttgtccccttcaccatcccccacagyacaacgagggacacctcactgaatggcttccacattcccaaggagygctgcatcttcataaaccagtggcaggtcaaccatgatgagaagcagtggaaagacccctttgtgttccgcccagagcggtttcttaccaatgacaacacggccatcgacaagaccctgagtgagaaggtgatgctcttcggcttgggaaagcgccggtgcattggggagatcccggccaagtgggaagtcttcctcttcttagccatcctcctgcatcagctggagttcactgtgccaccgggcgtgaaggtggacctgacacccagctatgggctgaccatgaagcccagaacctgtgaacacgtccaggcctggccacgcttctccaagtgaagatggccgagacatcggccgccacccttgttccttttcctttctttttaaataacagctttttcaagatacaattcctccaccatttaattcagctccaatcaattttcaatattgtctacactgttccctgcaaacccatacccattaagatttatgactattcctcctaccctgtttcgcttgctgtgccaygtgctaatctagtttttgactcaatagatttgccaactctggctgtttcatataaaaaaaaaaaaaaa

SEQ ID NO: 2034 - DNA, 4953 bp, Rattus norvegicus
cgccgcaccgcgcgcaccgcgccatgggggccgcgtccggccagcgggggcggtggccgttgtcaccgccgctcttgatgctgtcgctgctgctgctgctgctgctgccgccgtcgcccgccccggcgcttgaccctggattgcagccgggcaacttttccgcggacgaggcaggggcgcagctcttcgctgacagctataactcgagtgccgaggtggtgatgttccagagcaccgcagccagctgggcgcacgacaccaacatcacggaggagaatgcgcggctccaggaggaagcggccctgatcaaccaggagtttgcagaggtctggggcaagaaggccaaggagctgtatgagtccatctggcagaacttcactgaccaaaagctgcgaaggatcatcggatccgtacagaccctaggacctgccaacctgcccctgacccagcggctgcagtacaactctctgctaagcaacatgagcagaatctactccaccggcaaggtctgcttccccaacaagactgccacctgctggtccctggacccagagctcaccaacatcctggcttcctcacgaaactatgccaaggtgctgtttgcctgggaaggctggcatgatgctgtgggtatcccactgargcccctctatcaggactttactgccctcagtaatgaagcctacagacaagatggcttctcagacacaggagcctactggcgctcctggtatgagtccccctcctttgaagagagtttggagcatctctaccaccaagtcgagcccctctacctgaacctccatgcctttgtccgtcgcgcactgcaccgccgctatggggacaaatacatcaatctcagaggtcctattcccgctcatctgctgggagayatgtgggcgcagagctgggagaacatttacgacatggtagtgcctttcccggacaaacccaacctcgatgtcaccagtacaatggtacagaagggctggaatgccacgcacatgttccgggtcgcagaggaattctttacctcgctggggytctcccccatgcctccagagttctgggcggagtcgatgctggagaaaccagctgatggacgggaggtggtgtgccatgcctctgcgtgggacttctacaacaggaaggacttcaggattaagcagtgcacgcgggtcacgatggaccagctgtccacagtacaccacgagatgggccacgtgcagtactatctccagtacaaggacctgcacgtctctctgcgtcgaggtgccaaccctggcttccacgaggccatcggggatgtactcgctctctctgtctctaccccagcacatctgcacaaaattggcctgctagaccgtgttgccaatgacatagaaagtgacatcaattacttgctaaagatggccctagagaaaattgccttcttgccctttggttacctggtggaccagtggcgctggggggtcttcagtggacgtaccccaccctctcgctacaactacgactggtggtatcttcgaaccaagtatcaggggatctgcccaccagttgctcggaatgaaacccattttgacgctggggccaagtttcacatcccaagcgtgacaccatacatcaggtactttgtgagtttcgtgctacagttccagttccatcaagcgctgtgcaaggaggcaggccaccagggtccactacaccagtgtgacatctaccagtccaccaaggcaggggccaagctccaacaggtgctgcaggctggctgctccaggccctggcaggaggtgctgaaggacctggtgggttcagatgcgctggatgccagtgckctaatggagtacttccaaccagtaagccagtggctgcaggagcagaatcagcggaatggcgaggtcctaggctggccggagtatcagtggcgtccaccgttaccagacaactatccagagggaattgacctagagactgatgaagccaaggctaacaggttcgtggaggagtatgaccggacagccaaggtgttgtggaacgaatacgcagaggccaactggcattataacaccaacattaccatagagggcagcaagatcctgcttcagaaaaacaaggaagtgtccaaccataccttgaaatatggcacctgggccaagacatttgacgtgagcaacttccagaactctaccatcaagcggatcataaagaaggttcagaacgtggaccgggcagtgctgcctcccaacgagttagaagagtacaaccagatcctgctagacatggagacgacttacagtgtagccaatgtttgctacacaaatkgcacttgtctgtcactggagcctgatctgacaaatataatggccacgtcccggaaatacgaagaattgctttgggtgtggaagagctggcrrgacaaggtggggagagccatccttccctttttcccaaagtacgtggacttctccaacaagatcgccaagctcaacggctactctgatgcaggggattsstggagatcctcatatgaktccgaygacttggagcaagacctggaaaaactataccaggagctscagccrctctmcctramccwgcatgcctatgtgcgccgctccctgcaccgccattatgggtctgagtacatcaacctggatggtcccattcctgcycacctgctagggaacatgtgggcacagacttggtccaacatctatgacttggtggcacccttcccttccgcccccagtatagatgccacggaggccatgataaagcagggatggacacccagaaggatatttaaggaagctgacaatttttttacctccctggggctgttacctgtgccccctgagttctggaacaagtcaatgttagagaagccaaccgatgggagggaggtggtgtgccatgcctcagcctgggacttctacaacggcaaggacttcaggatcaagcartgtacctctgtgaacatggaggaattggtgatagcccaccacgaaatgggccacatccagtatttcatgcagtacaaagacttgcctgtgacctttcgggagggcgccaaccccggttttcatgaggctattggagatgttttggctctgtctgtgtctacacccaagcatctacacagtctcaacctgctcagcagtgagggcagtggctacgagcatgacatcaactttctaatgaagatggcccttgacaagatcgccttcatccccttcagctacctcattgaccagtggcgctggagggtctttgacggaagcatcaccaaggagaactacaaccaggagtggtggagtctcagactgaagtaccagggtctctgccctccagtgcctagatcccaaggtgactttgacccagggtccaagttccacgttcctgcgaatgtgccatacatcaggtactttatcagcttcatcatccagttccagttccacgaggcactatgtcgcgcagccgggcacaccggccccctgtacaagtgtgatatctaccaatccaaggaagcagggaagctgctggcagatgccatgaagttgggctacagtaagcagtggccagaagccatgaagataatcacaggccaacctaacatgtcagcctctgccattatgaattacttcaagccactgactgaatggctcgtcacagagaacaggagacatggagagacactgggctggccggagtacacctggacaccaaacacsrckmgkgcararggctccctcccaragtccagtcgcgtcaacttcctgggtatgtacctggaaccacagcaggcccgtrkgggccagtgggtgctgctcttcmtaggcgtcgccctgctggtggccaccgtgggtytsgcccacsgaytctacaacatccataaccatcacagcytccgccggccccayygtgggccccagtktggstccgaggtggagytcagacactcytgaggtgaccctgccgtcaagkccaacagaggagtgtcmcrwddaaaaaaaattakatgggggacatggtgtttgagtggaacatacccaagctgggcsttcttcctttgytgttcccatccaytytgccccccagcccagcccccattbtbtagatacccakcatstaacctgkaattccctgcccggtctctgtgaatacaattaawggtcctccccaamammwrarwmwrwrwmccttgtgggaagccagggacaggaccggytgcttgcctttctgtctaacagtccagcaggacccttacctgattaccttctcagtctttctccaagctctggaccctatccccagcaacctttcccaccagccttcctgagagaccaggakaggtggygtgtgtcctgcctacccatgcacctgccagggaggaacctaggaaacaggggaaggaagcaggtaccatgggctgcctcctgctttacatgcagattcactatggatggttcattctgttccacagtgatctctgtgtgaatggatgtctcarggggaaggccctggatgcccttycctgctacaggragagggccctggaagggtytgactcacagagcatcccagagcccagctggttcctaagtaracaggytgggttccacacaggttgtgcccagggaaagagcwttaatcagtgcccgcacagtgggttcactgttwcagcccmcctcctcatcccagaacacgtcccctcagcytaagccatcctttggaaggcctacatggattttgggggcgtcacttgaagtaactttttgtytacatatttatgtagtaaatttggaaaatytgaataaaaagtccatgatagcaacawmaaraaawawaagcattgttggcactttggtatcatccagccttttttattttatttaattttatttttctccacatacgatataaacgaggtaccactaaaaaaaaaaaaaaaaa

SEQ ID NO: 2035 - DNA, 3715 bp, Rattus norvegicus
ccctaagaacgaggaaccaaagtgggacccagcgctgggctccctcaaacaggacagaaagctgccccagtgactagtcctggaggttcctctccccaggaagctctgagaaccctccccgggagaggggacagcaatctgtaggtgggcaaggtagcaggaagggtaccgcttccctggatgcctggtctgggattccttccccaaatccatcccagagatttttctgcatcaggaggggaacagttgctatgctgactgggctgactatgggagctccaggggttctgggagaagtgaccctaaagcaagagggcatttggagagatgcgtgccaggggcttggaggagaaatgcatgtattttaggccgtgtctcagaaaaagaggcagcatccctgaaaagtgactagaattgacctggaagaggccatggactcagagtgtgcttaaaagccaatgctctccttggggaatgtagggaccagccgatgtcacagggacacactgtcacagggacagtgacctggagcaccaagcccagaagacagatgggaagcaggagagtctttaccccggcatggcttggattgctacggggaagctcctgatggaaccctaccatcctttagtccaggcagcaactggggctgaacaagaaggggctgggtggtgagtggttgggggaagtctggctaagcctggtcaagaacttgaggggcaagtccccggaagtgtgttccttctggaagatggctcctaacacttctaccatggatgaggccgggctgccagcggagagggatttctcctttcgcatcctcacggcctgtttcctgtcactgctcatcctgtccactctcctgggcaatacccttgtctgtgcggccgtcatccggtttcgacacctgaggtccaaggtgaccaacttctttgtcatctctttagctgtgtcagatctcttggtggctgtcctggtcatgccctggaaagctgtggccgagattgctggcttttggccctttgggtccttttgtaacatctgggtagcctttgacatcatgtgctctacggcgtccattctgaacctctgcgtgatcagcgtggacaggtactgggctatctccagccctttccagtatgagaggaagatgacccccaaagcagccttcatcctgattagcgtagcatggactctgtctgtccttatatccttcatcccagtacagctaagctggcacaaggcaaagcccacatggcccttggatggcaattttacctccctggaggacaccgaggatgacaactgtgacacaaggttgagcaggacgtatgccatttcatcgtccctcatcagcttttacatccccgtagccattatgatcgtcacctacaccagtatctacaggattgcccagaagcaaatccggcgcatctcagccttggagagggcagcagtccatgccaagaattgccagaccaccgcaggtaacgggaaccccgtcgaatgcgcccagtctgaaagttcctttaagatgtccttcaagagggagacgaaagttctaaagacgctgtctgtgatcatgggggtgtttgtgtgctgctggctccctttcttcatctcgaactgtatggtgcccttctgtggctctgaggagacccagccattctgcatcgattccatcaccttcgatgtgtttgtgtggtttgggtgggcgaattcttccctgaaccccattatttatgcttttaatgctgacttccagaaggcgttctcaaccctcttaggatgctacagactctgccctactacgaataatgccatagagacggtgagcattaacaacaatggggctgtggtgttttccagccaccatgagccccgaggctccatctccaaggactgtaatctggtttacctgatccctcatgccgtgggctcctctgaggacctgaagaaggaagaggctggtggaatagctaagccactggagaagctgtccccagccttatcggtcatattggactatgacaccgatgtctctctagaaaagatccaacctgtcacacacagtggacagcattccacttgaatattgggtcctcatctctgaggccacgagttcccttgggcttgctgttaaggaattaacaggagatccctctgctgcttttggacaattacgaagcttctcaaactcactgattccagtgtattctctagcttcaagggaaatgacttcggctctgaaatcagtttgggagtattatcttaggacattataaaacaacaacaaacaaacaaacaaacaaacaaataggccaagagtcaactgtaaacagcttcacttaaaaatcgaactttccagaaaggaagggtaggagttgagtttgctgtccaaacaggtgctaaaactgtccgagcagttttcagattggaaaggtaggtgcatgcctttgttaattaacttctccaataataattgagccttacagcaggagtgggattcctttttctcagaattgacagatgcattgttgatgacggttttatttatttatttattgtactatatgaatattttaaatttatcatagtgaatctatatttaacatatttaacagagcaaaccaatgtgttatctgagactgacctctccatttgtactagcactttatgagccaatgaaacatacgcgtagactctgagattctgaattgtgagttacttctgggaacacagcaaagactgatgtggtggctccttaactcgacaaggacacaaagaaacgcaagaggagaagtgactaatgccaccaatgctccccctaaaaagattttgaaaagattagtttttttttttttttaaaagaagctactattgtgttctgagtgttttaaatggcagaggctttccccggggcgaatttgcacttctgtaaatatctatgtaagaaccagctcaagaggaatacaactttatmwykmsgcttttggatrgcgaggaakagcatatgccactttgtatttatgtaaactaattggccctccttgtcatttctcatttcatgcttgaaatagctttctgaaacaaacaaatgactgtccaggctggagatctgcakggtggagaatgagttgtaaattcacaggtcacagcagyccctccgatagctgggctcatcattggtcctttatctgcccaggtctaaccaagtcggctgcttaaggggctacttttgtagtgctttaatccgaatttagtatcctctcttttaaaaaaaaaagctctttaawgttagtggtaaactagctaatgaacggtacctcatcgctgcataatacacttctgttggtgggggcgtagacgagcccttcccggtgcgagcaccacaaagccatctgcatagctagtcacaaatgctgtttttctttctctgtgggtttgaatctagtttccttgttatcatagcctggactgcaaaaagatccatccagtcccctcttgtgggggcattgcaacagtgtttctttttgtttttgttttgtttttgaaatgtttacaaggtgttctttggaagcagttgcaacacgtggatggaactgaagaaaaggctgactggcttgctaacggtatctcctgcagggggtttgtactgcggactttgaatgttttctcagctctaaggcttgtatgctttcttacatacaataaa

SEQ ID NO: 2036 - DNA, 2809 bp, Rattus norvegicus
cggaatcgagaaagagctatcaatctgtcaatcctgtcagtgccggagctggtcgcctcttgtgcgcasgcctcctgcccgccttcccgcctggtccccgcgctgcgctcccgtcctcccgccccgcctcgtcctgccccgccgcggccggtctactgctccccgcgggcccgagccggccgagcgsstgcccgccggggatctgaacgagtcatgcggcggggcssgaagccgagggacccgcggargggaccggcggccccggacggctgccggaggggcggccgtgcgtggatgcggcgggagctggaagcctcsagcagccggcgccttctctggccccgggcgccatatggcttgaagagccgtgccacccagtggccccactgccccaatggatccactgaacctgtcctggtacgatgacgatctggagaggcagaactggagccggcccttcaatgggtcagaagggaaggcagacaggccccactacaactactatgccatgctgctcaccctcctcatctttatcatcgtctttggcaatgtgctggtgtgcatggctgtatcccgagagaaggctttgcagaccaccaccaactacttgatagtcagccttgctgtggctgatcttctggtggccacactggtaatgccgtgggttgtctacctggaggtggtgggtgaktggaaattcagcaggattcactgtgacatctttgtcactctggatgtcatgatgtgcacagcaagcatcctgaacctgtgtgccatcagcattgacaggtacacagctgtggcaatgcccatgctgtataacacacgctacagctccaagcgccgagttactgtcatgattgccattgtctgggtcctgtccttcaccatctcctgcccactgctcttcsgactcaacaatacagaccagrrtgagtgtatcattgccaaccctgcctttgtggtctactcctccattgtctcattctacgtgcccttcatcgtcactctgctggtctatatcaaaatctacatcgtcctccggaagcgccggaagcgggtcaacaccaagcgcagcagtcgagctttcagagccaacctgaagacaccactcaagggcaactgtacccaccctgaggacatgaaactctgcaccgttatcatgaagtctaatgggagtttcccagtgaacaggcggagaatggatgctgcccgccgagctcaggagctggaaatggagatgctgtcaagcaccagycccccagagaggacccggtatagccccatccctcccagtcaccaccagctcactctccctgatccatcccaccacggcctacatagcaaccctgacagtcctgccaaaccagagaagaatgggcacgccaagattgtcaatcccaggattgccaagttctttgagatccagaccatgcccaatggcaaaacccggacctcccttaagacgatgagccgcagaaagctctcccagcagaaggagaagaaagccactcagatgcttgccattgttctcggtgtgttcatcatctgctggctgcccttcttcatcacgcacatcctgaatatacactgtgattgcaacatcccaccagtcctctacagcgccttcacatggctgggctatgtcaacagtgccgtcaaccccatcatctacaccaccttcaacatcgagttccgcaaggccttcatgaagatcttgcactgctgagtctgccccttgcctgcacagcagctgcttcccacctccctgcctatgcaggccagacctcatccctgcaagctgtgggcagaaaggcccagatgracttggccttctctcgaccctgcaggccctgcagtgttagcttggctcgatgcccctctctgcccacacaccctcatcctgccagggtagggccagggagactggtatcttaccagctctggggttggacccatggctcagggcagctcacagagtgcccctctcatatccagaccctgtctccttggcaccaaagatgcagcggccttccttgaccttcctcttgggcacagaaactagctcagtggtcgagcacaccctgatcgctggcttggcctggcccttgcttgcctgtgccrgatcaggtggtgggagggagcracagttcttactttataggaaccacataggaaagcagggaacacgccaagtcctccaggcaacatcagtgtcaggagacacacataaacaccaggtagctccatggaccccagagaaactgaggctgaaaaatctgttttccactccaactctagtgtgagtccctacttttcatagccatgggtattactatgtcctaccttgttatagtatcccatggggtttctgtaccstttgggggaaaacaactctaatcctcaagggccccaagagaatctgtaaggagaaaaataggctgatctccctctactctccaatccactccaccacttcttgatataccttggatgtatccattcctcacagcaaatgctggccagtcaggccttggaccagtgttggagttgaagctggatgtggtaacttggggctctttggggctgggggggttgttaacatcgtctctcttccatatctcttccttcccagtgcctctgccttagaagaggctgtggatggggtgctgggactgctgataccattgggcctggccctgaatgaggaggggaagctgcagtttggagggttctgggatccaactctgtaacatcactatacctgcaccaaaactaataaaaccttgacaagagtcaaaaaaaaaaa

SEQ ID NO: 2037 - DNA, 1385 bp, Rattus norvegicus
cgcgacgcttcgctccggtgaaggggccactttttgaagaccgcgctgagatctccaaaagccagaggcgatcagagcaaccagacaccatcctcttcgttttgcattgagttccatttgcaaccgagttttctttcttttttttttctttttttccctcctcttcttctgatccctttgcagaatggattattttcccgtgatcttctctctgctgtttgtggctttccaaggagctccagaaacagctgtcttgggagcagagctcagcccccgagctgagaaggaagtgcagagcccccctcccagcacatcctggagaccccgcaggtccaagcgttgctcctgctcctccttgatggacaaggagtgtgtctacttctgccacctggacatcatctgggtcaacactcccgagcgcgtcgtcccgtatggactaggaagcccttctaggtctaagcgatccttgaaagacttacttcccacaaagaccacagaccaagggaacagatgccagtgtgctcaccaaaaagacaagaagtgctggaatttctgccaagcagacaaagaactccgagcccaaagtaccatgcagaaaggygtaaaagacttcaagaagggaaaaccctgtcccaagctgggaaagaagtgtatctatcagcagctggtggagggaagaaaactaagaaggttggaggccatcagcaacagcatcaagacctcctttcgagttgcaaagttgaaagcggaactctacagagaccagaagttgatacacaaccgagcacattgactacagagccccgtggtgttttggaagccatgacttacatagagcgagccctatggccaactctgcgctctccatgctggctgggatcttagcaagaacatctgtccggcttctacagtttcttgttcagactggcagaggaccagcgtccttgttccaaacattccaagagaggttgaggtgttccctaacctgtcttcgtttgcatccgctggtagcaagtgattctcttgcctcttcttgctgtctggggatggcctcggacctctcggagagcagagacacagtgccattcctgagtggcatcatccagagagccaggagattccatagcagggcggagtttctgtagaaagtccttagggagtgttcgtgtctgactcaggcgcctggcacatttcagggagaaactccaaagtccatgcaaaaaattttctgaggaatgcacaaattgaaaacatactcgaaggacaaacacttgagtttttttttttttaaggacttttttttaagttgtaaaatgcaaaactcaaagcaactgttactactgtacattaggatatgtttcatgaatatgagtctacccaccttt

SEQ ID NO: 2038 - DNA, 1436 bp, Rattus norvegicus
gtgagaccaacataacaggacgtttcttcagatccacattaagatgggtgtcctttgctttctggcgtccttttggctggccctggtgggaggcgcaatcgctgacaatgctgagagatacagtgctaatctaagcagccacgtggaggacttcaccccttttccagggacagagttcgactttctgggcaccacccttcgaccccctaatttggccctgcctagcaatggctcaatgcatggctattgcccacagcagacaaaaatcacgacggctttcaaatatatcaacactgtgatatcctgtaccattttcatcgtgggaatggtggggaacgccactctcctaagaatcatttaccaaaacaagtgtatgaggaacggccccaatgcgctcatagccagcctggcccttggagaccttatctacgtggtcattgatctccccatcaatgtgtttaagctgttggcggggcgctggccttttgaccacaatgattttggagtgtttctctgcaagctgttcccctttttgcagaagtcgtccgtgggcatcactgtcctgaatctctgcgctctcagtgtggacaggtacagagcagtggcttcctggagccgggttcaaggaatcgggatccccttgattaccgccattgaaattgtctccatctggatcctttcctttatcttggccatcccagaagcaatcggcttcgtcatggtacccttcgaatacaagggcgagcagcacaggacctgcatgctcaacgccacgaccaagttcatggagttttaccaagacgtgaaggactggtggctctttggattctacttctgcatgcccttggtgtgcacagcaatcttctataccctcatgacctgtgagatgctcaacagaaggaatgggagcttgcggattgccctcagcgaacacctcaagcagcgtcgagaggtggcaaagaccgtcttctgcttggttgtcatcttcgccctgtgctggttccctcttcacttaagccgaattttgaagaaaaccgtctatgatgagatggataagaaccggtgtgaactgctcagcttcttgctgctcatggattacattggcattaacctggcaaccatgaactcttgcataaacccaatagctctgtattttgtgagcaagaaattcaaaaattgttttcagtcatgcctctgttgctgttgtcaccagtccaaaagcctcatgacctcggtccccatgaatggaacgagtatccagtggaagaaccaggagcagaaccacaacacagaacggagcagccacaaggacagcatgaactaaccctgtgcagaagcaccgagcagtgtgccttcgagtcccaggatgaaacggtcacgcagcagctgcgctcccaaaacctcccaggtctctcccctgctttttgtctaagctt

SEQ ID NO: 2039 - DNA, 3113 bp, Rattus norvegicus
cgcagaacttggggagccgccgccgcgattcgccgccgccgccagcttccgccgccgcaagatcggcccctgccccagcctccgcggcagccctgcgtccaccacgggccgcggccaccgccagcctgggggcccacctacactccccgcagtgtgcccctgcaccccgcatgtaacccggccaacatccggcgagtgtgccctcagtagcttcggccccgggctgcgcccaccacccaacatcagctctccagctcgcacgtccgggatggcagcggccaaggccgagatgcaattgatgtctccgctgcagatctctgacccgttcggctcctttcctcactcacccaccatggacaactaccccaaactggaggagatgatgctgctgagcaacggggctccccagttcctcggtgctgccggaaccccagagggcagcggcggcaataacagcagcagcagcagcagcagcagcagcgggggcggtggtgggggcggcagcaacagcggcagcagcgctttcaatcctcaaggggagccgagcgaacaaccctacgagcacctgaccacagartccttttctgacatcgctctgaataacgagaaggcgctggtggagacaagttatcccagccaaactacccggttgcctcccatcacctatactggccgcttctccctggarcctgcaccmaacagtggcaacactttgtggcctgaaccccttttcagcctagtcagtggccttgtgagcatgaccaaccctccaacctcttcatcctcagcgccttctccagctgcttcatcgtcttcctctgcctcccagagcccacccctgagctgtgccgtgccgtccaacgacagcagtcccatttactcagctgcacccacctttcctactcccaacactgacatttttcctgagccccaaagccaggcctttcctggctctgcaggcacagccttgcagtacccgcctcctgcctaccctgccaccaagggtggtttccaggttcccatgatccctgactatctgtttccacaacaacagggagacctgagcctgggcaccccagaccagaagcccttccagggtctggagaaccgtacccagcagccttcgctcactccactatccactatcaaagccttcgccactcagtcgggctcccaggacttaaaggctcttaataacacctaccagtcccaactcatcaaacccagccgcatgcgcaagtaccccaaccggcccagcaagacacccccccatgaacgcccgtatgcttgccctgttgagtcctgcgatcgccgcttttctcgctcggatgagcttacacgccacatccgcatccatacaggccagaagcccttccagtgtcgaatctgcatgcgtaatttcagtcgtagtgaccaccttaccacccacatccgcacccacacaggcgagaagccttttgcctgtgacatttgtgggagaaagtttgccaggagtgatgaacgcaagaggcataccaaaatccacttaagacagaaggacaagaaagcagacaaaagtgtcgtggcctcctcagctgcctcttccctctcttcctacccatccccagtggctacctcctacccatcccccgccaccacctcatttccatccccagtgcccacctcttactcctctccgggctcctctacctacccgtctcctgcacacagtggcttcccatcgccctcggtggccaccacctatgcctccgtcccacctgctttccctgcccaggtcagcaccttccagtctgcaggggtcagcaactccttcagcacctcaacgggtctttcagacatgacagcaaccttttctcctaggacaattgaaatttgctaaagggaatgaaagagagcaaagggaggggagcgcgagagacaataaaggacaggagggaagaaatggcccgcaagaggggctgcctcttaggtcagatggaagatctcagagccaagtccttctagtcagtagaaggcccgttggccaccagccctttcacttagcgtccctgccctccccagtcccggtccttttgacttcagctgcctgaaacagccacgtccaagttcttcacctctatccaaaggacttgatttgcatggtattggataaaccatttcagcatcatctccaccacatgcctggcccttgctcccttcagcactagaacatcaagttggctgaaaaaaaaaatgggtctgggccctcagaaccctgccctgtatctttgtacagcatctgtgccatggattttgttttccttggggtattcttgatgtgaagataatttgcatactctattgtactatttggagttaaattctcactttgggggagggggagcaaagccaagcaaaccaatggtgatcctctattttgtgatgatcctgctgtgacattaggtttgaaacttttttttttttttgaagcagcagtcctaggtattaactggagcatgtgtcagagtgttgttccgttaattttgtaaatactgctcgactgtaactctcacatgtgacaaaatacggtttgtttggttgggttttttgttgtttttgaaaaaaaaattttttttttgcccgtccctttggtttcaaaagtttcacgtcttggtgcctttgtgtgacacaccttgccgatggctggacatgtgcaatcgtgaggggacacgctcacctctagccttaagggggtaggagtgatgtttcaggggaggctttagagcrcgatgaggaaragggctgagctgagctttggttctccagaatgtaagaagaaaaatttaaaacaaaaatctgaactctcaaaagtctatttttttaactgaaaatgtagatttatccatgttcgggagttggaatgctgyggttacctactgagtaggcggtgacttttgtatgctatgaacatgaagttcattattttgtggttttattttacttcgtacttgtgtttgcttaaacaaagtgacttgtttggcttataaacacattgaatgcgctttactgcccatgggatatgtggtgtgtatccttcagaaaaattaaaaggaaaataaagaaactaactggtt

SEQ ID NO: 2040 - DNA, 926 bp, Rattus norvegicus
acagacatccacggacacaccatgatcaggacactgctgctatctgccttggtggctggagctctcagctgcgggtaccccacttatgaggtccagcatgatgtgagcagggtagttgggggtcaagaggccagtcccaacagctggccctggcaggtctccctgcagtacctttcctctggaaagtggcaccacacctgcggaggctccctggtggccaacaactgggttctgaccgctgcccattgtatcagcaactctaggacctaccgcgtgctgctgggccgacacagcctctccacctcggaatccggctcactggctgttcaggtctccaagcttgtggtccatgagaagtggaacgctcaaaagctctccaacgggaatgacattgccctggtcaaacwsgmkrgcccagtggccctgaccagcaagatccagacggcttgcctcccacccgctggtaccattctgccaaacaactacccctgctacgtcacaggctggggccggctgcagaccaacggagccactcctgacgtcctgcagcagggccgtctgctggttgtggactatgccacctgctccagcgctagctggtggggaagctccgtgaagaccaacatggtgtgcgctggtggcgacggtgtgacctccagctgcaatggggactccggcggaccactgaattgccaggcatctaatggccagtggcaggtgcacggtattgtgagctttggctccactctgggctgcaactacccccgtaagccatctgtcttcaccagggtctccaactacatcgactggatcaactcggtgattgcaaagaactaagcaaaggcatctctgtgactgtcaccttgggaacgcacggaagggacacagtaataaagtgacttacgaattacaaaaaaaaaaaaaaa

SEQ ID NO: 2041 - DNA, 1732 bp, Rattus norvegicus
ggcgcttagtgctgctccggtascgagtcgcgctcacgtttgtccttaagamtcccttcggtgtctccasgaccctctttccttcctccgmagcgatcctactgccagaacttcaccatgtccattctcaagatccatgccagagagatctttgactcccgcgggaatcccaccgttgaggtggatctctacaccgcaaaaggtctcttccgtgctgcggtgcccagcggtgcgtccamtggmatctasgaggccctagaactccgagacaatgmtaagacccgcttcatggggmmgggtgtctcaaaggctgttgagcacatcartaaaactattgmacctgctctggttagcamgaaactgawtgttktggagcaggagaagattgaccasmtsatgatcragatggacggcacagagaataaatctaagtttggtgcaaatgccatcctgggagtgtccctggctgtctgcaaggctggtgccgtggrgaagggggtgcccctttaccgtcacattgccgacttkgccggcaaccctgaagtcayyctgccggtcccagctttcratgtgatcaacggcggttctcatgctggcaacaagttggccatgcaagagttcatgatcctgcctgtgggggcatcctctttccgggaagccatgcgcattggagcagaggtttaccacaacctgaagaacgtcatcaaagagaagtacgggaaagacgccaccaatgtgggtgatgagggtggattcgcacctaacatcctggagaacaaagaagcactggagctgctcaagtctgccattgcaaaggccggctacactgaccaggttgtcatcggcatggatgtggctgcctccgagttctacagggctggcaagtatgacctggacttcaagtctccagatgatgccagccggtacatcacacccgaccagctggccgacctgtacaagtccttcatcaaggactacccagtggtgtccattgaagatccctttgaccaggacgactgggatgcttggcagaagttcacagctactgcaggcatccaggtggtgggggatgacctcacagtgaccaaccctaagcggatcgccaaggctgcaggcgaaaagtcctgcaactgcctcctgctcaaagtgaaccagattggctctgtgaccgagtctctgcaggcgtgtaagctggcccagtccaatggctggggtgtcatggtgtcccatcgatctgrgsagaskgaggacactttcattgccgacctggtggtggggctctgcactgggcagatcaagactggtgccccctgccgatctkagcgcctggccaagtacaatcagatycttagaatcgaggaggarctgggcagcaaagccaagtttgccggcaggtccttcaggaaccccctggccaagtaaggcatggaccggagatccctggagctaccagatcctctgtctccgtcatccaggcggctcaaggctggcccagtgcttgcccctcccatgtcactgcttccttagatgtccaccccgaccacctggagccctgctggagcccccagctttgtaatcatgtgatcagtctgaatcattgtttctgtcacctgactttccagctagtgtctggagccctctgaactccagcgtaatctctagagtgcccacaccatcaagactccccccagtggtttacttgcaaaaataaaagctgcagaagctcaaaaaa

SEQ ID NO: 2042 - DNA, 6468 bp, Rattus norvegicus
gagactacaacatcaaaatgaaaattccccaaagagactgtttagtttgtccaattctacagacatatagtccaaaattcttttccttgctgcttatttgggcgtgtgaacgtatagttgcttcatcagctggttccttaaagcttttcccaggctctgaagtgtatgttcttgtcatttggaggtcagcattgttttctcataccttgcagaaacacagctggacagcaacagtctgttctttcaaaaaaccaaaccaaaacaaaacaaggattatcacatacacatattttcctctggtcacccaagaaggtggagatgggagatgtgaccaagacccagagattgacactctattgctgtcccaccccacccgcctgatttgtttgggaatccgtacactgctaaggctccaaggggcaaacatgcttagctaaagtcagcaggtgtgaatagtttactggagcagagtacagttgcaggcaagtgtagcagttcacatgcttagaaatcaggaaacagtactaagaatagctttccctgaggtctctcaggacgatttattacgttgtcttttattcaaaggtagatgtcaataccttgctggcttcagctacacttacggtaccatgccttggaagatttgttcatttataccaactatctcgatgtataatggctatcagcggcaaattatctatcggtttcactcatcttgatatatatatatatatatatatatatatatatatatatatatatatatatatatatataacagataattaaaacacagttacaagttctgattcccttggctatccaggagctttggaactttgagtctttgggatcttcaataggcatggttctgagctagtgaagccgattgaggtttctgttcagcaatgctgtccttgccttgcccatccattccacgggtgggattctgagtcacgtctaggctggaatcctcgcaggaccccccccgctgtggaagcccccccgcacgcgcccctcgttgcgcacccacgcctcatgtcctgtgtgtcaagcttagctttgtgaatgaatgatgtacacgcacttggaaaactattctgctactggagcggggcctgagcgggtgaccaagcctctaagaatgcgtgcagaatcagacggactttcccgagactctgcacgccagcgacccgctcgccagccattctccggagcggtgggccgaggctctggcccggcgcgcgcagagtagctggagcgcgccgccccgccaggctcgcccgcccttcctttcgcttttggaacgcgggtgatgattggctgcaggcgctaggccccgccccgccgccccatccccgccgcccggtcgagtgggcagggcaggcgctggggatcctgggcctggagctcggtgaggaacgccctaaagcggaggcgagmmtwckgcrcsaggcgccggccagccgagagagtgagcrmgmgsccgggacagaggagcgagcgggcgaggcgcgggcgaggctgggacccaagckcgctctctgctccgccaagtgccaacttcgcgcsgactggctgggcgcgcacctttctgccgggcgatcagcgggaatttgagattttagggctgcgctctgtccccttcccctgagttcaaaatccctattaaaaagcaaaacaacagttacagcaaacttgctctcatcccgccggscccctcaactccggcaccatgaaggcggccgtcgatctcaagccgactctcaccatcatcaagacagaaaaagtggatttggagcttttcccatccccggatatggaatgcgcagatgtcccactgttaactccgagcagcaaagaaatgatgtcccasgcactgaaagctaccttcagtggtttcacaaaagagcagcagcgactgggaatccccaaagacccccggcagtggacagaaacccatgtccgggattgggtgatgtgggctgtgaatgagttcagcctgaagggtgtggacttccagaagttctgtatgaatggagcagcactgtgcgccctgggtaaagaatgcttcctcgagctggctccagactttgtgggggatatcctgtgggagcatctagagatcctgcagaaagaggatgtgaaaccgtatcaggttaatggagtcaaccctacctacccagaatcccgttacacctcggattacttcattagctatggtatcgagcatgctcagtgtgtccctccctcagagttctcagagcmcagcttcatcacagagtcctatcagacgctgcatcccatcagctcggaagaactcctgtccctcaagtatgagarcgactacccttccgtcattstscgggaccctctccagacagacwccttgcagacagactrctttgccatcaagcaagaagtgttaactccagacaacatgtgcatggggagagccagtcgtgktamactcgrgggccaggactcttttgagagcatagagagctacgatagttgtgaccgtctcacccagtcctggagcagccagtcatctttcaacagcctgcagcgtgtcccctcctatgacagcttcgactccgaggwctatcccgctgccytgcccaaccacaagcccaagggcaccttcaaggactatgtgcgtgaccgtgctgacctcaacaaggacaagcctgtcattcctgctgctgccctggctggctacacaggaagtgggccgatccagctgtggcagtttcttctggaattactcactgataagtcttgtcagtcttttatcagctggacaggagacggctgggaattcaagctttccgacccagatgaggwsgccaggagatggggaaagaggaaaaacaagcctaagatgaattatgagaaactgagccgcggccktcgctactattacgacaaaaatatcatccacaagacggcgggcaagcgctacgtgtaccgctttgtctgcgacctacagagcctgctgggatacaccccmgaggagctgcatgccatgctggatgtgaagccggatgctgatgagtaacggacacggaaggggytgggggggaccgctgagacctttcaaagaacaacccgtgttggttggactcttaatttttaattgttattctatgttttattttccagaactcatttttcacattcaggggtgggagctaagggagttgcagccacattccattggccattggcaaggccggaaagggaaagtcaggacctgtggggtgggtggggcaagaagttcctgaggagatttttcaggagcgagagggtcttctcagaagccgagcgacttgacttacagaggaaaaggtttatgtgtccagtattctgtttgcaatcaaaggaaagagttcatcttgagttgtggatcgactagcaggaggaattgtcacgttaagatgaaagtcagtcagcgttggtgggtgggaggaaaacagtttcttcaggggatgactaaacgcaagaatttattaacctttctactttttttgaaacaaagatggactttaatggaagggatccaaaactgtttttattgttgaagtttattttattaaattctgtgccagtattttttttcttaaaaaaaawmrwmwwaagctctaaggtggtctcagtattgcagtattgtgagttcgttgtaatttgctggctgaggagtctcccacaatgaaaggcagctgtttatatagaccccatggaaaaatccaagtctgtactgagaacagagacccccgaactcttacagctaaaggacgtgaatgctgatttggggaccagggaactgtgtgaattccacctgcggtttgtaaaacaacatttccagtccttttacttactgtcaggctgcgggcttagtgttagttaaggggcattaagtctttgcactgaatgtatttttgcagctctgctttggaactgttgtcagcataggtgcactgtttaagtcttggaaaagaaatcgaaggaggaagttgaacctggtttttggttaaatcgctacccgaaacatagaagactcaaactaaatgctgtttgcatgggcattacccctcggatcttaaggcctaaatgcatgccgttccaaactaacattgtacaatttctcctttatggcttatttccccagttcaccacattgctgcccctccccaccttactaatcagtagagtggaatgtaatgtttcctgataggtgaatgaaagtgtaatttcagacatcacagcacaaatcaaagagtacagactttctagggttcagagagcatggaaacgaggaggctatttcaggagcatgggacatggcctcctttgggaagaggctttcctttgaagaattggagcttgtcaggtaggatttcaggtgaggctgtttgcagatgaagtggtagagagcactgggacttcgagcttgacctgttgctacctcggcagagttaagcgaaagtcagctgcggatgagaggaawrcttgatggagggaatacaacggcaggagctaagwacggagaataaggtggcccgtgacagtgaggtatagttttactttcctcaaagtttaaattcaaagacttaatcgaggcagccatcttcctgccagttgagagaggagactggaaagtaaggcattgtgggtaaaaamaamrwrrggaaacatgcctggtatcattagaatccctcccactgtttaccacgcctagttgagacagcgacwgtggacttccatgagagaaaagaggcagttggttgaggtggacctctccaggctcacccttcggggattgtaactacctggtatcatcttcatgagagttgatggctgactcccagattcccttgaagactctgaattcctgcgaacataacttgtccatgggtgttctgtactgaccgattggagcatccccaccggaagcaaaggcaaaacatcccagctctatgttttgatcttaacaaatgcaggtgccttaatgaagctctcaaagtatttaggagctgctcagggagtgttaggtgggatcatttggattatgttgtttttctcttatattatgtgatctttgttgggcactggcagtgtgtgtgtgtgtgtgtgggtgtgtgtgtgtacatttgtataagcctgcagctgaaatagtactgacttttctacttaagtctgtccacatttccataacggcgaaagagtacatacagccagggctgatktcatttctcgctctttgcaacagggcttaaataaaaaaaaawtmamwwmmmcaarwmrwmrwmmwwrmmmctattcagttcatgctgaaaacgcccctctcgagagcctaccgcctgcagccagtagcagataagacgtaagaaagtgcctcccacacggctcagcttgctgacttgcttctccccaggtccaccactttcaggatttgtagataggatattagtcagcttggtggtccatctggccagacgctctttcccatgctgtccaaaggccagagaccatcccaggaagagtggcgggtggtttatacactggaaatgtagcggcattgctgcattgatgctctacaaaaacacgttcacttcagaggaaggatgagcacakctgatccagctgggtggctccattgttttcccagagagatgctttaacctgtgcggttggcttttggctcaragctcaggggaataaggatgctccctgcatagagctctgaccgttgcgccatggaaaccagtggaagcactctagatcagagacactcttcctcactttggagatcaacactctgggttttaaagcwttaaccttcatggtgaaatcacaccttctctcttctagccatgctgtgcatgccgctttctctgtcggggggtctctataaatktgttgaactcttacgtacattccaaagaagtttcaaggaaccacaagtatatgtatacaaatacatatatgaagtatatatgttaaawtgraattatctctatcaggaatackgcctcagttaattgaattttttttaaggawacttttttttaagcggagaattattggggtktaaaagatgttatattgkgtttgmmtattttccagcttgtattttcacataatttawatttyttaaatgctgaaaatttaaaagcgagatttaaaaaggaaaagcaggkgctttttttttaaaaaaargaatcagaactgaggtagcttagagatgtagccatgtaagtgtcttaaatgttttgtttttaaaaaaaaaacaaatgcaaaaaaattcttmtgggggagttttttgtttgtttcttttmgtagctgatgctggcacattttgctggaaagttttttatatactgtagcctgatttcatattgtaytttaaactgtgctcgwrmykaawkvgacaaagaaattcattcataaaaaaamaaaaaaaaa

SEQ ID NO: 2043 - DNA, 569 bp, Rattus norvegicus
cackwrkttcaaaacagaggtaactttattgtattaattttatactgtaaaagaatatgaaatacagccttgtctaaattctcttgctgactctcttgtagacgatgtcacccagtgtcatggtattggtgattgtgtctccattgaattcagtcacggactttatgcctttgaaagttgtcaccattttattgtcaccctccatcttaaccactgccttgaccttttccccagtcatggtmtccagttcgcactcctcccccaaggtgaactcattgtgratcaccttggacccataggtgatggtgagtttgactttcttcccttcatgcacgatttctgacacccccttgatgtcyttccctttstggatgaggtcctcaggcagacccatcgccttcatgaagggctcaaagttctcktggctctgcacttggtacttgccggagaagttcatggtggcaatgaggtttcctttcccagctgccaccaacagctctgtctgtcaggccacccactgttggctattttataaggggcttcttcctccccaaaaaaaaaaaaaaaaa

SEQ ID NO: 2044 - DNA, 2816 bp, Rattus norvegicus
ggcggccgctccgggacgcgcccgcgcgctgcccggctctcccccccttcgggctgccgctgctgctgctgtgactgctgcggcgcgaggaggaggaggcagcgggggagggggaggccgggcgcggaacggagcggggcgctgcaccccgggcgacgggttgcttctgcctctagcttctctctctctctctctctctctctctctctctctctctctctctctctctctctctctctctaattcttgaggggtggttgcagcttttgctacatgccttgccagcgccggagcctgcggtccaactgcgctgctgccggagcgctcagtgccgccgccgctgcccgctccccccgctccccactccgaacccgccggtcgctcgccgcgctgctgctcggctcctgcgccgccgccgtcgccgccccccgacgcctgggtgatgctggacatgggagataggaaagaggtgaaaatgattcccaagtcctcgttcagcatcaacagcctggtccctgaggccgtccagaacgacaaccaccacgcgagccacggtcaccacaacagccaccacccccagcatcaccatcatcatcaccaccaccaccacccgccgccgcccgcgcctcagccgccgccaccgccgccccagcagcagcagcagccgcccccggccccgcagcccccgcaggcgcgcggcgccccagcagcggacgacgacaagggcccccagccgcttctgctcccgccgtccgccgccctggacggggccaaggctgacgcacttggagccaaaggcgagccaggcggcgggcctgcggagctggcgcccgtcgggccggacgagaaggagaagggcgcgggcgctgggggggaggagaagaagggggcgggcgagggcggcaaggacggggaggggggcaaggagggcgacaagaagaacggcaagtacgagaagccgccgttcagctacaacgcgctcatcatgatggccatcaggcagagtcccgagaagcgmmtkmsgcwcrasggcatctacgagttcatcatgaagaacttcccttactaccgcgagaacaagcagggctggcagaacyccatccgccacaacctgtccctcaacaagtgcttcgtgaaggtaccgcgccactacgacgacccgggcaagggcaactactggatgctggacccgtcgagcgacgacgtgttcatcggcggcacgaccggcaagctgcggcgccgctccaccacgtctcgggccaagctagcctttaagcgcggggcacggctcacctccaccggcctcaccttcatggaccgcgccggctccctctactggcccatgtcgcccttcctgtccctgcaccaccctcgcgccagcagcactttgagttacaacgggaccacgtcggcctaccccagccaccccatgccctacagctccgtgttgactcaaaactcgctgggcaacaaccactccttctccaccgccaacgggctgagcgtggaccggctggtcaacggggagatcccgtacgccacgcaccacctcacggccgctgcgctcgccgcctccgtgccctgcggcctgtcggtgccctgctccgggacctactccctcaacccctgctccgtcaacctgctcgcgggccagaccagttactttttcccccacgtcccgcacccgtcaatgacttcgcagaccagcacgtccatgagcgcccgggccgcgtcctcctctacgtcgccgcaggccccctcgaccctgccctgtgagtctttaagaccctctttgccaagttttacgacaggactgtccgggggactgtctgattatttcacacatcaaaatcaggggtcttcttccaaccctttaatacattaacatcccggggaccagactgtaagtgaacgttttacacacatttgcattgtaaatgataattaaaaaataagtccaggtattttttattaagcccttccccccatttctgtacgtttgttcagtctttagggttgtttactattctaacacggtgtggagtgtcagcagcgaggtgcaatgtgggagaatacattgtagaatataaggtttggacgtcaaattatagtagaatgtgtatctaaatagtgactgctttgccatttcattcaaacctgacaagtctatctctaaaggctgccagatttccatgtgtgcagtattataagttatcatggatctatctggtggacgcaggccttgaagaacaacctaaattatgaagagagttttaaaatgttaaactgtaatttgtatttaagaatttgtagtaaaggtgcccaagaaattatattggccatttattgttttgtccttttctttaaagaactgtttttttccttttgtttacttttagaccaaagattggattctagcaaatgcacttggtatactaagtattaaaacaagcaaacaaacaaacaaaaaaaggaaggttgtttagtttggcaacactgcccattcaattgaatccgaaaggacaaaattaaggattgccttcagtttgtgttgtgtatatttcgatgtatgtggtcactaacaggtcacttttattttttctaaatgtagtgaaatgttaatacctattgtacttataggtaaaccttgcaaatatgtaacctgtgttgcgcaaatgccgcatcaatttgagtgattgttaatgttgtcttaaaaattcttgattgtgatactgtggtcatatgcccttgtttgtcacttacaaaaatgtttactatgaacacacagaaataaaaaataggctaaattcatatat

SEQ ID NO: 2045 - DNA, 1966 bp, Rattus norvegicus
gggcgtgcggggtcgagccgaagcagcttgcccgcagccactcggaggcgaccagcgccagactagcagaacccatggcatctccgggctctggcttttggtccttcggatctgaagatggctctggggatcctgagaacccgggaacagcgagagcctggtgccaggtggcccaaaagttcacgggcggcatcggaaacaagctatgcgctctgctctacggagactctgagaagccagcagagagcggcgggagcgtgacctcgcgggccgccactcggaaggtcgcctgcacctgtgaccaaaaaccctgcagctgccccaaaggagatgtcaattatgcacttctccacgcaacagacctgctgccagcctgtgaaggagaaaggcccactctcgcatttctgcaagatgtaatgaacattttgcttcagtacgtggtgaaaagttttgatagatcaactaaagtgattgatttccattaccccaatgagcttcttcaagagtataattgggaattggcagaccaaccgcaaaatctggaggaaattttgacgcactgccaaacaactctaaaatatgcgattaaaacagggcatccccgatattttaatcagctgtctaccggattggatatggttggattagcagcagattggttgacatcaacagcaaacacgaacatgtttacctatgagatcgcccctgtatttgtactactggaatatgtgacactaaagaaaatgagggaaatcattggctggccaggaggctctggcgatggaatcttttctcctggtggtgccatctccaacatgtacgccatgctcattgcccgctataagatgtttccagaagtcaaggaaaaggggatggcggcggtgcccaggctcatcgcattcacgtcagagcatagtcacttttctctcaagaagggagctgcagccttggggatcggaacagacagcgtgattctgattaaatgtgatgagagagggaaaatgatcccatctgaccttgaaagaagaatccttgaagtcaaacagaaaggatttgttcctttcctggtgagtgccacagctggaaccactgtgtacggggcttttgatcctctcttggctgtagctgacatctgcaaaaaatataagatctggatgcatgtggatgctgcttggggtggagggttactgatgtctcggaaacacaagtggaagctgaacggtgtggagagggccaactctgtgacatggaatccccacaagatgatgggtgtccccttgcaatgttcggctctcctggtcagagaggagggactgatgcagagctgcaaccagatgcatgcttcctacctctttcagcaagataagcactatgacctgtcctatgacacgggagacaaggccttgcagtgtggacgccacgtcgatgtctttaaattatggctcatgtggagagcaaaggggactactggatttgaagctcacattgataagtgtttggagctggcagagtatttatacaatatcattaaaaaccgagaaggatatgaaatggtgttcgatgggaagcctcagcacacaaatgtctgcttctggtttgtacctcctagtttgcgagttctggaagacaatgaagagagaatgagccgcctctcaaaggtggcgccagtgattaaagccagaatgatggagtatgggaccacaatggtcagctaccaacccttaggagataaggtcaacttcttccgcatggtcatctcaaaccctgcagcaactcaccaagacattgacttcctcattgaagaaatcgaacgcctgggacaagatttgtaatcactttgctcaccaaactttcagttctctaggtagacagctaagttgtcacaaactgtgtaaatgtatttgtagtttgttccagagtaattctatttctatatcgtggtgtcacagtagagtccagtttaaaa

SEQ ID NO: 2046 - DNA, 2407 bp, Rattus norvegicus
cgccctgaccccgcagaactcagagtaaccgagggtccaaacatccgaccagcggctggccaccatgccgcgctcattcctggtcaagagcaagaaggcgcacagctaccaccagccgcgttctccggggccggactactccctgcgcctggagaccgtgcctgtgccgggcagagcagacggcggcgctgtgagtgcaggagagtcgaagatggagccccgagagcgtttgtcccccgagtctcagcttaccgaggctccagacagagcctccgcgtcccccaacagctgcgaaggcagcgtttgtgacccgagctccgagttcgaggactactggaggcccccttctccctctgtatctccagcgtcggagaagtcgctgtgtcgctctctggacgaagcccagccctacacgctgcctttcaagccctacgcgtggagcggcctcgcggggtctgacctgcggcacctggtgcagagctaccggcagtgcagcgcgctggagcgcagcgctggcctgagcctcttctgcgagcgcggcgcggagtccggccgcccggccgcgcgctacggctcggagcaggctgcgggcggagcgggtgcgggacagcctgggagctgcggagcagccagcggcgccaccagcgctgggggcctggggctctacggcgacttcgcgcctgcggcggccgggctgttcgagcggccgagcacagccgcaggccggctgtaccaagatcgcggccacgagctgcacgcggacaagagtgtgggagtcaaggtggagtccgagctgctgtgcacccgcctgctgctgggcggcggctcctacaaatgcatcaagtgcagcaaggtgttttccacaccgcatgggctggaggtgcacgtgcgccggtcccacagcggcacgagaccctttgcgtgcgagatgtgcggcaagactttcgggcacgcggtgagcctggagcaacacaaggccgtacactcgcaggaacgcagctttgactgtaagatctgtggcaagagcttcaagaggtcatccacactgtccacacatctactcattcactcggatacccggccctacccctgtcagtactgtggcaagaggttccaccagaagtcagacatgaagaaacacactttcatccacacaggtgagaagccccacaaatgccaggtgtgtggcaaagccttcagtcagagctccaacctcatcactcatagcagaaagcacacaggtttcaagccctttggctgtgacctgtgtgggaagggcttccagaggaaggtggatctcaggaggcaccgagagactcagcatggactcaaatgagtaccctggcagtctgcaacaccaactgtctaacactactgtgagggatgtcttccctgcctccctccagccccttctcaggccctgagtccagtgtgcaaagctcatcttggttattccccttcgtcttccttcccggagctcctggaggagatgaactcctgtttctaaggtcagcccagtgtgggatccacagaaatcgtttgtgctttgggcttccctacagctgaagccgggaatcaaatgagatcttgcacctcccagttcttcccttttctgcccttctcacaggcggggaagaactctgggcagctgctaaaaggggaggcatcaccgcttgaactttggacaccaccgatgcttttattgagaaagactgacctttctggggagactgctgacctctttgtcctccaccagacaccggtttagggaaggaaagtatccctttgaaatcatcagaagcaccatcaggcctgccaggagaaggagcaggaaaaggcggacttggcgatgagagggagtcagaggtcccgtggagccaatcagagtgggtgaaacggcagaggagcagctcctctcagaggaacgggctcctcttttactcagcgcgtggttgttggccacaggttatcagagtaaaaaaccgcattaggtatgggagagccagaggttaaaatcgacgctcctaacccccaaaagctatcagtaggaccccaacatagctagaacccgtgttctccgcctccaagggagttctgaaaaaggccacacaaacattcgaacttctttttgacacttctggagtttttcaagcgtaaacgaaacagaactggagagttatttcaaaaattcatgagcaaatccagtttttattgttaggtggaattttataagatgcccaagctggcaggtgtggagcaaaggctgtggcctcaactgccgccccttatcatctaggaagaacgcatttcctgtgcgggtgtaaatgtttctaaatctcctgagtgcattgtgaactagcataatcatatttattagaatgttgttttaacttaataaagtattaag

SEQ ID NO: 2047 - DNA, 3875 bp, Rattus norvegicus
ttttttttttttttttttcacaccaagcagagtttattgatgccgtgggcggggcccacgtacacagcaggtggcgcacgcagggcagatactcactggctggactgcaggggtgttagcagcggcaaaagcagatgacctgtggggagcaccctttggggggtgccctcctcctagcarcattgggggctttgggtgagcatcaagaaccacctaktcaccctaaggttctcttggwagcccctccccctccttcccgagctccttgtgagttgggggctaggatcycttcctgtgatcaaaggtgggatgatyccttgagattcactataaaaattaaaattcatttataaatcacaagagaagggcaggagggaacaccggggaaacctgacttcatcggttaccttgagcctactcccctccctcaggttctaactccaaaagagagagcaaagagctaggtsyacaggcacagaaaggkgcsmkmgwsagaggaaaggcagtcggaagaacgggacgagagaggaaaaagatgcatcggaagaaaagtatggctgctgaggctcctctccccaacagctcccgaaagccatgacctggggataaaggagaaaagttcccagcccagagactcctacaaggtaaggttccaaatgtccccgatccggtccttgctcaagccatggcgggccttgagatactcagagctgtgtggatgggagctgagggaggcgagtgctactccaggtagatatcttctgtggggcaggcgaatgccaggtgctcctggtagtactccaggaaggcccggcccacgctccttgccactggcctcatagactcctgggacacaaagacgtggcaggcaaagcggcttagcagcgggtgtttggtaatgaagccaaaatagcagctgtttcggggatgacagccacagaaggagatgttcttcatctggaaaaagtggctgcaacgccctggtttgacctgaccatgatgcccaagactggcactttttgttttttctcagcaaactgtacaaccccaaatctctttttgattttcaaggaaactagattcctgccagaatttgagtctggacaataaatagacactttgtcctagtcttctttctggaatcatttcgggatattttccacaagcatcacggaaacaggaatgaaccggcagctagtgaacattttgacagccttgtttgcatttttcttagggacaaaccacttcagggaagcattctgcaaagaccatgactccaggtctggaaaacatccctcgcagaccctgtctccttcagatttcttggataaactaatgggaaggacatcaggatatgatgcaagaatcaggccaaattttaaaggtcctccagtaaacgttacttgcaatatttttatcaacagttttggatcggtcacagaaaccaccatggactaccgagtgaacatttttctgagacagcagtggaacgattcacggctggcatacagtgagtacccagatgattccctggatttggatccatcgatgctggattcgatttggaaaccagatttgttctttgccaatgagaaaggagccaatttccatgatgtcaccactgataacaagttgctgcggatttccaaaaatggcaaagtgctctacagtattagactcaccttgactttatcctgtcccatggacctgaagaactttccaatggatgtccagacctgtacaatgcagctggagagttttgggtacaccatgaatgacctgatatttgagtggttaagtgatggtccagtacaagttgctgaaggactcaccctgcctcagtttattttgaaagaagagaaggaacttggctattgcacaaagcattacaacactggcaagtttacctgcattgaggtcaagtttcacctggaacgccagatgggctattatttgatccagatgtatatccccagcctgctgatagtcattttgtcctgggtctccttttggataaacatggatgcagctcctgccagggttgcccttggcatcacaaccgtcctgacaatgactacccagagttcaggttccagggcatctctgccaaaggtctcatatgtgaaagcaattgacatctggatggcagtgtgccttctgtttgtgtttgctgccttactggaatatgcagcagtgaactttgtctccaggcaacacaaggagttccttcgtctccggagacgacagaagaggcagaataaggaagaagatgttactcgtgaaagccgttttaacttcagcggttatgggatgggtcactgcctccaagtgaaagatggtacagctgtcaaggctacacctgccaacccacttccgcaacccccaaaagatgcagatgctatcaagaagaagtttgtggatcgggcaaaaagaatcgacaccatatctcgagctgccttcccactggccttcctcattttcaacatcttttactggatcacatacaagatcattcggcatgaagatgtccacaagaaatagatgtatcctattgaccctgggaccttctttgcctaagtgttgtgcttgtaaatacacagtaatagtgtctttatattgctttgacagagaacattgagggtggggggaggaaaatcatgagggtggggtttctggcacctacatgacaaaggacaggttctatgggcaaggaagaaaactgcacaaaattaaggtgttgcagaatcacatgagcataactcccatccatagtctatagcattgttctttcagaggacacatcactcagacatgatatgcaaggtcaagttcttgagggctggttatcttatggtttgatttgacaagttctggttctgaaaggttagtttaatgcacacacacacacacacacacacacacacacacacacacacacacacagaaaatgcttaccatctgacaatagtgactaccatatagtaaattgaggaccaaactttttcaggaaaatgctgcctcatttttaaaacaagcctcctgagctatgatatttacaatgtctgtaattagtgtttcacccaagaaatccttttgtgggttgtaaattctttctacaaatccaggaaacaacaacaagataaacacaaatgactaagagcagatttctactctgctgtctgtgtaggtgtgcactttgatattatttttctttcctagatataatgtgggggcttccttgtgtattgcgtaattgatttactggtatatcctcttaaaagaaatgctcattttattttagatcaagttagcatattatgtatattttttcactttggctatacttatgtgtgactttaagtgcccaagtgtaatttagctattgcagctgctatgccacagtatttatggagacggtgtgttgtgattggtgtatctcagagtagctcaaacttcccatttctgccctcattgtagctgtaactactagtcctaatgttgactgacctgtaatttgtactttcaatccaagtgaatatcgttttaaatatccttgattaactgaaaaaaattcaaactgtactgtgattttcataacccgttgccttttcggtatcagagctacgtggtttgaatcctggctacatgttttaagtaagaaaaaaaatatgtatttttgcttactcaaaagacaacctgtaaagttatatggaaataattacattttacatgtgctgtaaaagggattattttaaaaaagcatttgttcagtttcaataaaggtaagtgtgccaccaaaaaataattcccatgttgctggtggtggtagttgttgaatagctgttggcattggtgaaaaaggagctggaactggc

SEQ ID NO: 2048 - DNA, 4922 bp, Rattus norvegicus
  misc_feature (4653)..(4653): n is a, c, g, or t
aagctttagactctgggtagaatgttctgtttcctgtaatataaaatcataaagtgatgatattatcaagtgaaaaggaaatgtggtaccttaatctttccacatcaagccaatatcatgctgaaggccagagaatcttttttgctaaaaaacacaatacagatataattaatagttatcatttatgtttgatattaatcatatgaatataattaatatgttttattgtatcgattattgttgatattaatgtaattactactaatacataacaaatataactaatggttatggctcagtaactaaggtaagatataagctacactggtaaagaaagatcaatattgcttcagagtacactgaagtaaatgaataacttaaccggtctaggttgtcacttatatttatacaacattttaagaactaagaacctctcttctatgcttagtagatgaacaaaatcatgtaatagatgaatgaggccaggaagtacaaaggtttacaaaattgccaagccactctggggtgattttatgagtaatgcggcatttggtagcttgccttaaagaatattattggacattatcaagtgtgtgtgtgtgtgtgtgtgtgtgtgtgtgtgtgtgtaactgaactctcttgtagtttcatttttgtttgaaaaagacatgtatctcatgtagcccaggctggaatcaaactctatccttctgtctccacctctcaggttctggggttcctggcatgcagcacccaagcccagctacctctgtgaaaactataacttagtaatcagatcctggaccatttaaagaatatatatatatgtatgtgtgtgtgtgtgtatatatataatatatacatatgtatgtatatatacatatatatgtatgtgtatatatgtatgtatagagaggctgactatatatatatatatatatatgaggctgaatatatatatatatatgaatacacatacacatagtgccatggcacattcctttaatctgagctctcaggcaaaggcagaccaatctctgagttgttcaaggccagtgtgatccatagtctcagaaattatatactgagacactcctgaggatgttatcacatttctagtttccttatcttactttaggacatgattccaaaaaaaaggggggggggacacacagtcaatggtagagttacaagactatgccgatgtggtgactcaagaagagagggctgagggagctgaaacaggcatgttcccatgaattccgggcaagcctaggctatagagtgagaccaccatgatttaaaaaaaaaaaaaaagtggcacgcgagaaagtcaacaatgctttgcataagtgttttacctcaaaatcgctgaatagttgactagaacaaattaaaaccttgtccaaagtcaaggccagtgggatcagggactccctccagtcctgaagcttctagatttcccgtccctcaacagcccgattccggatgagtctggactcctccaacgcctcggcggcttcagctccgcgccactctccggccggccgcatagcggccggcacaccattccggcccagagaggaaaggaggggcctggagactcacgcggcytgggctgctggccagccctcgaggcctccctgcagtcagcttctacctaataggccgccgcgcgtgcacagggggaccgaccttccgggacgcggacgcatcttagagctctcaggagcccgtgcctccggcccgcgaccggcgcgcgcccccgctagccccgcccccgcgagcatgcgcaccaagcccacctgcgagtgcgcgccgccgacgccgacgccgcacgcgccgacgcctggaggcctggcgaggcgcggccgaggcaagacccagcgccctgcggcgcgcggcmgccgaagtccgtcctcccggtggggcgacaagcggcgcaggggaggggacagccagacaagcaggaagctgcggcttaaaagggcagctcgcgcccagcccttcctcccgcagtccaggcctgcaagctctgatcttctgtgctcccgccgctctcgcctcagcccgccgccatgtaccgccgtctgggcgaagtgctgctactgtcccgcgccgggcccgctgccctgggctctgcggctgcagactcagccgcactgctgggctgggctcgcggacaaccctctgctgtcycgcaacccgggctcacgccggtcgccaggcgccactacagcgaagsssycaccgaccgcgaagacgaccccaacttcttcaagatggtggagggcttcttcgaccgcggcgccagcatcgtggaggacaagctggtggaagacctgaagacccgggagaacgaggagcagaagcggaaccgagtgcgcggcatcctgcggatcatcaagccttgcaaccatgtgttgagcctctccytycccatccggcgcgacgacggctcctgggaggtcatcgwarghtaccgggcccagcacagccagcaccgcacgccctgcaagggaggtatccggtacagcactgacgtgagtstggatgagstgaaggcrctggcgtccctaatgacctacaagtgtgcagtggwtgatrtgccatttggaggtgstaaagcaggcgttaagatcaatcccaagaamtatacagataatgawttagmaaagawtacacgaagattcmccrtggagctggcaaagaagggttttattggtcctggcattgatgtgcctgccccagacatgagcacgggcgagcgggaratgtcctggatcgctgacamctatgccagcaccatagggcactatgatatcaatgcacacgcctgygtcactggtaaacccatcagccaaggaggcatccacggacgcatctccgctactggccggggtgtttttcatgggattgagaacttcatcaatgaagcttcctacatgagcatcttagggatgaccccggggcttggcgataagacgtttgttgttcagggatttggtaatgtgggcctgcactctatgagatatttacrtcgtttyggtgctaagtgtgttggtgttggagaatctgatgggagtatatggaatccagatggtattgacccaaaagaactggaagatttcaagttgcaacatggatcaattctgggcttccccaaagccaaggtctatgaaggaagcatcttggaggctgactgcgacattttaatycctgcagccagcgagaagcagttgaccaaatccaatgcacccagagtcaaagccaagatcattgctgaaggagccaatggcccaaccactccagaggccgrtaagrttttcctagaaagaaacatcatggttattccagatctctacctgaatgctggaggagtgacagtatcttactttgagtggctaaagaatctaaatyacgtcmrctrtkgccgawtgaccttcaaatatgaaagggactcgaactaccacttgctcatgtycgttcamgaragtttaragagaaagyktggaaagcacggcgggactatmcctgkggtccccacagcagagttccaggacagaatatygggtgcatctgagawagacatcgtgcactctggcttggcctacacmatggagcgatctgccaggcaaattatgcgcacagccatgaagtataacctgggattggacctgagaacagctgsctacgtcaatgccattgagaaagtcttcaaggygtacawtgaggctggcgtgaccttcacatagacaggtcacagytgactkctttaccwccctcttcacctataatttctgcagasswgtcacaagtttacatgtwaccacagaaatctgttcytrwgactcattrrwtaatggacactgttctcaacaagtcagttggmatcagccccttaagagaaagattaasttagcggwtcatgtaccarctgatggtgtaaaggtaggaatcacgtgtatcctgccagttaggtgtttcgcttttaagtaaagtttctgctcctggccatgctgccttgctctggactcttcccaacagggttagtgctgttgccasggaaggcagtcaagagtcagtcacttcctgacaagtctgggtacttgagcacataakaagtasgsgtgtggcatttgcaaaggtggcatggtcttcgagtgagttattgctgctttacatcagcaaaataactcagtctctaagtcgcaaacaaataaaagctatttctcatgtawwwwawwmwwwmaraawaaaccagttcatgctgctgtaataaaawwrmmwwmamccamwwaarmmwaamcwwtactcaagcagtgaacgcytaaaatataggaaatgraaraagctagtttttatamcataaaacagtataatttagcttatcggccytgcagcatagtccagcagaawtaaagtagcacctgggggcaggsgtacytgcaagtgacacgggagggacacttgggaacttgttatgcagtcmagagagtgaagtaaccacttymccaatttggagawswattmkgwygagkaattgaaccatacttcaaatagagtgtcccagaagaaaagastggctccctgyttggaggmtggcagacttcagactcagcstgtrtgtcccttcwccaaggytttgccgtntacacagcacctcghtatccrcaggbtggagactgcctggggttgayttctgtttggggakttactggccagggcttttgaacaggagtgttccacagaagtaccagacattatttatwtaagaatgagcgcttctttttaacrktaccctttcaraaatttytaahtactttgtaactscatgattaacttggtgataaaagcagttattaaaagtytaccttttccrraarrmraarrmarraaaaamamwwwrmrrmckcawgctt

SEQ ID NO: 2049 - DNA, 6560 bp, Rattus norvegicus
cggccgcagccatcagccctggagatgaccaggagcggccactgctgagaactatgtggagagaggctgcgagccctgctgcagagcctccggctgggatagccgccccccgtgggggygatgcggacagcgcgggacagccaggggagcgcgckggggccgcagcatgcgggaacccgctaaaccyggtggctscwgmggygsccgagatgctcgtgcgcgcagcrcgccccaytgcatcctcsaccttctcsggctacagggaccstmagtggcgacyatgggcagaktgggctaytggaccytgctggtrytgccggsccttctggtctggcgcgatccggcgcagaacgcggcggcggagaagggtcctccagcgctgaacattgcggtgctgctgggtcacagccacgacgtgacagaacgcgaacttcgaaatctgtggggcccagagcaggcaaccggcttgcccctggatgtgaacgtggtggcgttattgatgaaccgcactgaccctaagagcctcatcacgcatgtgtgcgacctcatgtccggggcgcgcatccacggcttggtgtttggagatgacacggaccaggaggctgtggcccagatgctggattttatctcctcacagacttttatccccatcttgggcattcatgggggtgcatctatgatcatggctgacaaggatccgacatccacgttcttccagtttggagcctccatccagcagcaagccacagttatgctgaagatcatgcaggactacgactggcacgtcttctccctggtcaccaccatcttccctggctaccgagacttcatcagctttatcaagacaacagtggacaacagctttgtgggctgggatatgcagaacgtgatcacactggacacctccttcgaggacgccaagacgcaggtccagctgaagaagatccattcttctgtcatcctgctctactgctccaaagacgaggctgtcctcatcctgagcgaggctcgctccytcggcctcactggctatgatttcttctggattgtccccagtttggtgtctgggaacacagagctcatccccaaagagtttccatcaggtctcatttcagtctcttatgacgactgggactacagcctggaggcaagagtgagagacggtcttgggatcttaaccactgccgcatcctccatgttggagaagttctcctacattcctgaggccaaggccagctgctatgggcaggcagagaagccagagaccccgctacacaccctgcaccaattcatggtcaatgtgacttgggatggcaaggacttgtccttcactgaggaaggttaccaggtgcaccccaggcttgtggtgatcgtgctgaacaaggaccgggagtgggaaaaggtgggcaagtgggagaaccagacgctgagcctgaggcacgctgtgtggccaaggtacaagtccttttctgactgcgagccagatgacaaccacctcagcattgtcaccttggaggaagcccccttcgtcatcgtagaggacatagaccccctgactgagacctgtgtgaggaacacggtgccctgtcggaagttcgtcaagatcaacaattcaaccaacgaagggatgaatgtgaagaaatgctgcaaggggttctgcatcgacatcctcaagaagctgtccagaactgtgaagttcacctatgacctctacctggtgaccaatgggaagcatgggaaaaaggttaacaatgtgtggaatggaatgataggtgaagtggtctatcaacgagcagtcatggctgtgggctcactcaccatcaatgaggagcgttcggaagtggtggacttctcggtgcccttygtggagacaggaatcagcgtcatggtctccaggagtaatggcactgtctccccttctgctttcctcgaacccttcagtgcctccgtctgggtgatgatgtttgtgatgctgctcatcgtctcagccattgctgtcttcgtttttgaatacttcagtcctgttggatacaacagaaacttagccaaagggaaagctccccacgggccttcttttactattggaaaagctatatggctcctctggggcctggtcttcaacaattctgtgcctgtccagaatcctaaaggcacaaccagcaagatcatggtgtcagtgtgggccttctttgctgtcatcttcctggccagttacacagccaacctggctgccttcatgatccaggaggagtttgtggaccaagtgactggcctcagtgacaagaagttccagagacctcatgactattctccacctttccgatttgggacggtacccaatggaagtacagagaggaatattcgtaacaactacccstatatgcaccagtacatgaccagattcaaccagaggggagtggaggatgccttggtcagcttgaaaaccgggaagttggacgctttcatctatgacgcagccgtcttgaactacaaggccgggagggatgaaggctgtaaactggtgaccattgggagcgggtacatctttgctascacaggctatggaattgcgctgcagaagggctcaccctggaagaggcagattgacctcgctctgctccagtttgttggtgatggtgagatggaggagctggagacactgtggcttacgggcatctgccacaacgagaagaatgaggtgatgagtagccagctggacatcgataacatggcgggcgtgttctacatgctggctgcagccatggccctcagcctcatcaccttcatctgggagcacctcttctactggaagctgcgcttctgcttcacaggcgtgtgctctgaccggcccgggctgctcttctccatcagcaggggcatctatagttgcatccatggggtacacattgaagaaaagaagaaatctccagatttcaatctgactggatcacagagcaacatgctaaagcttcttcggtcagctaaaaacatctccaatatgtccaacatgaactcctcaagaatggactcacctaaaagagctactgacttcattcaaagagggtcacttattgtggacatggtttcagacaagggaaatttgatatattcagacaacagatcctttcaagggaaggacagtatatttggagacaacatgaatgaactccaaacatttgtggccaacaggcacaaggataatctcagtaactatgtgtttcaaggacagcatcctctcactctcaatgastccaaccctaacacagtagaggtggctgtcagcactgaatccaaagggaactcccgaccccggcagctttggaagaaatccatggagtctctacgccaggattctctaaaccagaacccagtctcccagagggatgagaagactgcagagaatcggacccactcgctaaagagtcctaggtatcttccagaagaggtagcccactctgacatttcagaaacctcaagccgggccacatgccacagggagccagataacaataagaaccacaagaccaaggataacttcaaacggtcaatggcctctaagtatcccaaggactgtagcgatgttgaccgcacctacatgaaaaccaaagcaagttctcccagggataagatctataccattgatggtgagaaggagcccagcttccacttagatcctcctcagtttgttgagaatataaccctgcctgagaatgtgggcttcccagatacctaccaagatcacaatgagaacttccgcaagggggactccacactgcccatgaacaggaacccattacataatgaagacgggcttcccaacaatgaccaatataaactctatgccaagcactttaccttgaaagacaagggttccccacacagtgagggcagtgatcgataccggcagaactccacacattgcagaagctgcctttcgaatctgcccacctactcaggccactttaccatgaggtctcctttcaagtgtgatgcctgtctgcggatggggaatctctatgacattgatgaagaccagatgcttcaggagacaggtaacccagctactcgggaggaggtctaccagcaggactggtcacagaacaacgccctccagttccagaagaacaagctaaggattaaccgacagcactcctatgataacattctggacaaacccagagagatagaccttagcaggccctcccggagcataagcctcaaggacagrgaacggctactggagggcaacttgtatgggagcctgttcagtgtcccctcaagcaaactcttggggaacaaaagctcccttttcccccaaggtctggaggacagcaagaggagcaagtctctcttgccagaccacgcctcygatartcctttcctccacacgtatggggatgaccaaygcttagttatcgggagatgtccctcggacccttacaaacactcattgccatcacaggcggtaaatgacagmtatcttcggtcatccttgaggtcaacagcatcatattgctccagggacagtcggggccacagtgatgtgtatatttcagagcatgttatgccttatgctgcaaataagaataccatgtactctacccmcaggkttktaaattcctgcagcaatagasgagtgtacargaaaawrmmwarwawmraatctgatgtttaagatcttccatcagtatttatctataaggaaacatatagaatggccaacattatagagggtaaatgttggatgtccgatagcaccctactaggaggaagagggtacagggaggtactttttgttggctcttttgcacatggctccatgccataatcttccactcaaggaatcttgtgagatatgtgctgagcacagcatataccacgtaggtgaatccttaaccaaaaacaaataaatacacatgggcaagtctcccagacatggcgactgggcacggcggcaataatggtgcatcagacggcgatggtgacattgtggttgcctatattccaaattccatgaagatcaatccaccatgtaacttcccccatcagaaatgcctcacagtttctctaatacagaataagcaatatggtatgcatgtaagtctgacgcagacaataagacagttaagaatgcatctgcactgtagtaagattgacatgtgcaaggattaagaagtttggcttgtaacagttctcagatttcttgttatgccttccatgacaaccctggatcagtcccccttaaactccaggttcgcccccccccccaaagaatagcaaatcagcgtgtttgtggcacccacactactttcattgtaggcttcccccaagacacacctggaacaaatagccccagggactctcaggtggagaactgtaagaatctctttggatgttaatgtgtgtgtatctctcaccctcagcttcattggtcttgttcggagctgcataaacacttttatgtcttcgatatctaagtgtggatcttctgtctatgacataatggctgttgtagttaatcttgaagactcatgtacgtaagtctgcatttcctcccttctggtgatgactcagggttgtatagtatctcttacctgacccctcccagagtaacgtaacttgttctgtccccagacagccatgatggtgtctaactagctgtgtgttgtgttcctagagttskkmaygwggtgacatgtgccagcagccatgtgtaatctgtaagaagtcccatgctatctgtgtgtccaaggmtagcatggttttacatttatgtccctcaaagtcaggaaactcttagacaattatttctatacaaacctcctcaaatcaaaagccttcagacatcagccacttgtgtgtccccccccaagcacccttccaactgtggataaactcagtaaaacaagggatttctatcctctgaaatgtacaccttcttggaggtgaatttcttccccagcaccaacagaaaccaatgagaagtcttcaacgcatttgtcatttctgagctgcctgcattgtcctattcttggcccactgagcctgtgcatatatgacagracagatactckkagwytarrmarrrawrwawwrwtgatgcaggccaccagtcccttttcttcttctttttcagtctggtctcactaagttatccaaactggtcttgaacctgccttatagcctagggcctataaggtcacaggccagtctaccagcacatgtgagcagtagcactctgctgccgcgaggtgttagtcagggagtgtgtgacacgccacagattttttttttttttttttttttttggagctggggactgaacccagggccttgcggttgctaggcaagcgctctaccactgagctaaatccccaacccccacgccacagattttgaagcagtagatacggcaaggggagagagaggcaaaggagaacttgggtatcagttcaggattgggaatctaacctcacgcctgtccacagctcctgtccctatcgagcctcagatctgccaggccgcctgtgcagtgatgaagctgtcatttgacgaggaag

SEQ ID NO: 2050 - DNA, 5382 bp, Rattus norvegicus
gctgaagactccttaaatatatatatatatatatatattcgggctactaacctcacatgcacatgggataatgactctggattctgcattgtgagctgctctccacaccctgagatcccctcttacattacattttttcctttgaatttgcatctcgtcaagacacaagattaaaaccaaatttacactacactggattttaaattttcttccgttcctttatcctccgtctttcttatgtggatatgcaagcgagaagaggaccctggatattcccaacatgctctctcccttaatctgtccgcctagaggtttggcgtctacaaaccaagagagccgactagctgaagatgaagcccagcgcagagtgctgttcccccaagttctggttggtgttggccgtcttggccgtatcaggcagcaaagctcgttcccaaaagagcccccccagcatcggcatcgctgtcatcctcgtgggcacttcagacgaagtggccataaaagacgcccacgagaaagatgacttccatcatctctcagtagttccccgggtggagctggtagccatgaacgaaactgacccaaagagcatcatcacccgtatctgcgatcttatgtctgaccggaagatccagggggtggtgttcgcggatgacaccgaccaagaagccatcgctcagatcctcgacttcatttctgctcagactctcacccccatcctgggcatccatgggggctcatctatgataatggcggataaggatgagtcctccatgttcttccagtttggcccgtctatcgaacagcaagcttccgtcatgctcaacatcatggaagaatatgactggtacatcttttccatcgtcaccacctacttccctggctaccaggactttgtgaacaagatccgcagtaccatcgagaacagcttcgtgggctgggagctcgaggaagtcctcctgctagacatgtctctggacgatggcgactctaagattcagaatcagctgaagaagctccaaagccccatcattctcctttattgcacgaaggaggaagccacctacatttttgaagtagctaactcagttgggctgactggctacggctacacgtggattgtgccgagtctggtggccggggatacggacacggtgccttcagagttccccacggggcttatctctgtgtcttatgatgaatgggactatggccttcctgccagagtgagagatggaattgccatcatcaccactgctgcctcggacatgctgtccgaacacagtttcatccctgagcccaagagcagttgctacaacacccacgagaagaggatctaccagtctaacatgttgaataggtatctgatcaatgtcacttttgaagggagaaacctgtccttcagcgaagatggctaccagatgcatccgaagctggtgataatccttctgaacaaggagaggaagtgggagagggtggggaaatggaaggacaagtccctgcagatgaagtattatgtgtggcctcggatgtgtcctgagactgaggagcaagaggatgaccatctgagcattgtcaccttggaggaggcgccatttgtcattgtggaaagcgtggaccctctcagtggaacctgcatgaggaatacagtcccgtgccagaagcgcatcatctctgagaataaaacagatgaggaaccaggctacatcaaaaaatgctgcaaggggttctgtattgacatccttaagaaaatttctaagtctgtgaagttcacctatgacctttacctggtgaccaatggcaagcacgggaagaagattaatgggacctggaatggcatgatcggtgaggtggtcatgaagagggcctacatggcagtgggatcactaactatcaatgaagaacggtcagaggtggttgacttctctgtacccttcatagaaactggcatcagtgtcatggtatctcgcagcaatgggactgtgtcaccttctgccttcttagagccattcagcgctgacgtgtgggtgatgatgtttgtgatgctgctcattgtttctgcggtggctgtctttgtctttgaatacttcagccctgtgggttacaacaggtgcctagccgatggcagagagccaggaggcccatctttcaccatcggcaaagcaatttggttactctggggtctggtgtttaacaactccgtacctgtgcagaacccaaaggggaccacctccaagatcatggtgtcagtgtgggccttctttgctgtcattttcctggccagctacactgccaacttagcagccttcatgatccaagaggagtatgtggaccaggtttctggcctgagtgacaagaagttccagagacctaatgacttctcaccccctttccgctttgggactgtgcccaatggcagcacagagaggaatatccgtaataactatgcagaaatgcatgcctacatgggaaagttcaaccaaaggggtgtagatgatgcattgctctccctgaaaacagggaagcttgatgcattcatctatgatgcagctgtgctcaactacatggctggaagggacgaaggctgcaaactggtgaccattggcagtggcaaggtctttgcttctaccggctatggcattgctatccaaaaggactccgggtggaagcgccaggtggacctggctatcctgcagctgtttggagatggggagatggaagaactggaagctctctggctcactggcatttgccacaatgagaagaatgaggtgatgagcagccagctggacatcgacaatatggcaggtgtcttctatatgttgggggcagccatggccctcagcctcatcaccttcatctgtgagcatctgttctattggcagttccggcattgcttcatgggtgtctgttctggcaagcctggcatggtcttctccatcagcagaggtatctacagctgtatccatggggtagccatagaggagcgccaatccgtgatgaactcccccactgccaccatgaacaacacccactccaacatcctacgcttgctccgcacggccaagaacatggccaacctgtctggagtaaacggctcccctcagagtgccctggacttcatccgccgagagtcctccgtctacgacatctctgagcatcgtcgcagcttcacgcattcagactgcaagtcttacaataacccaccctgtgaggaaaacctgttcagtgactacattagcgaggtagagagaacatttggtaacctgcagctgaaggacagcaatgtgtaccaagaccactatcaccatcaccaccggccacacagcatcggcagcaccagctccattgatgggctctatgactgtgacaacccacccttcaccacccagcccaggtcaatcagcaagaaacccctggacatcggcctgccctcctccaaacatagccagctcagcgacctgtatggcaagttctctttcaagagtgaccgctacagtggccacgacgacttgattcgatcggatgtctccgacatctccacgcacactgtcacctatgggaacatcgagggcaacgcagccaagaggaggaaacagcagtataaggacagtctaaagaagcggccagcctcggccaaatcgaggagggagtttgatgaaatcgagctggcctaccgtcgccgaccaccccgctccccggaccacaagcgctacttcagggacaaagaagggctccgagacttctacctggaccagttccgaacaaaggagaactcgcctcactgggagcacgtggacttgactgacatttacaaagaacgcagtgacgacttcaagcgagattcggtcagtggaggtgggccctgtaccaacaggtctcacctcaaacacggaacgggcgagaagcacggagtggtaggcggggtgcctgctccttgggagaagaacctgaccaatgtggattgggaggaccggtctgggggcaacttctgccgcagctgtccttccaagctgcacaattactcctcgacggtggcagggcagaactcgggccggcaggcctgcatcagatgtgaggcctgtaagaaggctggtaacctgtacgacatcagcraggacaactccctgcaggaactggaccagccggctgcccccgtggctgtgacatccaacgcctccagcaccaagtaccctcaaagcccgactaattccaaggctcagaagaagaatcggaacaaactgcgccggcagcattcctacgacaccttcgtggacctgcagaaggaggaggccgccttggccccacgcagcgtgagcctgaaagacaagggccgattcatggatgggagcccctacgcccatatgtttgagatgccagctggtgagagctcctttgccaacaagtcctcagtgcccactgccggacaccaccacaacaaccccggcagcggctacatgctcagcaagtcgctctaccctgaccgggtcacgcaaaaccctttcatccccacttttggggatgaccagtgcttgcttcacggcagcaaatcctacttcttcaggcagcccacggtggcaggggcgtcaaaaacaaggccggacttccgggcccttgtcaccaataagccagtggtgtcagcccttcatggggctgtgccaggtcgtttccagaaggacatttgtatagggaaccagtccaacccctgtgtgcctaacaacaaaaaccccagggctttcaatggctccagcaatggacatgtttatgagaaactttctagtattgagtctgatgtctgagtgagggaagagagagaggttaaggtgggtacgggagggatagggctgtggsccgcgtggtgcgcatgtcatggaaagagtcgggggtgaacttggctcccattcgctttttcttcttcttttaatttctctatgggatcctggagttctggttccttactgaaggcaaccctcgtgsmcagcaccatttctcctccctcgcgcagttctctccttcccgcatctgtccaccattcctgtttccatgagagaatagaacggggcctcagtgtgggaggatggagaggagaccaaagcgctgcctgtgtgcttctttctagcgcagaagggctcttagcagttcactttgagcgaggctttcctgatgctgctctctttgttcaggtgaggaagcgaaggtgttctgaggaaggccattgaacctcctgttcataagagagaagaggctttcactgaattcttgccgcgtggttgacatctgcagagggaccatgtaccgagcagagggcaggaagtcattgtgtatatataagccaaaaagataaataaaaatcttcttcagctccaaaaaaaaaaaaaaaaa

SEQ ID NO: 2051 - DNA, 4685 bp, Rattus norvegicus
caatcgggcaggggcaagagcagagccgaggctgggtttgaccagagcgcggggagttggaaaggagacagagctccgagagcaaaaaaccagctatagcagttggtgagctggtccctgctgggtacctgctgcttccaccgacccccaccctcattggggatttccccagacgctgcccccaacgtcttggttcccctcagctctgcgtgctccaaaagaagggtggtaggaaaaggccacgggagagcctgcgctccggtgccctgggccctggaagcaccrgttggcagctgtggtctcttggggcttcaaccaggacccccgacggctgagaggagaagcccaagcctttggctgcggaaggctttttgtgcttggcctaggaagaacgggcaggaacaaaggcacgataaggacagcttaccattcgaatagcagggggaggttctctcttctctgtcctctggctgtgtggtctctggcccttcccttcttctgtttgtccatctacctctctctatgcctgctctggtttctctgcaggaccctccagkkgacatgggtggggccctagggcccgccctgctgctyacttcactccttggtgcttgggcaaggctgggcgcagggcagggagaacaggccgtgactgtggcggtggtgtttggcagctctgggccactgcagacccaggcccggactcgtcttacctcccagaacttcctggacctgcctctggagatccagccactcaccgtaggggtcaacaataccaatcccagcagcatcctcacccaaatctgcgggcttctgggtgccgcccgtgtccacggcatcgtctttgaggacaacgtggacaccgaggccgtggcccagctactggacttcgtctcctcccagacccacgtgcccatcctcagcatcagcggaggctctgctgtggtcctcacccccaaggagccaggctccgccttcctacagctgggcgtgtccctggagcagcagctgcaggtgctgttcaaggtgctggaggaatacgactggagcgcgttcgcggtcatcaccagcctgcatccgggccacgcgctcttcctcgaaggcgtgcgcgccgtcgcggacgccagctacctgagctggcggctgctggacgtgctcacgctggagctaggtccgggtgggccgcgagcgcgcactcagcgcctgctacgccaggtcgacgcgccggtgctggtggcttactgctcccgtgaagaggccgaggtgctcttcgctgaggctgcacaggctggcctggtgggacccgggcacgtgtggttggtacctaacctggcgctgggaagcaccgacgcaccccctgcagctttcccggtgggcctcatcagtgtggtcaccgagagttggcgccttagtctacgccagaaggttcgcgacggagtggccattctggccctcggtgcccacagctaccgacgccagtacggtaccctgccagccccggctggggactgccgaagmcacccgggacccgtcagccctgctagggaggccttctacaggcatctgctgaatgtcacctgggagggccgagacttctctttcagccctggtgggtacctggttcggcccaccatggttgtgatcgccctcaaccggcaccgcctctgggagatggtgggacggtgggaccatggagtcctgtacatgaagtatccagtatggcctcgctacagcacttctctgcagcctgtggtggacagccggcacctgacagtggccacactggaagaaaggccctttgtcattgtggagagccctgaccctggcacaggtggctgtgttcccaacaccgtgccctgccgcagacagagcaaccacaccttcagcagcggggatctaaccccctacaccaagctctgttgtaagggcttctgcatcgacatcctcaaaaagctggccaaggtggtcaagttctcctacgacttgtacctggtgaccaacggcaaacacggcaagagggttcgtggtgtgtggaacggcatgatcggggaggtatactacaagcgggcagacatggccatcggctccctcaccatcaatgaggagcgctctgagattatagatttctctgtgccttttgtggagaccggcatcagtgttatggtatcaaggagcaacggcaccgtctccccctcagcttttctggaaccctacagccctgccgtgtgggtgatgatgttcgtgatgtgtctcacggtggttgccatcactgtcttcatgttcgagtacttcagccctgtcagctacaaccagaacctcaccaagggcaagaaacctggtggaccatctttcaccattggcaagtccgtgtggttgctgtgggcactggtcttcawcaactctgttcccatcgagaacccccggggtaccaccagcaagatcatggtcctggtgtgggccttcttcgctgtcatcttcctcgctagctatacggccaatctggcggccttcatgatccaggagcaatacatcgacactgtgtcrggccttagtgacaagaagtttcagcggcctcaagaccaatacccacccttccgttttggcacggtacctaacggcagcacagagaggaacatccgtagcaactaccgtgacatgcacacccacatggtcaagttcaaccagcgctcggtggaggacgctctcacaagcctgaagatggggaagctggaygccttcatctatgatgctgctgtgctcaactacatggcgggcaaggacgaaggctgcaagctggtcaccattgggtctggcaaagtctttgccaccactggctatggcattgccatgcagaaagactcccactggaagcgggccatagacctggcactcctgcaacttctgggggatggagagacgcagaagctggagacagtgtggctctcagggatctgccagaacgagaagaatgaggtgatgagcagcaagctggacattgacaacatggcgggggtcttctacatgctgttggtggccatgggactggcccttctggtctttgcctgggagcacctggtctactggaaacttcgacactcggtgcccaactcatcccagctggacttcctgctggctttcagcaggggcatctacagctgcttcaacggggtacagagccttccgagtcccgcacggccgcccagcccggatctcaccgcagactcagcccaggccaatgtgctgaagatgctgcaggcggcccgagacatggtgaacaccgcggacgtgagcagctctttggaccgcgccactcgcaccatcgagaactggggcaacaaccgccgcgtgcctgctcccaccgcctctggcccgcggtcctccaccccgggtcctccgggacaaccgagccccagcggctgggggcctcctggtgggggccgcaccccgctagcgcgcagggccccgcagcctccggctcgccccgcgacgtgcgggccacctttgcccgatgtgtcccgaccatcctgcaggcacgcttcggacgcgcggtggccggtgcgagttgggcatcagggaccgcacgtctcggcttccgagcggcgcgcgctcccggagcgctctctgttgcccgcgcactgccactacagttccttccctcgagcggagagatccgggcgcccctacctcccgttattcccggagcccccggagcccgacgacctgsctctgctcgggccggaacagctggctcggcgggaagcaatgctgcgcgcggcctgggcscggggcccgcgccctcgccacgcttccttgcccagctcggtggcagaagcykwsrctcgatccaaccctctgcctgccaggtgtaccggtcacgcctgtgcctgcccgtgcccccaaagccggccatcctgcaggcacttggctcaggcacagtcgctgakgctgccgtcctacccggaggcctgtgtggagggcgtaccagcaggggtggccacctggcagcccagacagcacgtctgcctgcacgcccatacccgcctgccgttctgttggggaactgtctgccgtcaccctccaccctgtaccagccacagcccctggctcattggaacctgggagcctccagcacacagagtcaggaccctggggctaggcacaggctacagggacagyggsrygmkggaagaggtcagcagggaarcctgtgggacacaaggttttccaaggtcctgcacctggaggcgggtctccagcctggaatcagaagtgtgaggttactggcagctttggttcctgctggactggcttctgtggccggccttggccaggtttgggggacagsccagcttgggctcctctggcttmtattttgaaatcctggccatgggaccccagtgaaaaggatatcttccaggcccagcttttgaccttagtgtgggctgggatcttgttcatcacatgacctcttgcggtggtcacagggagtaaaaatgtgtccctgtcctgttgtcagctagttcctagttgtggttgctgtggccttgggttgggacacagaaattggaaatcgaggttggggtggggccatcccacttctttgcsscaataggctggggtttcttttcataggggcattggaacattaaagcaacgttttacrgcgmaaaaaaaaaaaaaaaaaa

SEQ ID NO: 2052 - DNA, 6344 bp, Rattus norvegicus
  misc_feature (24)..(24): n is a, c, g, or t
gacgctgcgggggtgggggacctncggcggcacggagtccccccccgggctcacattaatatttgccaatggactccaaagaatccttagctccccctggtagagacgaagtccctggcagtttgcttggccargggagggggagcgtaatggacttttataaaagcctgaggggaggagctacagtcaaggtttctgcatcttcgccctcagtggctgctgcttctcaggcagattccaagcagcagaggattctccttgatttctcgaaaggctccacaagcaatgtgcagcagcgacagcagcagcagcagcagcagcagcagcagcagcagcagcagcagcagcagcagcagccagrcttatccaaagccgtttcactgtccatggggctgtatatgggagagacagaaacaaaagtgatggggaatgacttgggctacccacagcagggccaacttggcctttcctctggggaaacagactttcggcttctggaagaaagcattgcaaacctcaataggtcgaccagcgttccagagaaccccaagagttcaacgtctgcaactgggtgtgctaccccgacagagaaggagtttcccaaaactcactcggatgcatcttcagaacagcaaaatcgaaaaagccagaccggcaccaacggaggcagtgtgaaattgtatcccacagaccaaagcacctttgacctcttgaaggatttggagttttccgctgggtccccargtaaagacacaaacgagagtccctggagatcagayctgttgatagatgaaaacttgctttctcctttggcgggagaagatgatccattccttctcgaagggracacgaatgaggattgtaagcctcttattttaccggacactaaacctaaaattaaggatactggagatacaatcttatcaagtcccagcagtgtggcactrccccaagtgaaaacagaaaaagatgatttcattgaactttgcacccccggggtaattaagcaagagaaactsggccmagtttwttgtcaggcaagcttttctgggacaaatataattggtaataaaatgtctgccatttctgttcatggtgtgastacctctggaggacagatgtaccactatgacatgaatacagcatccctttctcagcagcaggatcagaagcctgtttttaatgtcattccaccaattcctgttggttctgaaaactggaataggtgccaaggctccggagaggacagcctgacttccttgggggctctgaacttcccaggccggtcagtgttttctaatgggtactcaagccctggaatgagaccagatgtaagctctcctccatccagctcgtcagcagccacgggmccacctcccaagctytgcctggtgtgctccgatgaagcttcaggatgtcattacggggtgctgacatgtggaagctgcaaagtattctttaaaagagcagtggaaggacagcacaattacctttgtgctggaagaaacgaytgcatcattgataaaattcgaaggaaaaactgcccagcatgccgctatcggaaatgtcttcaggctggaatgaaccttgaagctcgaaaaamaaaraaaaaaawmmwmrkgattcagcaagccactgcaggagtctcacaagacacttcggaaaatcctaacaaaacaatagttcctgcagcattaccacagctcacccctaccttggtgtcactgctggaggtgattgaacccgaggtgttgtatgcaggatatgatagctctgttccagattcagcatggagaattatgaccacactcaacatgttaggtgggcgtcaagtgattgcagcagtgaaatgggcaaaggcgatacyaggcytgagaaacttacacctsgatgaccaaatgaccctgctacagtactcatggatgtttctcatggcatttgccytgggttggagatcatacagacaatcaagyggaaacctgctctgctttgctcctgatctgattattaatgagcagagaatgtctctaccctgcatgtatgaccaatgtaaacacatgctgtttgtctcctctgaattacaaagattgcaggtatcctatgaagagtatctctgtatgaaaaccttactgcttctctcctcagttcctaaggaaggtctgaagagccaagagttatttgatgagattcgaatgacttatatcaaagagctaggaaaagccatcgtcaaaagggaagggaactccagtcagaactggcaacggttttaccaactgacaaagcttctggactccatgcatgaggtggttgagaatctccttacctactgcttccagacatttttggataagaccatgagtattgaattcccagagatgttagctgaaatcatcactaatcagataccaaaatattcaaatggaaatatcaaaaagcttctgtttcatcaaaaatgactgccttactaagaaaggttgccttaaagaaagttgaatttatagcttttactgtacaaacttatcaatttgtcttgtagatgttttgttgttctttttgtttctgtcttgttttgttttaaacacgcagtacatgtggtttatagagggccaagacttggcgacagaagcagttgagtcaacactctgaagtgatgacacagcacacagtgaagtgtattgttggtgtatcacagaaactaacagttacgtggaggcatggccactgtcagagagggaccgcacctaaaccaccgtgcccaagtccatgtggttcaactttctgactcagaactttacagttggctgggtaaaactttctagactttctgttggtgtatttttcccatgtatagttaggatggtattttgatttatgcatgcaaacctgaaaaaagtttacaagtgtatatcagaaaagggaagttgtgccttttatagctattactgtctggttttaacaatttcctttatattcagtgaactatgcttgctcgtttctcttcaataatttttgtattccagttattgtacagctgtttaagatgggcagctgcttcacagctttcctagacgctaacattaatttccgtgtgaaaatgggtcggtgcttctaccctgttggcaccagctatcagaagaccacagaaattgactcagatctccagtattcttgttaaaaagctcttactctgtatatatctgcttccatggagaattacataggctgagcagattacataggctgagcagattaaccgtcctaactggtgtagagcacctagtccagtgaccttctgggtaaaccgtggatgatggttacagaagactggtgggaaaacagtaactaccaaaaggcccctttccayctaatgcaccatctcttcaatggggagatagcaaccaagyyygtaaatcagctctttcaggaccttctggagtggtttgcataacattttaaaatgtattattccagatagccagctctgataaagccgagagattgtttaatcagaccaagtaacttctctcattaaacttacccccaactaaatcgctaatacagcaagaatggctagacacccattttcacatctcacccgcaccgattggtctagctctcmtggtggtcakgagaatcagctactgatttttgttacttagaatgaattcagsayycgyrtttgtccaactacacatccctacatgtgccatagaatttaacrcaagtcctgtgaacttcttcacaytgagaattatcattttaaacaaaacagaagcwgtagtagccctttctgtgtgcaccttaccaactttctgtgactcaaagcttaayayrcttactaagccacaagaaatctgatttctacttaargksgccaaattatttgtgtaatagaaaaactgaaaatctaatattaaaaatatgaaacttctaatatatttttatatttagttatagtttcgatatatatcatatyggtattcactgatcttgggaaagggaaagggctactgcagctttacatgcaatttattaactgactgtaaaatagctgtatagtaataagaatgacttttagygagattgctttatcatgacatgttatatatttttcgtaggggtcaaagaaatrttgatggatatgayrgcckmwawgrtttwatagtrtrtaaaagcatccaaacagrmytyrrcrygkmkkggaaattaaaayrcctttgttmtaakctagggaagggagctggagactggcccygtstgyaytggaggttcygaggctyggayccaakagatccacagggratctaattcccyacctccatctaayyacytcaccacccatgaycctgtcagtgcaggtttggttattaaatcccccgttryactaayataaayaggacagaagggtggcgctcacgtctgttcyaggcgccgcagtagcagggttattttccatgcagcctcccsacaaggttagcagagggaggctttggcaagtttggcgtggcgtgcatagaggcaccagcaacatgtaaacctaaagagcccataggaagccargaatacactaatcctccccacccttcaryagtccatttccaagtaagatgaggacatgcttatgttttctttgaatgcttttwgaatgttgttattttcagtattttgcagaaattatttaataaaaaagtataayktgaattctctctaaaagggattgttcagtttgtaatggtttaaattggtctcaaagtactttaagataattgtaacccagctggatgtgaaatttatggtgcctaagaaataccacttgaatattatcaagacagtgttaagttttaaaatgagcttctcaaaaatagattattgtacatttatggaatgttatatggttaaacccaaaaaagcacatcacacataaatctgctttcagcttggctttcaaaaatagagctccaaaaacgaaaaaggagaagaaaaagtatatatatgcgttgttattaacagaaggcaacagacattcataaaactactaccgaagctttccttgaagcgtataaagagccatgctcctttagtatgtggggaagaagagagcygtcatagtttygagtacagwgagaagatgcggtactgtctccgtgtgtggcttcataccgttcctaactatttaggtttataataacttcagtgagactyggtgacatgcctgtatgactcatgaccgatcttgaaagatatctttaattactggtaggacaaarsggacwcycyggktrkykkmsgcctwgrctwgggatmcysyrkrtscagragawwsgrsacaggaaacttggggaagggaagggaacctaggaagcactgccttctgtaggaaagaacacaccmataagtgagastacccaaagggacaaggccacacagtgtggggtctaaggatgagtcagggtgagctctggtgggcatggagaagccagcaactccagtgctacagarcagggcagggcarggatgggacaagatggatgcggwtcccagtcccagtagtttgctccctcttatttaccatgggatgaaccatggagtattgatctgtcagcactcaaggatcatggagcttgagattcsggttggtcaccccaacggtaagctgagattgaatgtgtttcttatgtgccggtttcagtgttagaaggygaaacagagtgtacagaagacactgcaaaccgktcagatgraagtcttctcattcccaractattttcagtcagcytgctctatcaggactggtgaccarstgyyargacagggtcggcgcttctgtctagaatatgcctgaaaggattttattttctgataaatggctgtatgaaaataccstcctcaataacytgcttaastacatagagatttcagtgtgtcaatattctattytgtatattraacwaaggctatataatggggacraatstatattatactgtgtatggcattwttaagaagctttttcattattttttrtcacagtaatttttaaatgtgtaaaaaattaaaaryyagtgactcctgtttaaaamtaaaagttgtagttktktattcatgctgaataacctgtagtttaaaaatcygtctttctacmtacacagtgaaatgtcagactgtaaaattttgtgtggaaatgtktaastwttaktkttctttaaatttgctgtyytggtattaccaarccacacattgtactgaattggcagtaaatgttagtcagccatttacagcaatgccaaatatggataaacatcataataaaatatctgctttttcatcaaaaaaaaaaaaaaaaa

SEQ ID NO: 2053 - DNA, 1079 bp, Rattus norvegicus
gtcgcctccagagtttccgcctccaaccagcgagtggagcctgccggagcagagccatctcgagcggagcccggagcctgaagcgagcggagcagcctgaactagcccagtcccgcgatggagcgcccamagctcgacagcatgtcccaggatttktccgaggccttgaaggaggccaccaaggaggtgcacatccgtgcagagaattctgagttcatgaggaactttcagaagggtcaggtgtccagggaaggctttaagctggtgatggcctccttgtaccatatctatacggccctggaagaggagatagagcgaaacaagcagaacccagtytwtgccccgctctacttccctgaggagctgcaccgaagggctgccctagagcaggacatggccttctggtatgggccccactggcaggaggscatcccttacacaccagccacacagcactacgtaaagcgtctccacgaggtgggaggtactcatcctgagctgctggtggcccacgcatatacccgctacctgggtgacctctcagggggtcaggtcctgaagaagattgcgcagaaggccatggccttgccaagctctggggaaggcctggcttttttcaccttcccgagcatcgacaaccccaccaagttcaaacagctctatcgtgctcgcatgaacactctggagatgacccccgaggtcaagcacagggtgacagaagaggctaagaccgccttcctgctcaacattgagctgtttgaggagctgcaggcactgctgacagaggaacacaaagaccagagtccctcacagacagagtttcttcgccagaggcctgctagcctggttcaagatactacctctgcagagacgccccgaggaaaatcycagatcagcactagttcatcccagacaccgctcctgcgatgggtcctcacactcagtttcctgttggcgaccgtggcagtgggaatttatgccatgtaaatgcagtgttggcccccagaggctgtgaactctgtctcatgtagccttctctctgcaggggagaatcttgcctgggttctcttttctttggg

SEQ ID NO: 2054 - DNA, 1798 bp, Rattus norvegicus
tggatcaatcaaacagacagtggctttttttgattaaagcccaaattgtcattgggcagaagcaatcatgtgacagccaattcggtccaatttcaaccttgtctccatkaattcwmkgagwyaakrktgarmkyggwccsmatyggctgtaatcagtgaayyagaaaaaaaacaccccagcagcgatcttctatgatagatttttttttccttcgctctcgcctttttcytgggccttgcccccccaaagcccctccaaaagagggaacttttcctccgagrgggctccaaggagaaggccatgaattacgaatttgagcgagagattggttttatcaatagccagccgtcgctcgctgagtgcctgacatcttttccccctgtcgctgatacatttcaaagttcatcaatcaagacctcgacgctttcacactcgacactgattcctcctccttttgagcagaccattcccagcctgaacccgggcagtcaccctcgccaaagcgctggcgctggcggccgccccaagtcgagccccgcgggcagtcgcggcagcccggtgcccgcccgcgccctgcagccgcctgagtacccctggatgaaggagaagaaggcggccaagaaaaccgcgctgccgcccgccgccgcctccacgggccctgcctgcctcggccacaaagaatccctggaaatagccgatggcagcggtgggggatccargcgtctgagaactgcttacaccaacactcagcttttggaactggaaaaggaatttcatttcaacaagtacctctgcagaccccggagggtggaaatcgccgcgctgctggatttgaccgagagacaagtgaaagtgtggtttcagaaccggaggatgaagcataagaggcaaacccagtgcaaggagaaccaaaacagcgaagkgaaatttaaaaacctggaggattcggacaaagtggaggaagacgaggaagagaagtcactctttgagcaagccctcagtgtctccggggcccttcyggagarggaaggttacacttttcagcaaaacgcgctctctcaacagcaggctcccaatggacacaatggcgactcccaaactttcccagtktcgcctttaaccagcaatgagaaaaatktgaaacattttcagcaccagtcacccactgttcctaactgcttgtcaacaatgggccagaactgtggagctggcctaaacaatgacagtcccgaggccctcgaggtcccctctttgcaggactttaatgttttctccacagattcctgcctgcagctttcagacgcactgtcgcccagtttgccaggctccctggrcagtcctgtagatatttcagctgacagctttgacttttttacagacacactcaccacaatcgacctacagcatctgaattactaagaacattaaagcaaaagaaagcttcacaaaacammwcgystttggccaggtgctttgccttcttttattccgggagttgattttcgttctattctcttctcgatctacccctgttctcttaaatgttcaggactttctgttttacacccagtttgaaagccatctcttccaaatgatgttggcgttctaagtgttttacaccgaacccaacaagcttctatgtgattttcctgaaaacaaaacacgwggcctgcaagaaagtgaccataagttgtcttgtcactttctttttatttttgtaccacattaggatgcattgtcatgcgtatttttggtagartaaactctcctctgctaaaaaamarmamraaaaaaaaa

SEQ ID NO: 2055 - DNA, 1044 bp, Rattus norvegicus
atgagagccctgggagctgtcgtcactctcctgctctggggtcagctttttgctgtggaattgggcaatgatgccacagacattgaagatgacagctgcccaaagcccccagagattgcaaacggctatgtggaacacttggttcgttatcgctgccgacagttctacaaactacagaccgaaggagatggaatctacaccttaaacagtgagaagcaatgggtgaacccagctgctggcgataaactccccaagtgtgaggcagtgtgtgggaagcccaagcatcctgtggaccaggtacagcgcatcatcggtggttccatggacgccaaaggcagctttccttggcaggccaagatgatctccagacatggactcaccactggggccacactgatcagtgaccagtggctgctgaccactgcccaaaacctcttcctgaatcacagtgagaatgcgacagccaaggacattgcccctaccttaacactctatgtggggaaaaaccagctggtggagattgagaaggtagttctccaccccgagcgctctgtggtggatatcgggctgatcaagctcaaacagaaagtgcttgtcactgagaaagtcatgcctatctgcctgccttccaaagactacgtagcgccaggccgcatgctatgtgtccggttgggggcgcggaatgtcaactttagatttactgaacgtctcaagtatgtcatgctgcctgtggctgaccaggagaagtgtgagctgcactatgagaaaagcacagtgcctgagaagaaaggcgctgtaactcctgttggggtacagcccatcttgaataagcataccttctgtgctggccttaccaagtatgaggaagacacttgctatggtgacgctggcagtgcctttgccgtccatgacacggaggaggacacctggtatgcagctgggatcctgagctttgacaagagttgtgccgtagctgagtatggtgtgtatgtgaaggcaactgatctgaaggactgggtccaggaaacaatggccaagaactag

SEQ ID NO: 2056 - DNA, 1017 bp, Rattus norvegicus
  misc_feature (22)..(22): n is a, c, g, or t
  misc_feature (104)..(104): n is a, c, g, or t
  misc_feature (108)..(108): n is a, c, g, or t
ccagtggggaaagggggattgntgcaaggggattaagtggggtaacgccaggttttcccattcaggacgttgtaaaaggacggccagggaattgtaatacggantcantatagggggaattgggtrcskgcmcscytkggctgymgttcctgaagcttcaggctgccagcacactatctgttattgctgccactgcccactgaaagggatcttgagacatgaggtgcatctccaggctgccagctgttctcctcatcctctcggtggcactcggccacttgagagctacacctgtcggaagtggtaccaaccctcaggtggacaaacggaagtgcaacacagccacatgtgccacacaacgtctggcaaacttyttggttcgctccagcaacaaccttggtccagtcctcccaccaaccaatgtgggatccaatacatatgggaagakgaatgtggcagargatccmaatagggaatccctggatttcttactcctgtwaarksmaygwrctcccgtatctcttattacttcctgtgtaaatgctctgawgattycctgaataatgtwacagtgcctttgcmawtyccgcccaagtgaraawgtwcaacaacgtgccygtgcttgctgtgtttgtaaattcttattctaagamgtgctttaaactgagtgttgataaaggtcagggtgaatacctctctaatcacaacatgttcttggctgtacatcgatatcktaggaacacttaaaatttctgtttttaccttgtamctctatgactcaagtttaacaataaaggagggcgtgggatggtggacttgaaaagtcattaacagctcatagtaaatttctgattctagacattggaaagcaagcattctaaatacctgctaagatgacatttcaaaataaattagcaaaatcttgtacttatttaattaaactttttaattctatttcttgttgtccttgttggtagtaagaggctgttttaaaggataaaggttgtttgtatccac

SEQ ID NO: 2057 - DNA, 1941 bp, Rattus norvegicus
ggcagcctggagaacaatccgtgccactcactcacttgctctctccagccaggactgccgaaggagaaattgcaaaatgaagactgctttaatcttgctctgcattttggggatggcgagtgctttctcgatgaaaaatttccatagaagaatcaaagcagaggattctgaagaaaacggggtctttaagtaccggccacgctactttctttataagcacgctacctacttttatcctcctctgaaacggtttccagtccagggaggcagcgactcttcggaagaaaatggagatggcgatagttcggaggaggagggggaggaagaggagacttcaaatgaagaggaaaacaacgaagactctgaggggaatgaagaccaggaggcggaggcagagaacgccacactctcaggggtaaccgctagctacggggtagagaccacagctgacgctggaaagttggagttagctgcgctccagctacccaagaaggctggagatgcagagggcaaggctccaaaaatgaaggaaagcgacgaggaagaggaagaggaagaggaggaagaaaacgagaacgaagaagcagaagtggatgaaaatgagcaggtcgtcaacggcaccagcaccaactccacggaggtggacggggggaatggccccagcggaggagacaacggagaagaagccgaggaggcaagcgtcactgaagcaggtgcagaaggaacaacagcaggggycagrgagctgaccagttatggcaccacgacagctgtccttctgaacgggtttcagcagacgaccccgccacccgaagcctatgggaccacctccccaccagccagaaagagcagcacggttgagtatggggaagaatacgaacaaataggcaacgagtacaacactgcgtatgaaacctatgacgagaacaacggggagcctcgcggggacacttaccgagcttatgaggacgaatacagctactacaaggggcatggctatgaaggctacgagggtcaggattattactaccaccagtgaaggccctccggaggactccccattctgtctttgcatctggataccattttcaaagctcaactcaggaaggtgcaatatatatatataacagatgtgcattttatagtgtggaatggtgctacggtcwcagagtgattwccacwratgytkscgkyygyarmggcytttttttttttttwttttaatttttccagrtgcgtcattgaarggtcatcgtaaatcakggctgttgatcaagyagcacacagatctatgagctgggaccaggtggaatgcttcgaggttgtttttctatagtgttwgtgctgtgtacaccattgctaaccaccctaacataccytgtacaagaagrctcctaacgagagatttattaacaacactgtatacgatgtgtgtagttcctttatcasacccsytacctaatactgtattaggtttgattytcatcctcatgtattttacgtgacttgtgcacatgygtkttyatcatraataaatatgcaatcattmavrwrwrwwawaawwaaaaagaaagggagagyrttggaatgagtgtgggtctcaaggagcagggaacaatttggctaraaagcaaacgcttatctccatcagggtttaaaactcagaggatccggaaacactctttattcagtacatctgaacggctaaggttcgaytacggagggcagaatcatytgtatacaggagggagtaaatgaccccttttagagttgccakatttaccaaacatgaatacacggtrtgaracgcccacctyagcttgaattccagatgaacaatggctggtttttaatacaacccctyccctacagataatttgtctctgtgaaacatttggaacaaacttatgctaaataaatgacttattctttatcytcgtg

SEQ ID NO: 2058 - DNA, 3799 bp, Rattus norvegicus
gagaaagccggaagcagcgacagccccagctccagagacatggcgggcgttaaagctcttgtggcactctccttcagtggggcaattgggctgacctttcttatgctgggatgtgccttggaggactatgggtacatctaatttatgattgrrrcaakwrkkytgamstwkcytatgctgggatgtgcctwsragracyrwrggtgtctatctctgaagtaagatgaygtgtcagaaattctatgtggttttgttacactgggaatttctgtatgtgataactgcacttaacctggcctatccaacctctccctggagatttaagctgttttgtgcgccaccgagtacaactgatgactcctttctctctcctgctggagtcccaaacaatacttcgtctttgaagggggcttctgaagcacttgttgaagctaaatttaattcaactggyatctacgtttctgagttatccaaaaccattttccactgttgctttgggaatgagcaaggtcaaaactgctccgcactcacaggcaacactgaagggaagacgctggcttcagtggtgaagcctttagttttccgccaactaggtgtaaactgggacatagagtgctggatgaaaggggacttgacattattcatctgtcatatggaaccattacttaagaaccccttcaagaattatgactctaaggttcaccttttatatgatctgcctgaagttatagatgatttgcctctgcccccactgaaagacagctttcagactgtccagtgcaactgcagtgttcgggaatgcgaatgtcatgtaccagtacccagagccaaagtcaactacgctcttctgatgtatttagaaatcacatctgctggtgtgagttttcagtcacctctaatgtcactgcagcccatgcttgttgtgaagcccgatccaccgctgggtttgcgtatggaagtcacagatgatggtaatttaaagatttcatgggacagccaaacaaaagcaccatttccacttcaatatcmggtgaaatatttagagaattctacaatcgtaagagaggctgctgaaatcgtctcggatacatctctgctggtagacagcgtgcttcctgggtcttcatacgaggtccaggtgaggagcaagagactggatggctcaggagtctggagtgactggagtttacctcaactctttaccacacaagatgtcatgtattttccacccaaaattctgacgagtgttggatccaatgcttccttttgctgcatctacaaaaatgagaaccagactatctcctcaaaacaaatagtttggtggatgaatctagccgagaagatccccgagacacagtacaacactgtgagtgaccacattagcaaagtcactttctccaacctgaaagccaccagacctcgagggaagtttacctatgatgcagtgtactgctgcaatgagcaggcatgccatcaccgctacgctgaattatatgtgatcgatgtcaatatcaatatatcatgtgaaactgacgggtacttaactaaaatgacttgcagatggtcacccagcacaatccaatcactagtgggaagcactgtgcagttgaggtatcacaggcgcagcctgtactgtcccgataatccatctattcgtcctacatcagagctcaaaaactgcgtcttacagacagatggcttttatgaatgtgttttccagccaatctttctattatctggctatacaatgtggatcaggatcaaccattctttaggttcacttgactctccaccaacgtgtgtccttcctgactccgtagtaaaaccactacctccatctaatgtaaaagcagagattactataaacactggattattgaaagtatcttgggaaaagccagtctttccagagaataaccttcagttccagattcgatatggcttaaatggaaaagaaatacaatggaagacacacgaggtattcgatgcaaaatcaaaatcggccagcctgccagtgtcagatctctgtgcggtctatgtggtacaggttcgctgccggcggttggatggactagggtattggagtaattggagcagtccagcctacactcttgtcatggatgtaaaagttcctatgagagggcctgaattctggagaataatggatggggatattactaaaaaggagagaaatgtcaccttgctttggaagccactgatgaaaaatgactcactgtgtagtgtgaggaggtatgtggtgaagcatcgtactgcccacaatgggacatggtcacaagatgtgggaaatcagaccaatctcactttcctgtgggcagaatcagcacacactgttacagttctggccatcaattccatcggtgcctcccttgtgaattttaaccttacgttctcatggcccatgagtaaagtgaatgctgtgcagtcactcagtgcttatcccctgagcagcagctgcgtcatcctttcctggacactgtcacctaatgattatagtctgttatatctggttattgaatggaagaaccttaatgatgatgatggaatgaagtggcttagaatcccttcgaatgttaacaagtattatatccatgataattttattcctatcgagaaatatcagtttagtctttacccagtatttatggaaggagttggaaaaccaaagataattaatggtttcaccaaagatgatatcgccaaacagcaaaatgatgcagggctgtatgtcattgtaccgataattatttcctcttgtgtcctgctgctcggaacactgttaatttcacaccagagaatgaaaaagttgttttgggacgatgttccaaaccccaagaattgttcctgggcacaaggacttaatttccaaaagsckgamacmtttgagcatctttttaccaagcatgcagaatcagtgatatttggtcctcttcttctggagcctgaaccagtttcagaagaaatcagtgtcgatacagcttggaaaaataaagatgagatggtaccagcagctatggtctcacttcttttgaccactccagattccacaaggggttctatttgtatcagtgaccagtgtaacagtgctaacttctctggggctcagagcacccagggaacctgtgaggatgagtgtcagagtcaaccctcagttaaatatgcaacgctggtcagcaacgtgaaaacagtggaaactgatgaagagcaaggggctatacatagttctgtcagccagtgcatcgccaggaaacattccccactgagacagtctttttctagcaactcctgggagatagaggcccaggcatttttccttttatcagatcatccacccaatgtgatttcaccacaactttcattctcagggttggatgagcttttggaactggagggaaattttcctgaagaaaatcacggggaaaaatctgtgtattatctaggagtctcctcaggaaacaaaagagagaatgatatgcttttgactgatgaggcaggggtattgtgcccattcccagctcactgtctgttcagtgacatcagaatcctccaggagagttgttcacactttgtagaaaataatttgaatttagggacctctggtaagaactttgtaccttacatgccccagtttcaatcctgttccactcacagtcataagataatagaaaataagatgtgtgacttaactgtgtaatcttgyccaaaaacttccaggttccattccagtagagtgtgtcatgtataatatgttcttttatagttgtgggtgggagagaaagcc

SEQ ID NO: 2059 - DNA, 1656 bp, Rattus norvegicus
ggtaagacgagasrcatgggaaatcacctccaaatctccgtttccctggtgctgtgcatctttatccagtcaagtgcctgtggacaaggcgtgggaacagagccctttggragaaaccttggagctactgaagaaaggaaaccgttacagaagccagagatcagattcctgctcttcaaagatgaaagtgaccgcctgggttgtcagctcagacctcagcacccggaaacactgcaggagtgtggcttcaacagctcccatccacttgtcatgatcatccacgggtggtcggtggatggcttgctagaaacctggatctggaagatagtgggtgccctgaagtcccgacagtcccaacccgtgaacgtgggattagtggactggatctccctggcataccagcactatgctattgccgtgcgcaacacccgtgttgtgggccaggaggtggctgctcttctcctatggctggaggaatctatgaagttttctcggagcaaagttcacttaattgggtacagcctgggagcacacgtttcaggattcgcaggcagctccatgggtgggaagcgcaagatcggaagaatcacagggctggaccctgcaggacctatgtttgagggaacttcccccaatgagcgcctttctccagatgatgccaattttgtggatgctattcatacctttaccagggagcacatgggtctgagtgtgggcatcaaacagcccattgcccactatgacttctaccccaacgggggctccttccagcctggctgccacttcctggagctctacaaacacattgcagagcatggcttaaatgccataacccagaccatcaamtgtgcccatgagcgttctgtgcacctcttcattgactccttgcaacacagcaacctgcagaacacaggcttccaktgcagcaacatggacascttcagtcagggtctatgtctgaactgcaagaagggccgttgcaacagtctgggctatgacatccgcaggatcggccacgymaagagcaagacactcttcctcatcacccgagcccagtcccccttyaaagtttatcattaccagttcaagatccagttcatcaatcaaatggagaagccaatrgagcctacttttaccatgacactgctggggacaaaagaagaaataaagaaaatycccatcaccctgggcgaaggaattaccagcaataaaacctattccttacttatcacactgracaaagacatcggcgagttgatcatgctcaagttcaagtgggaaaacagcgcagtgtgggccaatgtctggaacacagtgcagaccataatgctatgggacacagagcctcactacgcgggcctcattstgaagaccatctgggtcaaagctggagagacgcagcaaagaatgacattttgccctgataatgtggatgatctccagcttcaccccacccaggagaaagtcttcgtgaaatgtgacctgaagtcaaaagactgaagaagcaaaagagcagatgagtcaagagacccaagcacaaaataaatagactattctttatctgtaatggttgccttattcggaagccaaattacacaaaggatcatgcataaacttaaataaagctgatatgtaaaggaraaaaaaaaaaaaaaa

SEQ ID NO: 2060 - DNA, 4636 bp, Rattus norvegicus
aaaaagatacttgcagatgagcacagtatacgatgtgattttatttttcttgcttttctacaaacatgtgctaatccactttgcaaaagctcagtctcaaccctggcagagcacaatttaatattaaagcatctacacagtcatacaatgacaagcctagtggaattcgggatatttccatcacgatcctcaccctgcccccacactcccagcgccccacatccccctcaccctggaacatcgctaatctatgtactgtctttgtaagtttagattggtaatttggcatgccttctcccactgaaagtccaggatagtttacaatatttgaccatgactttctgcctctgaaaatagatgttattcttgagtttcttactgaattagaggatcgagtacaatttacataaggtaaaaattagaattattaactaatttcctttcttctaccacagaaggagatccatattgccaacgataaaaggcagaccgtgcaggcaccaggcgctgagcaatatgtgtcctaaggtccctttggcccgtggggacctgtatgtgtgtgtgtggcgggggtacgtttgaaaggatctttcaagtttaacaaagatttatcaaaagggagggggtgaaagtgttggacacacgcgctgtttaagagcaaaacttcttcccctcagaaaactgatcgtagactacttaacataaatcagcgtaaacccctcctcccggcctctacaggggtccctggggagcaggttcctctggataggcaaactggagcctaaacgacaagcaagctttccctcctgccctttccccttcttctcgctggcaccgttgagcctcgttacagtgtgctcaaatatttggaagtgaatttagagtcctccccccaacttatgattttatagccaataggtgatgaggcttatttgcatatttccagtcacttaaacagctgtgcagtggaaacggtgtcagactcgattcctcctcctccaagaaattctgccccttgtagctgttctgccctcccctttaaaggttgacttgccccgcggcgctccaccgcgctctagtcctctgacgcctccggctcaaccctttgcaacgcggatccccgcccgcctgactgcccgcgcagcgcagttccagcagcaaagcagaagggcgcgccgagatggagagcaaagccctgctcctggtggccctgggagtttggctccagagtttgaccgccttccgcggaggggtggccgcagcagacgggggaagagatttctcagacatcgaaagtaaatttgccctaaggacccctgaagacacagctgaggacacttgtcatctgattcctggattagcagactctgtgtctaactgccacttcaaccacagcagcaaaacctttgtggtgatccatggatggacggtgacaggaatgtatgagagttgggtgcccaaacttgtggctgccctatacaaaagagaacctgactccaatgtcattgtagtagactggttgtatcgggcccagcaacattatccagtgtctgccggctataccaagctggtgggaaatgatgtggccaggttcatcaactggctggaggaagaatttaactaccccctagacaatgtccacctcttagggtacagtcttggagcccatgctgctggcgtggcaggaagtctgaccaacaagaaggtcaatagaattactggcttggatccagctgggcctaactttgagtatgcagaagcccctagtcgcctttctcctgatgatgcggatttcgtagatgtcttacacacatttaccagggggtcgcctggtcgaagtattgggatccagaaaccagtagggcatgttgatatttatcccaatggaggcactttccagccaggatgcaacattggagaagccattcgtgtaattgcagagaaggggcttggagatgtggaccagctggtgaagtgctcgcacgagcgctccatccatctcttcattgactccctgctgaatgaagaaaaccccagcaaggcatacaggtgcaattccaaggaggcctttgagaaagggctctgcctgagttgcagaaagaatcgctgtaacaacgtgggctatgagatcaacaaggtcagagccaagagaagcagtaagatgtacctgaagactcgctctcagatgccctacaaagtattccattaccaagtcaagattcacttttctggaactgagaatgacaagcaaaacaaccaggccttcgagatttctctgtatggcacagtggctgaaagtgagaacattcccttcaccctgccggaggtcgccacaaataaaacctactccttcttgatttacacggaggtggacatcggggaattgctgatgatgaagcttaagtggaagaacgactcctacttccgctggtcagactggtggagcagtcccagctttgtcatcgagaagatccgagtgaaagccggagagactcagaaaaaggtcatcttctgtgccagggagaaagtttctcatctgcagaaaggaaaggacgctgcagtgtttgtgaaatgccatgacaagtctctgaagaagtcgggctgacactggacaaaccaacaagagaagaaagcatctgagttctttgaagaccgaagaaaatgaagtaaattttatttaaaaaaaatacccttgtttgggtgtttgaaagtggattttcctgagtattaatcccagctatatcttgttagttaaatagaagacagtgtcaaatattaaaaggtggctaacacaacgtgaggaacctaatggccgatagcatgtcctccagcatcagaagacagcagagaggagaagcatgccatcttatatcccttaagaaggaatcatttgttcccaaccatacaagactccttcatgtgacccatttggtcatggtctaaaattagtaagggcctcttattttcattagatctctgaggttttaaattgagaccttctcaaagttctcttgaagtctaatatagacaacatttttttgtgctgtgagtcagatccatttctttagcagttgaaacagctggccattgtaactagttcttttaccatcaggatatagcacccctaccaaataaaataaataaataaagtgaccagggacatgtgactttgcaaaagcaatggamgacgtggctcgtggattcctgacccttagtcccaccacaacgaagtacaagtcagtagaggtacaaaacctagactgagtaattcttagtagacttcaagttttatggcttaattcctctgtcttttaaaaacgtgtcacatattataacattattctctagacagatgktgaaatgagcttgtgattcasgtgacatatgaattgagctgagagaaaataatgccctggctgattttatttctctgttttgctttcttgagaaaaggaatacttgtcccactccgtatctgagcctgaccaagaactaaactatgtacttcaggcttaccttgaactctcaaccatcctgcmttggcttcytgagtgykgggarskkrataabcwtrmkkyyrywatcagrtttttyttwktywttttcaccaatagaacacattcaatgcccaatcgttagcatttcgtttgagactcatcttgaccgtacctytgtcacacgtctaacacatyacatyrryykctarttwakamgtgatcrastwcrwaktckgsamtkcgsmamgtasragttttagagcaggaccattttttttttaccacgtaaaagtygaaattactaggaaatgtrtatatckatgcttgtacactgttgcgtgcaaagtgaggagccttctattgtkatagccatagacagtaccaggctcgttgccgctcttttgttttactataaaaaaataatgaagaattatttatgaacaagatytcatatgttcagattgctyktrcyattcatcaatatmaaabstyrwrmmraaaaaawaaammaagttctatcymaraggctgttgctgggaacagaaactgtgaaatgtgtgggtatctgaacacctacacacaagcaaagccccacaagagtctttgtcattcaatgtcattcagaaaggaaagagtcaagrgatatmccataatatgkcagagragtagttccagryahgskggawkgctagccctkgctaggaraaagttggttgtgcmtatgtaatataggacaaaagtgmctggtttcattakgctcagtgtcattstmhcamtrarmyraydywcsdbaygwvrccagcatccccattattgctaattcwtggcagtatatacgtacatatcksmrygakgsytygactytaaattttatttattagctgtaaakaatskgyrsgwgkgtaaggaagcttgtaaacactggaaacgctgttgtggctatctggggtgtagatttgtggtgctaactctgtgtccacctccatcagtgattgtctcamtgagccaactcmctctgatgaacagcacaatggaatagcttttgaaggaagaaaataaactcacctgtgtgaagaaawrrrawmwrmwwtcaataaaatcgagaacgttttwtcmdrwwwmmrmraaaaaaaaaaaaa

SEQ ID NO: 2061 - DNA, 911 bp, Rattus norvegicus
  misc_feature (532)..(532): n is a, c, g, or t
actctcywckmkgcttcttcccgcctctctgtgattacagctccaatggcccccaaaaagccagagcccaagaaggacgatgccaaaaccgctgcccccaaagcagctccggcccctgcggctgcacctgcggctgcacctgagcccgaacgccctaaggaagcagagtttgatgcctccaagattaagattgagttcacgcctgaacagattgaagagttcaaggaggccttccaactgtttgaccgcacacctaagggcgagatgaagatcacgtacgggcagtgtggggatgtcctgcgggcwckgggacagaatcctacccaggcagaggtgctccgcgtcttggggaagccsaaacaggaagagctyaactccaagatgatggattttgaaacrttcctgcccatgctgcagcacatctccaagaacaargacacgggcacrtatgaggacttcgtggaggggctgcggswckwsgacaaggagggcaacggaactgttakgggtgcagagyycsgtcatgtgytgnccacgctgkgtkaraggstgacaramgaygaggtagmgaaactgmtgsmtggtcaagaagacwycaatgghtgcaymammtatgaagcatttgtgaagcacatcatggccagytgagcytctcaggaagcycagggcagrccaagctggrgacatgccatctcccaaccataatgctgmcmccatgtctggagcwtcggrarggaaagragtgtcycagackccagcacatggtcgcagatcactccgtgtgcgrtggtcctcsctggcccmtgvtaggatgtgmktgcstrmccgtggtaccyytkytgtstccaccmtgcggcvttrtgaataaatgatttccttccttmhdvwmwmdmwmaaaaaaaaaaaaaaaa

SEQ ID NO: 2062 - DNA, 9132 bp, Rattus norvegicus
gaacgctagctgcccgcactcctcagccgcttggctcgccgctgccctcacctccgcgccggccgcccgccctccggcggcgcccggacgccggcccacccggccctccgccgcccccgggtctcggggaggacatggccgcacacaggccggtggaatgggtccaggccgtggtcagccgcttcgacgagcagcttccaataaaaacaggacagcagaacacacataccaaagtcagcacggagcacaacaaggagtgtctgatcaacatttccaagtacaagttttctttggtcatcagtggactcaccaccattctaaagaatgttaacaatatgaggatatttggagaagctgctgaaaaaaatttgtatctctctcagttgatcatattggatacactggaaaaatgtcttgctgggcaaccaaaggacacaatgagattagatgaaacaatgctggtcaaacagttgctaccagaaatctgccattttcttcacacctgccgtgaaggaaaccaacatgcagccgaacttcggaattctgcttctggggttttattttctctcagctgcaacaacttcaatgcagtctttagtcgaatttctacaaggttacaggagttgactgtctgttcagaagacaatgttgatgttcatgatatagaattgttacagtatatcaatgtggattgtgcaaaattaaaacgactcctgaaggaaacagcatttaaatttaaagccctgaagaaggtggcacaattggcagttataaatagcctagaaaaggctttttggaactgggtggaaaattatccagatgaatttacaaagctataccaaattccacagacagatatggctgagtgtgcaggaaagctgtttgacttggtggatggttttgcagaaagcaccaaacgtaaagcagcagtttggccactacagatcattctcctcattctgtgtccagaaataatccaggacatatccagggatgtggtcgatgagaacaacacaaacaagaaactgtttctggacagtttacggaaagcacttgctggccatggcggaagcagacagctgactgaaagtgctgccatcgcttgtgtcaagttgtgtaaagcaagtacttacatcaactgggaagacaactctgtcattttcctactggttcagtccatggtggttgatctgaagaacctgctttttaatccaagtaaaccattctctagaggcagtcagcctgcagatgtggacctcatgattgactgtcttgtctcttgctttcggatcagccctcacaacaaccaacactttaagatctgtctggctcagaattcaccttctacatttcactatgtgttggtaaactcactccaccgcattatcaccaattctgcatgggattggtggcctaagattgacgctgtatattgtcactcagttgaacttcgaaatatgtttggtgaaacccttcataaagcagtgcaaggctgtggagcacacccagcattacggatggcaccaagtcttacctttaaggaaaaggtaacaagccttaagtttaaagaaaagcctacggacctagaggcaaggagctacaagtatcttcttttgtctatggtgaaactgattcatgcagacccaaagcttttgctttgtaatccaagaaaacagggccctgaaactcaaggtagtacagcagaactgattacagggctcgtacagctggttcctcagtcacacatgccagaggtcgctcaggaggctatggaggctttgttggttcttcatcagttagacagcattgatctgtggaatcctgatgctcctgtagaaacgttttgggaaattagttcacaaatgcttttttacatctgcaagaaattaactagtcatcaaatgcttagtagcacagaaattctcaagtggttacgggaaattctgatctgcaggaataaatttcttcttaaaaataagcaggcagatagaagttcctgtcattctctctacctttatggagtaggatgtgacctgcctgctagtggaaatgtcactcagatgtcagttgatcatgaggagtcactacgtacctgtgctcctggagcctctctgcggaaaggaagagggaattcctccatggatagcacagcagggtgcagtggaaccccacctatatgccgacaagcccagaccaagctagaagtggccttgtacatgtttctgtggagtcctgacacggaagttgttctggttgctatgtcctgtttccgccacctctgtgaagaagcagacatccgatgtggtgtggatgaagtgtcagtacacaacttcttgcccaactacaacacattcatggaatttgcctcagtcagcaatatgttgtcaacaggaagagcggcacttcagaaaagagtgatggccctgctaaggcgcattgagcaccctactgcaggaaacactgaggcctgggaagatacacatgcaaagtgggaacaggctacaaaactaatccttaactacccaaaggccaaaatggaagatggccaggctgcagaaagtcttcataagaccattgttaagagacggatgtcccatgtcagtggaggaggatccatagacttgtctgacacagactccctgcaggaatggatcaacatgactggcttcctctgtgcccttggtggggtgtgcctgcaacagagaagcagctctggcctagcaacatacagcccacctatgggccctgtcagtgaacgcaaagggtctatgatttctgtaatgtcttctgaagggaatgttgattcacctgtcagcagatttatggaccggcttctgtccttgatggtgtgtaaccatgagaaagtggggcttcagatacggaccaatgttaaggacctggtgggtctggagctgagtcctgctctgtatccaatgctgttcaacaaactgaagagtgccatcagcaagttttttgactctcaaggacaggtattattaactgacagcaatactcagtttgtagagcaaaccatagctataatgaagaacctactggataatcatactgaaggcagctctgagcatctgggacaagctagcattgagacaatgatgctaaatctggtcagatatgttcgtgttcttgggaatatggttcatgcaattcaaataaaaacgaaattgtgtcagttagttgaagtcatgatggcaagaagagacgacctctcgttttgtcaagagatgaaatttcggaataagatggtggagtacctaacagactgggttatgggcacttcaaaccaagccgcagatgatgatgtaaagtgtctcacaagagatctagaccaagcaagcatggaggcagtagtctcgctcctcgctggtcttccactgcagcctgaagaaggagacggagtggagctgatggaggccaagtcacagctattccttaagtacttcacattatttatgaaccttttgaatgactgtagtgaagttgaagatgaaaatgcacaaacaggtggcaggaaacgtggcatgtctcggaggctggcatccctgaggcactgtacagtgcttgcaatgtcaaacttactcaatgctaatgtggacagtggactcatgcactccataggcttaggttatcataaagatcttcagacaagagctacatttatggaagttctgacaaaaatccttcaacaaggaacagaatttgatacacttgctgaaaccgwrttggcagakcggttcgagagacttgtggaactggtcacaatgatgggagaccagggagagctccctatagctatggctctggccaatgtggtcccttgttctcagtgsgatgagctggctcgagttctggtcacgctgtttgattctcggcatttgctmtaccagctgctctggaacatgttttctaaggaggtagagttggcagactccatgcagactctctttcgaggcaacagcttggccagtaagataatgacgttctgcttcaaggtgtacggtgctacttacctacaaaagctcttggaccccttgttacgaatcattatcacatcctccgattggcagcatgttagctttgaagtggatcctaccaggttagagccctctgagagccttgaggagaaccagaggaacctccttcagatgacagagaagttcttccatgccatcatcagttcttcctcagagttcccctcgcagcttcgaagtgtctgccattgtttgtaccaggyrrytwgccasyscytmcykmakaacagcwwcrgtrmmrwmrraarwrmmawgttcctgaggttcatcaaccctgccattgtctcaccgtatgaagcagggattttagataaaaagccaccacctagaattgaaaggggcttgaagttaatgtcaaaggtccttcagagcattgccaatcatgtactgttcacaaaggaagagcacatgaggccttttaatgattttgtgaaaagcaactycgacttggcacggaggtttttcttagatatagcatcagattgtcccacaagtgacgcagtaaaccatagtctttccttcatcagtgatggcaatgtgctygctttacatcggctgctttggaataatcaggagaaaattggccagtatctttccagcaacagggatcataaagctgttggaagacgacctttcgataagatggccacacttcttgcatatctgggtcctccggagcacaagcctgtggcagatacacactggtccagccttaaccttaccagttcaaagtttgaggaatttatgaccaggcatcaggttcatgagaaggaagagttcaaggccttgaaaacattaagcatcttctaccaagctggcacatccaaagctgggaatcctattttctattatgttgcacggaggttcaaaactggccaaatcaatggggatttgctgatataccatgtcttgctgactttaaagccatattatgcaaagccatatgaaattgtagtggaccttacccatactgggcctagcaatcgctttaaaacagacttcctctctaagtggtttgttgtttttcctggctttgcttatgacaacgtgtctgcagtctatatctataactgtaactcctgggtcagggagtacaccaaataccatgagcggctgctgactggcctcaagggcagcaaaaggctcattttcatcgactgtcctgggaagctggctgagcacatagagcacgagcaacagaagctccctgctgctaccttggcactggaagaggatctaaaggttttccacaatgcgctcaagctagctcacaaggacaccaaagtttctattaaggttggttctactgctgttcaggtaacctcagcagaaagaacaaaagtattggggcaatccgtctttctaaatgatatctactatgcttctgaaatcgaagagatctgcctagttgatgagaaccagttcactttaaccattgcaaaccaaggcacaccgctgacctttatgcaccaagagtgtgaagccattgttcagtctatcattcatatcaggacccgatgggaactgtcacagcctgactccatccctcagcataccaagattcgaccaaaagatgtccctggaacactgcttaatatcgcattactgaatttgggcagttcagaccctagtttacggtctgctgcctataacctcctgtgtgccttaacttgtacctttaatttaaagatcgaaggtcagttactagagacatcagggttatgcatccctgccaacaacaccctcttcattgtctctatcagtaaaacgcttgcagccaacgagccacacctcaccttagagtttttggaagagtgtatttctggatttagcaaatctagtattgaattgaaacacctttgtttggaatatatgaccccatggctgtcaaacctagtccgtttttgtaagcataacgatgacgccaaacgacaaagggttactgccatccttgataaactcataacaatgaccataaatgaaaagcagatgtacccttctattcaagcaaaaatatgggggagccttgggcagatcacagacctgctagatgttgtgcttgacagtttcatcaaaaccagtgctaccggagggttggggtctatcaaagctgaggtgatggcagacacagctgtggctttagcttctggaaatgtgaaactggtgtcaagtaaggttattggaaggatgtgtaaaataattgacaagacttgcttatctccaactccaactttagaacagcatcttatgtgggacgacattgccattttagcccgctatatgctgatgctgtccttcaacaactccctggatgtggccgctcatctcccctatctcttccatgttgtcaccttcttagtagccacaggtcctttgtcccttcgcgcttccacccacggattggtcattaatatcattcactctctgtgcacttgctcacagcttcattttagtgaagagaccaagcaagttttgaggctcagtctgacagagttctcgttacccaaattttacttactgtttggcatcagcaaagtcaagtcagctgctgtcattgccttccgttccagctaccgggaccggtcgttctctcctggctcctatgaaagggagacttttgctttgacgtccctggaaacagtcacagaagctttgttggagatcatggaggcatgtatgagagatattccaacatgcaagtggctggatcagtggacggaactggctcaaagatttgcatttcagtacaacccatccctgcagccaagagctcttgtggtgtttggctgtattagcaaacgtgtgtctcacgggcagataaagcagattatccgaatccttagcaaggcacttgaaagttgtttaaagggacctgacacttacaacagtcaagttctgatagaagccacagtgattgcactgaccaaactacagccacttcttaataaggactcaccactgcacaaagccctcttctgggttgctgtggctgtgctgcagctagatgaagtcaacttgtactcagctggcactgcacttctggaacagaatctgcataccttggatagtctccggatattcaatgacaagagtccggaagaggtatttatggcaatccggaatcctctggaatggcactgcaagcaaatggatcactttgttggactcaatttcaactctaattttaactttgcactagttggacacctcttaaaagggtacagacatccttcacctgccattgttgcaagaacagtcagaattttgcatacactactaactcttgttaacaaacatagaaattgtgacaaatttgaggtgaatacacagagtgtggcttacttagcagctctactcacagtgtctgaagaggttcgaagtcgctgtagcctcaagcataggaagtcccttcttcttactgatatctcaatggaaaatgttcctatggatacatatcccattcatcacggtgatcccagctctaggacactaaaggagactcagccatggtcctctcccagaggttcagaaggataccttgcagccacctacccagctgtaggccaaactagtccccgagccaggaaatccatgagcttggacatgggacagccttctcaggccaacacaaaaaaattgcttggaacaaggaaaagttttgatcacttgatatcagacacaaaggctcctaaaagacaagaaatggaatcagggattacaacacccccaaaaatgagaagagtggcagagaccgactatgaaatggaaacccaaaggatttcctcctcgcagcagcacccacatttacggaaagtctcagtgtctgaatctaatgttctattggacgaagaagtacttactgacccaaagatccaagcactgcttcttactgttctggctacactggtaaaatataccacagatgaatttgatcagcgaattctttatgaatatctagcagaggccagtgttgtgtttcccaaagtgtttcctcttgtgcacaatttgttggactctaagatcaataccctcttgtctttgtgccaagatccaaatttgttaaatccgatccatggaatcgtgcagagtgtggtgtaccatgaggaatcccctccacagtaccaaacatcatacctgcaaagtttcggttttaatggcttatggcggtttgcaggacccttttcaaagcaaacacaaatcccagactatgctgagctcattgttaaatttcttgatgccttgattgacacgtacttgcctggaattgatgaagaaaccagtgaggagtccctcctgacacccacatctccttaccctcctgcactgcagagccagcttagtatcactgccaaccttaacctctctaattctatgacctcacttgcaacttcccagcattccccaggaatcgacaaggagaacgttgaactctcccccaccactggccactgtaacagtggacggactcgccatggatccgcaagccaagtgcagaagcaaaggagtgctggcagtttcaaacgtaatagcattaagaagatcgtgtgaagctttctttctttcactcttcaaaccaacctaacatggcttctcactcatgactctcccccaccttgcactgctgcttcgtgtcttatgaacgcatctggtctgctgtgttgccagacggtcacctcttggagcattgcctaagtttaatgctgcttctctttgatgttttccttctactttggcatgtgtctggttgagcacttgttctgaggactgcagagaaagcaggaggtcaggaagcctgactgagagcgtggactgtgggcgtggatgaaccgtccagtgccgccactgctgccagccatgggccatacacagaagacgaccttctgtgttccggtcttacagagtgaagtggtcgtcttatttacacacttacaagttcgggggagaaataatattttaaccccagtgtatttaatcttctagctgtgggcttttttaccttatgaagttgaaggaaccacagaggccaagcctcagcgaagccacaggccaggggctgggggagggggacaaactagtattttgt

SEQ ID NO: 2063 - DNA, 3297 bp, Rattus norvegicus
  misc_feature (2798)..(2798): n is a, c, g, or t
cagctccggcgggcagcaggcgctggagcgcatcgcagttcagctcagcgcagcaccatcggtctgcggagcggactgagctagaagcggagcgctgacgccggaggcgtgcaatgaggagggcaggtgctgcctgcagcgccatggaccggctgcgcctgctgctgctgctgattctaggggtgtcctctggaggtgccaaggagacatgttccacaggcctgtacacccacagcggagagtgctgcaaagcctgcaacttgggcgaaggcgtggcccagccctgcggagccaaccagaccgtgtgtgaaccctgcctggacaatgttacattctccgatgtggtgagcgccactgagccgtgcaagccgtgcaccgagtgcctgggcctgcagagcatgtccgctccctgtgtggaggcagacgatgcagtgtgcagatgtgcctatggctactaccaggacgaggagactggccactgtgaggcttgcagcgtgtgcgaggtgggctcgggactcgtgttctcctgccaggacaaacagaacacagtgtgtgaagagtgcccagagggcacatactcagacgaagccaaccacgtggacccgtgcctaccctgcacggtgtgcgaggacactgagcgccagttacgcgagtgcacgccctgggctgatgctgaatgcgaagagatccctggtcgatggatcccaaggtctacgcccccggagggctccgacagcacagcgcccagcacccaggagcctgaggttcctccagagcaagaccttgtacccagtacagtggcggatatggtgaccactgtgatgggcagctcccagcctgtagtgacccgcggcaccaccgacaacctcattcctgtctattgctccatcttggctgctgtggtcgtgggccttgtggcctatattgctttcaagaggtggaacagctgcaaacaaaataaacaaggcgccaacagccgccccgtgaaccagacgcccccaccggagggagagaaactgcacagcgacagtggcatctctgtggacagccagagcctgcacgaccagcagacccatacgcagactgcctcaggccaggccctcaagggtgatggcaacctctacagtagcctgcccctgaccaagcgtgaggaggtagagaaactgctcaacggggatacctggcgacatctggcaggcgagctgggttaccagcctgaacatatagactcctttacccacgaggcctgcccagtgcgagccctgctggccagctggggtgcccaggacagtgcaacgcttgatgcccttttagccgccctgcgacgcatccagagagctgacattgtggagaswckakgcagcgagtccactgccacrtccccagtgtgaactcacagactgggagcccctgtcctgtcccacattccgacgactgatgttctagccagcccccacagagctgccccctctccctcggggatggcccaacggtcagaacggagcatctctgtgcagggcctctgtgttcccactcctgactccgttgctgctcccgagggggcccttgcttctgaccaccctctcctcagcaagagagagagagaggaccacccgagcctgacttgctccatttccatctcaggcctttccttcctttctacacattagctgtgtcagatctgggggtttgacactaggagaagggagcgggggcacccctaagactcaggaggtactgaagaaccagagccatggactccacactgtgaaccggagaacaaggggcggggcattgtggtaggctagaccttccttagcccctcccttctcccctctggccaaagaagaggattacggacctatctgagctgaaagcaggtttggaacccagcccacacttctctctcacacacaggatggtaaaacccagagaaaggcagggactgacctaggccacccaaccacaggaagaacaaatgaaggctgatacactccgtttctgaawrarrrmrwmaarwrtgcttgttgacagggatggcgtgactttcagggaaatatctggaagccatgtctgccccgccctcaaccacttccaggcccctacccaacccttgtgcagatgaactgtttgttcaagggctggtccattggtctattctgatggagtcaagctaagggctcaggcttatccataaggcatttgtggagagatgaatctgttagtgcgctcattcttggcataagcctgaagccaacacggcccttaatgtcagccctcggggtcaggaaccaaggactcccaccccacaatccaacactatactacattacacacacacamacamacacacacacacacacacacacacacacasagatatcttgcttttctccccatggctcttttggggctgagactagatcctgctgggagtcactgccagtragagatccggaggggacagagctgagcttcatggggctgwcttcctcgcccccgggtctggcaggccaagaatgactgcatctragctggtgtctgtyttccaatggcctgtgcgtggaggaaatgctcccactcctccccttcttgaagctgcccccagaagactacagtgcaaaagagcagactggtgtragaacacaagaaaaagcagatgctggccctgcagtctgtggcagctttytcctcagcttcaaggcccctgcaaaggacggrtttyctgagcacggccagkaaggggcaagagggttcggwtcagtggcgctttmtcccggytccttggcctgwkmbrnkdkgmwtgmtgwtgraatgagtgggcaccccctctatttagcatrwrkkwgsmycwggcagggtmtsymcagmhtkryywysrkccctccccacccagggtccacccaacccggtgaagagaccaggagcattgtacgcatacgcgggtggtatttttatggacmccaatctgcaattcccagacacctgggaagtgggacattctttgtgtatttattttcctccccagragctggggagtggtggggggctgcaggtacggtttagcatgtgtttggwtctgggggtctctycagccttgttttgggccaagttggaacctctggccctycagctggtgactatgaactccakaccccttcgtgctycccgacgccttycccttgcatyctgtgtaaccatwtygttgggccctyccaaaacctacacataamacatamakgakgaccattaaatwkgcvmaaaaraamvdddrmrwmmraaaaaaaaaaaaaaaaa

SEQ ID NO: 2064 - DNA, 7323 bp, Rattus norvegicus
aaagtatttgggaggaggggctgagctgtggttcagtaggtagagggcttgcctggagtggatgaggccttaggatctatccagcgctccacaccagctggagatggccgcacacgataatctcagccctcaggaggtggggcaggaagacaaagcttcaaggccatccttggctttgtagtgaccacactggcctgtgtatgggttacttaggaggacaggaaggtcaagtcctacctgggcatagaggggacagaaaaacagacagtacaaacacgatctagggatgtctctcagcgatagaatgctcacttagcatggagaagaccttgagttcaactcccaggtcacacacacaaaagagagaggtgaactggtggccagtgatgtgacaggcgagtggttgctgtcactctttgtcatgggaatggtccagtgtagagtggagcttttctgagcctacacagttgatctgaggtggaactgtcgctagaatccaggacccttcaggtttgtccagatatgtccttaaagcctggtgctcaggggacacagtcatcaggacccaagtcctgtcccctgcatcagtcaccacggttgctggaaggtgtgttggaaaagcaccagaggagacattgcggctagcattccaaaagctggtacatgaccaaaatgcaaaagagactggtaaaaaggagaaatggtcaccaagcccttaccctgagccagcccatcagagccctagctggcatccaccattcaggtaacaacacaggctcacctaacctccaggccactgggtctcttgcctccagagagtgaagagtcaaaaggccatggctagtcaccacagaaaggcagccctaagcactgtgctttgggtagtgagcttcacacaagcctaggtttcttgttgagggacactagcagcacaggacaaggccaggtagatgccccccacctcccagatgtacgtgtctaagagggccaacagggcacagtgttgagacaaggatactccacacacatccaggagcctcgctgctcatagccccaaatctcttgccacaagaacagatattttggacctattaaataacaaaattcagccaagtattccaaagcaaagtagatgagactccggaaggttctacagatggaaagttatagtatykktttcacagagtccaggggttgattcatataatttgtcgcaggcatagctgtaatatttggaagcattaacaggggctaggggtcccattgtggcaaacttctaaacctagkgtagttgctcctgtatgtatccatcctctgagcagtgtggaccaagcttcttcaggggcaggccatccacatcactctaaactttaatcgtccattcttttttctagacttcacgctccccmttagaagctcagtcttttccaagtattggggtgggggtgggggtgggggtggctttcctggatgaagcctkaagggaggtcgactttgatatactgaaattmataagctctgtgtgtgcgtgagcgygtgtgtgtgtgtgtgygtgygtgtgtgyrtgcatrtgwktatatgagwgtgtgmargtawttgtaggagctagaagacaacctcagctctcgtctctcagccacccaccatctctcaccagtccgaaacctgcctwgtaggctagctggctgaccagcaaaacccaggcatattcctgtctttgcctccctccctagatyttwttataagtgtgtgtcaccacacccagcattttatcactgaccaattgactggtatgtgtggggggagggggcgtgtgtgtssatssatgcatgcatgctcagtggtacacatgtggaggtcaggggacaatttatgggagtttgttttctccttccaccgtgtaggttccaggaatccaactcagatcgccaaacttgcgggtaagttccttaacctgctgaactatctcaccaacccasscccassgtttgaacttaggtccttgtacgtgcaaggcaagcactttgrcgactcagccatctccccagcccagccacttgatttgtaactcatttattcactcaacagtctatttgttcgctcaacttttgaggscacaccacacactttttgggtgrctcttacttggtgtaccttagacaaaggcaaaacaygargctgagctgaatttgggaaccatgggatgatgagyggaccctggcgggatatgccagggggattttccctctctctgtttgttccttytcccctaatactgtcaatatttcactttcataatggaaaatcccatgccatgtatgaatcgttgtaggaaattataatttgctcgtttttgtttgtttttcaaaacagggtttttctatgtagccctagtttgtcctagaactcactctgtagaycagactggcccmaactcagggatctgtctttctctgcctcctgaatcctggaagtaaaggcgtgtgccaccasacctaggtagggtwttataattcygkatataagaagtcacacttaattccgctgtggggggraaaaaggyttctctcagcacagccctacccactatgctgcccaaactaatttactagtagtggggaaaatgagggtcagacagcatcccaggggccccgctgtgccacagcttgcctttctagaaaacctcccgatgaatggttcctgggcgwgttggaatattggcaccatctaaccgcactggtcatttggaacctggactttttttccggcatgatccacactgccagtaatccacagatttctggacttctgctacaaactgcaaatgagrgaacagacagaaatgaaccagagwgctccrtgcccagaacaaaatccccrgcagctgcargccarggtctgtggtgcagctaagaraagcytccctcctagtgagtcccagttttcaagaggccactcgctgccaagggaccattgccttggactggggaccaggaagaggtggcctcaccgaagatacaccacagagtgaygtaataatgcatacagactaggagtgtccatckcgaatgagctaacttgcacaccctactggggactctccctttgggaacagtgactttatgcaaaacagctctgcagagcgtggatgggtataaatacctgatggctactgtcagggccacagctttacagggagttgaakwcygrgactctggccccacrrgmywcmgtgtcgctggtttgaaacttctyarccaccttggtgaggggactggacttttwgagacrcttctgaggytcctcaggcttgggtcttgttagcctmsycwwcywcaagsyscayggagaacassagagttggtgcagaagcmmaaagtcacagacatggcttgcccytggaagtttctcttcaragtcaaatcytaccaaggtgacctgaaagaggaaaaggacattaacaacaacgtggagaaaaccccaggtgctattcccagsymarcaacacaggatgaccctaagagtcacaagcatcaaaatggtttcccccagttcctcastkkrmctkcwyagaatgttccagaatccctggacaagctgyatgtgactccatcgacccgcccacagcacgtgaggatcaaaaactggggcaatggagagatttttcacgacacccttcaccacawgkccwcytcggwkakctctygcaagtccaaattatgcatggggtccatcatgaactccaagagtttgaccagaggacccagagwcaagcmcaccccagtggaggagcttctgcctcaagccattgaattcattaaccagtattatggytccttcmmmsagkmarwmatagaggaacatctggccaggctggaagccgtaacaaaggaaatagraacaacaggaacctaccagctcactctggatgagctcatctttgccaccaagatggcctggaggaacgccyctcgctgcatcggcaggatycagtggkccmacstgyaggtmktcgatgcccggagctgtagcactgcatcagaaatgttccagcatatctgcagacacatactttacgccactaacmktgkcwrsrkmaggtmggccattactgtgttcccccagcggascgatgggaagcatgacttccggatctggaattcccagctcatccggwwcgctggctaccagatgcccgatggcaccatcagaggggawcctgccaccttsswsttcmcycagtwstgcatcgacctgggctggaagccccgctayggccgcttcgatgtgctgcctctggtcctgcaggctcacggtcaagatccagaggtctttgaaatccctcctgatcttgtgctggaggtgaccmtgsmkcmtsccargtamgwgtggttccaggagctcgggctgaagtggtatgcgctgcctsccgyggccaacatgctcctggaggtgggtggcctcgagttcccagcctgccccttcaatggttggtacatgggcaccgagattggagtccgagacytctgtgacacacagcgctacwrsmtyctrsaggwrrygggcaggagsatgggcctggagacccacacaytggcctccctctggaaagaccgggctgycaccgagatcaatgcagctgtgctccatmktttycagawgcagaatgtgaccatcatggaccaccacacagcctcagagtccttcatgaagcacatgcagaatgagtaccgggcccgwggaggctgccckgcagactggatttggctggtccctccggtgtccgggagcatcacccctgtgttccaccaggagatrttgaactacgtcctatctccmttctwytactrccagrtcrrgccctggaagacccacatctggcaggatgagaagctgaggcccaggaggagagagatccgrttyaswgtytkksysaawrcgktgttctttgcttctgtgctaatgcggaaggtcatggcttcccgcgtcagagccacagtcctctttgctactgagacargraagtcggaagcgctasscagggacctggctkccttgttcagctwsgystkcmacamcaaggtwsyctgcatggamcagtataaggcaaacaccttggaagaggaacaactacygctggtggtkacaagcacatttgbsaatggagactgccccagcaatgggcagrctmkgwagaaatctctrttcatgatgaaagaactckgkcmtaccttcaggtatssggtatttggcctgggctcyagcatgtaccctcagttctgtgcctttgctcatgacatcgaccagaaactgtctcacctgggagcctcccagcttgccccaaccggwgaaggggacgaactcagcgggcaggaggrcgccttccgcagctgggctktscwaacyttccrggcagyctgtgwgmcgttcgatgtycgaagcaaacattgcatycmgatcccgaaacgctacacttccaacgcaacatgggagccagagcagtacaagctcacccagarcccagaghcwckwgwcstcwmcwvagstmycagsagcwtccwcrmcaagaacgtgwtcaccatgaggctgaaatccctccagaatcygcasmktkwswwstsyagsyrmrscaccctccttgttcaactcaccttcgagggcagccgaggccccagctacctacctggggaacacctggggattttcccaggcaaccagacggscctggtgcaagggatcttggagcgagttgtggattgttcttcgccagaccaaactgtgtgcctggaggttytmswtsmraktrgsagytactgggtcaaagacaagaggcttcccccctgctcactcaggcaagccctcacctacttcctggacatcactaccyctcccacccagctgcagctccacaagctggsccgctttgccacggaagagacgcacaggcagaggttggagsccttgtktcagscctmagrgtacaacgattggaagttcagcaacaaccccacgttcctggaggtgctggaagagttcccatcattgcgtgtgcctgctgccttcctgctgtygcagctccccattctgaagccccgctactactccatcagctcctcccwggaccacaccccctcggaggtccacctcactgtggctgtggwswsytatcgcwyscgagrtggwcagggtcccctgcaccatggcgtctgcagcacttggatcaataacctgaagcccgaagacccagtgccctgctttgtscgsagtgtmagyggcttccagctccctgaggacccctcccagccctgcatcctcattgggcccggtacaggcattgcccccttccgaagtttctggcagcagcggctccatgactctsrkydcagaggkmtcaraggaggccgcatgaccttggtgtttgggtgcaggcacssagaggaggaccacctctatcaggaagaaatgcaggagatggtccgcaagggagtgttgttccaggtgcacacaggctactcccggctgycckswrmwymcaaggtmkacgttcaagacatcctgcagaaagagctggccgacgaggtgttcagcgtgctccacggggagcagggccacctytatgtttgtggcgatgtgcgcatsgctcgggatgtggctaccactttgaagaagctggtggccgccaagctgaacttgagtgaggagcaggttgaggattacttsttycmsctcaagrkmyrgaaacgttatcatgaggatatcttcggtgcggtcttttcctayggagyraaaaagggcaacrccttggaggagcccaaaggcacaagactctgacacccagaagagttacagcatctggccctaaataaaatgacagtgaggggtttggagagacagaagtgcgatcccccccaamcccctcacatcatctcccctcctctaccctaccaagtagtattgtwctattgtggactactgaatctctctcctctcccccgtcccctattctcccttccctcccgttttctctgcccctcccccacattctctttcctttgcctcatacttcctcagagcygrsassagrggaaaatgaaccacccgactgaagcactttgkgtgaccaccaggaggcgccatcccgctgctctaatatttagctgcattgtgtacagatatttatacyttgtatttaagaaaacataccttcgtccactcccaacgaccgcttggcccttccgtgtataattccttgatgaagatatttatataaaatgcattttattttaataaaatgagtgtttgatcaarwwwwrmarmraaarm

SEQ ID NO: 2065 - DNA, 557 bp, Rattus norvegicus
caagctcattcctcgcagaggcgcccagagcagagcacccgctgcgcagagaccacagcccgcccgccatgatgctaggtaacaaacgaatggggctgtgtggactgaccctcgctctatccctgctcgtgtgtttgggcattctggctgaggggtacccctccaagccggacaatccgggcgaggacgcgccagcagaggacatggccagatastactccgctctgcgacastacatcaatctcatcaccagacagagatatggcaagagatccagccmtgagacactgatttcagatctcttaatgagagaawgcacagaaaatgccmccagaacaaggcttgaagaccsttccatgtggtgatgggaaatgaaacttgctctcctgactkttyctagtttccccccacatctcatctcatcctgtgaaaccagtctgcctgtcccacccaatgcatgccaccaccaggctggattccgacccatttcccttgtkgkcgttgtatatatgtgtgtktaaataaagtatcatgcmttcaaaaaaawaaaaaaaaaa

SEQ ID NO: 2066 - DNA, 1423 bp, Rattus norvegicus
gagcgctgcagcctgcgacgtcggggccgtggcctccgttttccgcgcgccactcgctgggtccctgcgcccagggcgcacggtggagacggacgcggaggcgccatggagccggtgccttctgcccgtgcggagctgcagttttcgctcctcgccaacgtctcggacaccttccctagcgccttccccagtgcgagcgccaatgcgtcggggtcgccgggcgcccgcagtgcctcgtccctggctctggccatcgccatcaccgcgctctactcggctgtgtgcgccgtggggctgctgggcaacgtgctcgtcatgtttggaatcgtccggtacactaagctgaagacggccaccaacatctacatcttcaatctggccttggcggatgcgctggccaccagcacactgcccttccagagcgccaagtacctgatggaaacgtggccgttcggagagctgctgtgcaaggctgtgctctccattgactactacaacatgttcaccagcatcttcacgctcaccatgatgagcgtggaccgctacattgcggtctgccaccctgtcaaggccttggacttccggacaccggccaaggccaagctgatcaacatatgcatctgggtcttggcttcaggtgttggggtccccatcatggtcatggcagtgacccaaccccgggatggagcagtggtatgcacgctccagttccccagccccagctggtactgggacactgtgaccaagatctgcgtgttcctcttcgccttcgtggtgcccattctcatcatcaccgtgtgctatggcctcatgctgctgcgcctgcgcagcgtgcgcctgctgtccggctccaaggagaaggaccgcagcctgcggcgcatcacgcgcatggtgctggtggtggtgggagccttcgtggtgtgctgggcgcccatccacatcttcgtcatcgtctggacgctggtggacatcaatcggcgcgacccacttgtggtggccgcgctgcacttgtgcattgcgctgggctacgccaacagcagcctcaacccggttctctacgccttcctggacgagaacttcaagcgctgcttccgccagctctgtcgcgcgccctgcggcggccaagaacccggcagcctccgccgtccccgccaggccaccgcgcgtgagcgtgtcaccgcctgcaccccctccgacggcccgggcggtggcgctgccgcctgacctacccggccctctgcttaaacgccccwcccaagtgaagtgatgcagtggccacaccgagctccctgggaggccatggccaccattgggacagctagaatagggcccacacggggggggggaggcctcccatgagggccgggcctgaggaatcaaaggctccgggttggaggggtgggggttgggagggcagagctgg

SEQ ID NO: 2067 - DNA, 760 bp, Rattus norvegicus
agcagagtgtggcattctccccacattctcttcggctttacggagcagcaaacaggatggcgaagatgagcctctcttcctacatgttaatgctggccttttctttgttttctcacggcattttactttcggcctccaagtccatcaggaacgtagaagacgacatagtatttaatacattcaggatggggaaagcctttcagaaggaagataccgcagaaagatcggttgttgctccttctctggaaggatacaaaaatgatgagagcggcttcatgaaggatgacgatgacaagaccacaaagaacacaggctccaagcagaatctcgtaactcacggtctgcccctcagtctggctgtaaaaccttacctcgctctgaaaggaccagcagtcttcccagctgagaatggagttcagaatactgagtccacacaggaaaagagggaaatyggggatgaagaaaactcagctaaatttcccataggaaggagagattttgacatgctmaggtgtatgctgggacgagtctaycgaccctgttggcaagtctgatacctgctggtccacaacatcctttcagaagaaaacgattcattgcaagtggagagaaaagcccttaatgttgatgtaacttgtgtatcatcctaaatgtctgttttaaaagaaactggttacaatatgtaaatgctatgtaaatgatatgctttgacttgtgcattaaacttcacaaaaattctgcwtaaaaaaaaaaaaaaaaa

SEQ ID NO: 2068 - DNA, 1422 bp, Rattus norvegicus
ctcagcccagccgcatctcagagamggbrcgrsrgcgagctcccgccgcgtcgcagctcggtgccgcagagaggccggtggcaggcggcaccgcgagggacctggcccggcgccgcaagcgtctctagcgcgcagctggggtcatgatatactggaaaccacacaagattagtmtggggaggcagaaaccataaagcccctgagactaggttcggagaggaaagataaaggaaagaccccctctcagcttcaccctttacctgtctcagaaacaacagcccattttaaccacagatttactctgtgatgaggacagattcatcggagatgactgatgtggaatctgtaatcagcagcttcgcgtcttcagcaagggcgggccgccgcaatgccttacycgacatccagagttcactggctacaggtggatcccctgatcttgcactgaagctggaggcattggctgtgaaggaagatgcaaaaawraaraawraaragaaagaccaaggccaaccgaagaagcccctagacgaagacaaataaaggcttagaatttawmaarrrwrwwrawwwtatgcacattgagagacatagctatgcattcctggggtgtttgatctggtagtaaccatggtaacccatggtwryststgtgtgtgtgtgtgtgtgtgtgtgttttcagtaattttgttatgatgctatccttaaactgcagctatgatactkaaatagaatattaaaagttattaccttcaaattgcacccaaggaaggacacactgtttatatcccaacaatatcctatctgtctatcgrgatttacttagtcagatatatgtttaattctgtctkagcaagttagaacctttttcttggtatgtataaatggatacctattaatttaatactttgtagaatttgtaggaaattatatttttggtgagatagaattagtmgtaaaaaaatcmctsttataaaatgtgtttatttttcattaaaattgcrccatatttcctgcaaaatattwggagagatctggaaatattgtaaaagttgtaacaacttaaacatctctatgatgtttttgtytaatgtattwtgcatstagtytsratgtattgtgatttttaatatggactcmcataacataaaatttgtgacaaacttgcttaaaagaaacatgtrtattgaataaatctcmctatattccttaamwwrrwwawawrwswgcttctcattttaatatggattgtacaagatattgtgctctttttcttagactgtttgtctctaggtttttgtgtgtgtacgcaaattgttgctagagtaatttcatcaggaatgctggtcttagtttttatatttttccaaagtataatactataagttaaaatagcaaaataaatgcttttaatatatgttt

SEQ ID NO: 2069 - DNA, 1110 bp, Rattus norvegicus
tttttttttttttttttgcctgtgcggtttgagagaggcacagttggaggcgctgattcctacaaaagtccccagagccagcgagcggcacgatgctgcggaggctggttcagcagtggagcgtcctggtgttcctgctcagctactccgtgccctcccgcgggcgctcggtggaggggcttggtcgcaggctaaaacgcgcggtgtctgagcaccagctactgcatgacaagggcaagtccatccaagacttgcgccgccgtttcttcctccaccatctgattgcggagatccacacagctgaaatcagagctacctcggaggtgtcccctaactccaaacctgctcccaacaccaaaaaccaccctgtgcggtttrggtcagaygaygagggcagatacctaactcaggaaaccaacaaggtggagacgtacaaagagcagccactcaagacgcccggsamgargaagaaaggcaagccggggaaacgcagagaacaggagaaaaaaaagcgaaggactcggtctgcctggccaggcacaactgggagtggcctgcttgaggacccccagccccacacctccccgacctcgacctccctggagcccagctcaaggacgcattgaaactttcaccgaagatcttccaaggacacgttacaggattctgtaatagtaaacatatggaaartattagacatatttattgcctgtacatactgtaaatgcattgggatcaaactgtctccccaggaaactgcacatgggtcatgtgaatatttttccttctytttttttttttgccaaggctaatccaattattactgtcactgttaccataatttattttgtcaactgatgtatttatttgtaaatgtatyttggtgctgctgactctgtttttttgtaacataatgcactttaggtatacatatcaagtatgtcgatgaatttaacmcgaaaaagtgtctmtattttgtggttcattttgatgagttctgaaatrtaattatctagactgatctccctctgsgcatgtaaaaatggcagtattttaaatttgtaaagaatgtctaataaaatataatctaattacmmmrwramwwaaaaa

SEQ ID NO: 2070 - DNA, 4141 bp, Rattus norvegicus
agccgctgctggsgaggwygrggckgasgwggtggcgggcgacgggcctcgagacgcggagcgacgcggcctagcgcggcggacggccgagggaactcgggcagtcgtcccgtcccgccatggaaatggagaaggaattcgagcagatcgataaggctgggaactgggcggctatttaccaggatattcgacatgaagccagtgacttcccatgcagaatagcgaaacttcctaagaacaaaaaccggaacaggtaccgagatgtcagcccttttgaccacagtcggattaaattgcatcaggaagataatgactatatcaatgccagcttgataaaaatggaggaagcccagaggagctatatcctcacccagggccctttaccaaacacrtgcgggcacttctgggagatggtgtgggagcagaagagcaggggcgtggtcatgctcaaccgcatcatggagaaaggctcgttaaaatgtgcccagtattggccacagaaagaagaaaaagagatggtcttcgatgacaccaatttgaagctgacactgatctctgaagatgtcaagtcatattacacagtackgcagttkgagttggagaacctggctacccaggaggctcgagagatcctgcatttccactacaccacctggcctgactttggagtccctgagtcacctgcctctttcctcaatttcctattcaaagtccgagagtcaggctcactcagcccagagcacggccccattgtggtccactgcagtgctggcattggcaggtcagggaccttctgcctggctgacacctgcctcttactgatggacaagaggaaagacccgtcctctgtggacatcaagaaagtgctgttggagatgcgcaggttccgcatggggctcatccagacggccgaccaactgcgcttctcctacctggctgtgatcgagggtgcaaagttcatcatgggcgactcgtcagtgcaggatcagtggaaggagctttcccatgaagacctggagcctccccctgagcacgtgcccccacctccccggccacccaaacgcacattggagcctcacaatggcaagtgcaaggagctcttctccaaccaccagtggktgagcgaggagagctgtgaggatgaggacatcctggccagagaggaaagcagagccccctcaattrctgtgcacagcatgagcagyaygagkcaagacwctgaagttaggaaacggatggtgggtggaggtcttcaaagtgctcaggcatctgtccccactgaggaaragctgtccccaaccgaggaggaacaaaaggcacacaggccagttcactggaagcccttcctggtcaacgtgtgcatggccacggccctggcgactggcgcgtacctctgttaccgggtatgttttcactgacagactgctgtgaggcatgagcgtggtgggcgctgccactgcccaggttaggatttggtytgcggcgtytaacctggtgtagaagaaacaacagcttacaagcctgtggtggaactggaagggccagccccaggaggggcatytgtgcactgggctttgaaggagcccctggtcccaagaacagagtytaatytcagggccttaacctgttcaggagaagtaraggaaatgccaaatactyttbttgctytcacctcactcctcccctttytbtggttcgtttgtttttggaaaaaaaaaaaaaaraawtmcaamamawwrwwrwwwwwaacatttataaaggcaggtttttgttatttttagagaaaacaaaagatgctaggcactggtgagattctcttgtgccctttggcatgtgatcagattcacgatttacgtttatttccgggggagggtcccacctgtcaggactgtaaagttcctgctggcttggtcagcccccccacccccccaccccgagcttgcaggtgccctgctgtgaggagagcagcagcagaggctgcccctggacagaagcccagctctgcttccctcaggtgtccctgcgtttccatcctccttctttgtgaccgccatcttgcagatgacccagtcctcagcaccccacccctgcagatgggtttctccgagggcctgcctcagggtcatcagaggttggctgccagcttagagctggggcttccatttgattggaaagtcattactattctatgtagaagccactccactgaggtgtaaagcaagactcataaaggaggagccttggtgtcatggaagtcactccgcgcgcaggacctgtaacaacctctgaaacactcagtcctgctgcagtgacgtccttgaaggcatcagacagatgatttgcagactgccaagacttgtcctgagccgtgatttttagagtctggactcatgaaacaccgccgagcgcttactgtgcagcctctgatgctggttggctgaggctgcggggaggtggacactgtgggtgcatccagtgcagttgcttttgtgcagttgggtccagcagcacagcccgcactccagcctcagctgcaggccacagtggccatggaggccgccagagcgagctggggtggatgcttgttcacttggagcagccttcccaggacgtgcagctcccttcctgctttgtccttctgcttccttccctggagtagcaagcccacgagcaatcgtgaggggtgtgagggagctgcagaggcatcagagtggcctgcagcggcgtgaggccccttcccctccgacacccccctccagaggagccgctccactgttatttattcactttgcccacagacacccctgagtgagcacaccctgaaactgaccgtgtaaggtgtcagcctgcacccaggaccgtcaggtgcagcaccgggtcagtcctagggttgaggtaggactgacacagccactgtgtggctggtgctggggcaggggcaggagctgagggtcttagaagcaatcttcaggaacagacaacagtggtgacatgtaaagtccctgtggctactgatgacatgtgtaggatgaaggctggcctttctcccatgactttctagatcccgttccccgtctgctttccctgtgagttagaaaacacacaggctcctgtcctggtggtgccgtgtgcttgacatgggaaacttagatgcctgctcactggcgggcacctcggcatcgccaccactcagagtgagagcagtgctgtccagtgccgaggccgcctgactcccggcaggactcttcaggctctggcctgccccagcacaccccgctggatctcagacattccacacccacacctcattccctggacacttgggcaagcaggcccgcccttccacctctggggtcagcccctccattccgagttcacactgctctggagcaggccaggaccggaagcaaggcagctggtgaggagcaccctcctgggaacagtgtaggtgacagtcctgagagtcagcttgctagcgctgctggcaccagtcaccttgctcagaagtgtgtggctcttgaggctgaagagactgatgatggtgctcatgactcttctgtgaggggaacttgaccttcacattgggtggctttttttaaaataagcgaaggcagctggaactccagtctgcctcttgccagcacttcacattttgcctttcacccagagaagccagcacagagccactggggaaggcgatggccttgcctgcacaggctgaggagatggctcagccggcgtccaggctgtgtctggagcagggggtgcacagcagcctcacaggtgggggcctcagagcaggcgctgccctgtcccctgccccgctggaggcagcaaagctgctgcatgccttaagtcaatacttactcagcagggcgctctcgttctctctctctctctctctctctctctctctctctctctctctctctctaaatggccatagaataaaccattttacaaaaataaaagccaacaacaaagtgctctggaatagcacctttgcaggwgcggggggtgtctcagggtcttctgtgacctcaccgaactgtccgactgcaccgtttccaacttgtgtctcactaatgggtctgcattagttgcaacaataaatgtttttaaagaamaaaaaaaaaaaaaa

SEQ ID NO: 2071 - DNA, 2716 bp, Rattus norvegicus
gcccggctccctcaggtataagtatgttgaaattgcatcaatggagcacatacagggagcttggaagacgatcagcaatggtttcggactcaaagatgctgtgtttgatggctccagttgcatctcccctacaattgttcagcagtttggctatcagcgtcgggcctctgatgatggcaaactcacggattcttctaagacaagcaatactatccgggttttcttgccgaataagcaaaggactgtggtcaatgtgcggaatgggatgagcttgcacgactgccttatgaaagctctgaaggttagaggcctgcagccagagtgctgtgcagtgttcagacttcttcaggagcacaaaggtaagaaagcacgcttagattggaacaccgacgccgcctctctgattggagaagaactgcaagtggattttttggatcacgttccactcacaactcacaactttgctcggaaaacgttcctgaagcttgcattctgtgacatctgtcaaaagttcctgctaaatggatttcgatgtcagacttgtggctacaagtttcatgagcactgtagcaccaaagtacctactatgtgtgtggactggagtaatatcagacagctcttgctgtttccaaattccactgcaagtgacagtggagtcccagcaccaccctctttcacaatgcgtcggatgcgagaatctgtttcccggatgcctgctagttcccagcacagatactccacaccccatgccttcactttcaacacctccagcccttcctctgaaggttccctgtcccagaggcagaggtcaacgtccactcccaatgtccacatggtcagcaccaccctgcctgtggacagcaggatgattgaggatgcaattcgaagtcacagtgaatcagcctcaccttcagccctgtccagcagccccaacaacctgagcccaacaggctggtcacagcccaaaacccctgtgccagcacaaagagagagggcgccaggatctgggacccaggaaaaaaacaaaattaggcctcgtgggcagagagattcaagttattactgggaaatagaagccagtgaggtgatgctgtctactcggattggctcgggctcctttggcactgtgtacaagggcaagtggcatggagatgttgcagtaaagatcctaaaggtggttgacccaactccagagcaacttcaggccttcaggaacgaggtggctgttttgcgcaaaacacggcatgttaatatcctgctgttcatggggtacatgacaaaggacaacctggcgattgtgacccagtggtgtgaaggcagcagtctctacaaacacctgcatgtccaggagaccaaattccagatgttccagctaattgacattgcccggcagacagctcagggaatggactatttacatgcaaagaacatcatccacagagacatgaaatccaacaatatatttctccatgaaggcctcacggtgaaaatcggagattttggtttggcaacagtgaagtcgcgctggagtggttctcagcaggttgaacagcccactggctctgtgctgtggatggccccagaagtaatccgaatgcaggataacaacccgttcagcttccagtccgatgtctactcctatggcattgtgctgtatgagctgatgactggggagcttccctactcccacatcaacaaccgagaccagatcatcttcatggtgggccgtgggtacgcctccccagatcttagcaggctctacaagaactgccccaaggcaatgaagaggttggtggctgactgtgtgaagaaagtcaaagaagaaaggcctttgtttcctcagatcctgtcttccattgagctgcttcagcactctctgccgaaaatcaacaggagcgcctctgagccttccctgcatcgggcagctcacactgaggacatcaatgcttgtacgctgaccacatccccaaggctaccagtcttctagctgacgttatagctgttcttaggccaccaggggacgaagaagagtcagcaggcaccactttctgtttccttggggsmagaatgcatgtttcmsgarragctgctgctaaggacctagactactcacagggccttaacttcatattgccttcttttctacccttcctgccctgraaatggaagctgtccgccaagccagcytgctccagaggtakrcamgtcaksgmgkawykwkrggsmaaatggcyttggagmraraaggcrgggcactmcggytactgcagggacatgcagttgrgaacttggctcattgagctgtacagacagtggtgcagtgccagttttgcacatggagtcctggccacctgggggagcctgckttggtactacagaacttcactttgtggacacaccttcctcttactgagtytaagatgtcctgtgcagaggatkctttccaagcacggtgctccaccttytggcagcctcccacacgctgaatctgtcttccaggagctgcccctatgggktggsctsswgcccagccctatctctatagtcacatcsttgtctgtaagaaagccaggaatacaggttttcttwatgawwwwrrrwwwwaawwwwgtttttattgagcctgataaaatacagttatctgatggttcctcaattatgttattttaataaaataaattaaatttarrwwwaawrrmaaaaaaaaaaaaaaaaa

SEQ ID NO: 2072 - DNA, 862 bp, Rattus norvegicus
cacgaggtagacctgggccttttgttgagctcactctcagctggctgactgatctcagattcaaccttccaccgaaagccacatttgcctttctttctttgctctccaggaagctccttgcctgttagtaatggctggtaactttttctaggctcgagtcacctgagggattccatcaaggcaatctccccgcagcttgttccttcacggtcaccaaacgtccgcatcaaaccagaggccgccatcatgacgaaggaccagaatggaacctgggaaatggagagtaatgagaactttgaaggctacatgaaggccctagatatkgaykwkgccacccgcaagattgcagtgcgtctgactcagacgaagatcatcgttcaagacggtgataacttcaagacaaaaaccaacagcacgttccgcaactatgacctagatttcacagtgggggtggagtttgacgaacacacaaagggtytggatggccggaacgtcaagrmsctgacstgsgrwgamcasstgtgtcgwcawgtgtkcaraawgrrgwgaaggagartcgtggctggaagcagtggktcgagggagacaagctrtacctggagmtgacmtgcggtgaccaggtgtgtcgacaagtrttcaaaaagaagtgatgggcmcaggggaagcstggaacatgtgtagagttmtmtkccattstgaaaagcagcawtgrgactccmtgrttcctgacagagccccccttgcatcastgcctggrtttgaaacagggtgtgttaaaggaacctaccccctcccccttagaacctattattaaataaaaaaacaaaacatcmwmwmrrmmwwwraaaaaaaaaaaaaaaaa

SEQ ID NO: 2073 - DNA, 878 bp, Rattus norvegicus
ccccccccaacagacttttgtctcagcctgcagagattgttgacttgcatcctaagcagaagacagtctgctgctcatcatgactcgcaacaaatatttcattctgctttcatgcctgatggtcctttctccaagccaaggccaggaggctgaagaagatctaccatctgccaggatcacttgtccagaaggttccaatgcctacagttcctactgttactacttcatggaagaccatttatcttgggctgaggcagatcttttttgccagaacatgaattcaggctacttggtgtcagtgctcagccaggctgagggcaactttctggcctctctgattaaggagagtggtactacagctgccaatgtctggattggcckscaygaksccaaaaataatcgccgctggcactggagcagtgggtctctgtttctctacaaatcctgggacactgggtatcctaacaattccaatcgtggctactgtgtatctgtgacttcaaactcaggatacaagaaatggagagataacagttgtgatgcccaattatcatttgtctgcaagttcaaagcctgaaatcayctgaaaaaaatagtcatacagakccagacaagwaaatactatggagtcaaaagtgaaactagaccatctatcaaaagcaaagtcaaccccctcttcctagacaaacattcttgcctcactgccctatggtatttttatctccattattgtatgtaaccctgcacatttaaataaaaataccttcacaataaaaaaaaaaaaaaaaaatctcgcggccgcaagcttattccctttagtgagggttaattttagcttggcactggccgtcgttttacaacgtcgtgactgggaaaac

SEQ ID NO: 2074 - DNA, 2478 bp, Rattus norvegicus
tgtgctgttggaaccatggcgcctgtstgcctgtttgcgccgctgctgstgttgctcctcggaggtttccccgtcgccccaggcgagtcgattcgagagactgaggtcatagacccccaggacctcctggaaggcagatacttctctggagccctcccggacgatgaagacgctgggggccttgagcaggactctgactttgagctgtcgggttccggagatctagatgacacggaggagcccaggaccttccctgaggtgatttcacccttggtgccactagataaccacatccccgagaatgcccagcctggcatccgtgtcccctcagagcccaaggaactggaagagaatgaggtcattcccaaaagggtcccctccgacgtgggggatgacgatgtgtccaacaaagtgtccatgtccagcacttcccagggcagcaacatttttgaaagaactgaggtcttggcagctctgattgtgggcggcgtagtgggcatcctcttcgccgttttcctgatcctgctgctggtgtaccgcatgaagaagaaggatgaaggcagttacgacttgggcaagaaacccatctacaaaaaagcccccaccaacgagttctacgcatgaagcttcttcccatgagtgctgcttggacttcatggggagaggagttgaggattgtggacagtggacattggcagagagagggcaccttaatactgacttgtatctccatctctggtcacctttctggtgtcagaagagatatgatcttctactgtgctgcctcagagagagagagagagagagagagagagatgggatggggtgcggagggagtgtccgtgtgtgtgtgtgtgtgtgtgtgtgtgtgtgtgtgtgtgtgtctgtctgtctgtctgagttgccctggcagaaaaatggggttaaacttgttctttcttgaaggcaagcctggaattgggtctttttgttgttgtttcaaatttctagaatagaatgtaggaccagtttagttcctgccgttaacatgtctcatttatgactgcctttattctagaggcaaggagttgggggcaaggagctggaacccgctgcaccttgagatgtgttcacccgagtacttcctcacactacagggtctctgtggtgtatctcggggcattctaggctcagtgacttttgaaattcaaccttttttttttttttttaaatccagggagggtgggactgaagtgctgacagctcatgctgaagtacacttgtagaagatttgtaaaatgtaaggttttttttttttttttttaatggtccattccttcatgggagcgtgtgccctgggctgagagcgtggggatgcacagatgttctttctagaacatattcgttgcaacagctaactttgtgttttcatggttttttatgttttgttttgtttttttgaaaatgagagaagagctggagagatgatttttatgatttttttttgdtttgtkttttaytatttatagcttcagacggggctgcttttctctacctttctgkctttactgtttcccactattttttttttttaatgttctgtgctcttgtttttgaccctggmcctttctgaagttgctttatcttaaaaagtasctacagtgttctagcagattccmgaatataatgtasggggtakcgggatatttgtgttcttgyaatatatattatccttcctcggttctaggagaatagataaatatatttttttaggatatagaatgatactacaggtctcatgttggctgggtggctgcgtgagtgagttttcgtgcggcykmgtragctgttgccctcttctcttgccmtgmymytggtgccttctsgaratcgagytggmstgactkaggryacctgamtmtaacckcaytgtgcyttstgccgggggytctgcccaggascytmtgggtttgctttctccaggctctctagatgcaygakscaatacagtgacstcmtgtggytgtatcaatcagtycayttgactatgtgattggaaatcattccyctgttgcactgsccacacaatttaagtgcmtagtcrscatcsascgagcacagagattgaggctggtttagcaggttacggttcagttttgcttgtctccccgggcaagagaaggggacttaggaggaaggtgatgaggtcccagggactcctgtcacccaggmctctccctctkacagaggaaagacytagtagcktaaaaggtctgggctgtgtgggggtggggcggtcataccactccctcaaccatgccstatgcctgtaagcccccatcaccacctccgtgcagggtcctagctggctgggtcctcttstagccttgtgcctgctccttttctgtatcccttactctgttgtctgttactgatttttttgataaaaagataataaaacctggtactttytarawmrmmaaaaaaaaaaaaaaaaaa

SEQ ID NO: 2075 - DNA, 4591 bp, Rattus norvegicus
cgcgggactcggggctctgtcagggctggaagtggagctggagctgaccgaaggagctgccgctgggccggggtggaacacagctctgcaccggggtctcaaggagggctgtgttgctgctggctcactgcgagccgtcttcagcctgcgccgaggcgccttcccgccaggccgtctgcctctgtcttccgcctccctccatttccccggaatctcagcccggcgcggctggaccctggctctcctgtgggtggggaagccccagccttttttctgctttactcctttcccccaggctgcccttccagccttctctcgcctttttctgcggagtggggctcacccttttcggtctttagcacaggctcctcacccctcccctttagccgagttccagcaccctggtgattttccttagccaaaggtcctctccttccttcctcctttcccttgcctgtggtccagcctattctggcccttcctctttcctcaggacgtagtttccccgatttccttctctcagcctgaagttgtagatcttttggttttcctccttagtccctccaaaggtacttatcccctttttgcagtttggactttcagattgtgaatctctagaaaatgaaaataactctctaaaacatgaacttttcctagagactgccccagtctcatcccatctgcagactccttgctacctatgtcccaggtcttacacgcacttcactaagggctgaggcctcctaggctgggggatcagtatgatgctaaggtggtctggcatctggggactttatccacctcggatcttcccctccttgctggtggtggttgccttggtggggctgctacctgttctcaggagccacggcctccagcttaaccctactgccagcaccatcagaggttctgaaccaccccgggaacgctcaattggggatgtcaccacagctccatcagagcctctccaccacccagatgaccgcaatttgaccaacttatacattgaacacggcgctaagccagttcgaaaggcctttccagtcctggacattgactacttacatgtacggacacccttcgagatctccctctggattctcctggcctgcctcatgaagataggtttccatgtgatccccaccatctcgagcatcgtcccggagagctgcctgctgatcgtagtggggctgctggtggggggcctgatcaagggcgttggagagacgccccccttcctgcagtcggacgtcttcttcctcttcctgctgccacccatcatcctggacgcaggctacttcctgcctctgaggcagttcacggagaacctgggcaccatcctgatctttgctgtggtgggcacgctgtggaatgctttcttcctgggtggcctcctgtacgccgtgtgcctggtgggcggcgagcagatcaataacatcggcctgctggacaccctgctgttcggtagcatcatctccgcggtggacccggtggccgtgctggccgtcttcgaggagatccacatcaatgagctgctgcacatcctggtctttggggagtccctgctcaacgatgccgtcactgtggtcctctaccacctctttgaggagtttgccagctatgagtatgtgggcatctcggacatcttcctcggcttcctgagcttctttgtcgtgtccctcggcggggtgtttgtgggcgtggtctacggggtcatcgcagccttcacctcacgatttacctcccacatccgggtcatcgagccgctcttcgtcttcctttacagctatatggcttacctgtcagccgagctcttccacctgtctggaatcatggccctcatcgcctcaggagtggtgatgcgcccctacgtggaggccaacatctcccacaaatcccacaccaccatcaagtacttcctgaagatgtggagcagcgtcagcgagaccctcatcttcatcttccttggcgtctccaccgtggccggctcccaccagtggaactggacctttgtcatcagcaccctgctcttctgcctcatcgcccgggtgctgggggtcctggtcctgacctggttcatcaacaagttccgaattgtcaagctgacccccaaggaccagttcatcattgcctatgggggcctgcgaggggccatcgccttctcactgggctacctcctggacaagaagcacttccccatgtgtgatctgttcctcaccgccatcatcaccgtcatcttcttcacagtctttgtgcagggcatgaccattcggcccctggtagacctgttggctgtgaagaaaaagcaagaaacaaagcgctccatcaacgaggagatccacacacagttcctggaccaccttctgacaggcatcgaggacatctgtggtcattatggccaccatcactggaaggacaagctcaaccgctttaataagaagtatgtgaagaagtgtctaatagctggagagcgctccaaggagccccagctcattgccttctaccacaagatggagatgaagcaggccatcgagctggtggagagtgggggcatgggcaagatcccatctgccgtctcaactgtctctatgcagaacatccaccccaagtctgcagcttcagagcgcatcttgccagcgctgtctaaggacaaggaggaggagatccgcaaaatcctgaggagtaacctgcagaaaacccggcaacggctgcggtcctataacagacacacgctggtggccgacccctacgaggaagcctggaaccagatgctgctccggaggcagaaggcccggcaactggagcagaagatcaccaactacctgacggtaccggcccacaagctggactcacccaccatgtctcgggcccgcataggctcagacccactggcctatgaacccaaggccgacctccctgtcatcaccatcgacccagcctccccgcagtcccccgagtctgtggacctggtgaatgaggagttgaagggcaaagtccttgggctaaagcggggtcctaggacgactccggaagaggaagaggaagatgaggatggcgtcatcatgattcggagcaaggagccctcatccccaggcaccgatgatgtcttcacccccggaccaagtgacagccccggctcccagagaatacaacgctgcctcagtgacccgggcccccaccctgagcctggggagggagagcctttcatccccaaagggcagtagagccaggctagtgggtgtcccatagactctcccacgagagtgggctgggcgctccccttgtctcctgacctggtttggctctgccccctccctccgcatggcagctgggtccacacccccactgcagcacggcttgctcctgcctcctggaagcctcctctcctaccagatctgccttcccaatccatccattggcagaacagctggtgagacagccctgccccatctctagatccaggctctcccatagtggaaccaggctcctcaggccctccctcccctccagccccctcctcatccagaccaactttccatctttgatcatcatttctaaccaaagagccagtggctccactgtggtcctaccgggaaaggagggagctgaaccttccttggccttaactgggccctcctgtatcagaggacaggacagcaggcatgtggctgggaaacaagacgggtgacctatggcagacccacggttctcccactagcctcggtgctctggccagccacctgagctgtccttactcggagctgcaggctgagggcatctctgagcttctctgttgggaactggggcacattcaacagtggagtgacttgggtgatgaggaccactgggcctttctggggtttacacgggagggactgtccgaggctccggaaagtgtcgtcttcttccatttggtttatttgcacctccacgtaagtatgattctgtttgcacagaggtactccagtctttagaccctttgaatcttccctgccagtcagagctccaccctttccccctcgtcctccctcctgccgtmtaacaccttcccttaaatggaacctctgcygmssgggctctggcctgcagcactgattcagacgtggcccagcttgtcatgattcaagctcagcagcaagggtcctggtacctcccttgctcttgggcstrmktwwrmytctgttgtcctggbmcagcmccacccctsgtstagaccactctcttacctgcatcctgtagagtagacagcagtggaccctagcggcctttgctcacaggcatgtactcytacgccatgytggccagcccgtgggtgtctgtccaacccytgagcaytccytccccaggatcgtgcaatagtcagagggktccctcccaggggatggggytatgggtgcttggcccagctgtctcctctccatgcaastsctgyytwarrcagsasttgccatgsarrgtgacatsgacavccatgkrcmaagcmmcsryagccgytgcytctytgccgcytgtacrgaggaaaytgamccttttttcatattctaataaatcaatgtgagtttttrwwarraamaaaaaaaaaaaaaaaaaa

SEQ ID NO: 2076 - DNA, 3955 bp, Rattus norvegicus
cggcacgaggtgtcgttctcctaatgtagagagcacctgagcagaaagaaggctgtggtgaagaggagagaaatgctgagtgcacacacacaggcaaagacgttgtactggtattgccacaaagaggagcaggggcacacatcggggcacacacgacacatacgcacaaatctcatcattctctcccatttctgcacagcattttagaaaatgtaataaaggtatagaagcccccacattgtgccatggaagcaacatgtatttaaaacacttgatttctggcttagaattcagtttatgcctcagtaatgtctcctgcatacacataaataggtaagtgtaaacttttcaaaagtgggccattttgcaatatgggagccaagtatagtgatctaggggattctgaagttatatccattgttgctatgggaactaataccccttttctttgactcctgcctaacccaagctctgtgtttctcttaaccaggtttccatctctatcacaagttgcccacgattgtgccggagagctgtcttctcataatggttgggcttctactaggtgggattatcttcggtgtcgatgagaagtctcctcctgcaatgaaaacggatgtatttttcctatacctcctgccacccattgttctggatgctggctacttcatgcctactcgacctttctttgagaacttgggcaccattttctggtatgctgtggtaggcacactgtggaattccattggcattgggctgtctttgttcggcatctgccagattgaggcgtttggcctcagcgacatcaccttgctccagaacctgctcttcggcagcctgatctcagctgtggaccctgtggctgtgcttgctgtctttgagaacattcatgtcaatgaacagctctatatcctggtttttggcgagtctctgctcaacgatgcagtcacagtggtcctgtacaacttgttcaaatccttctgccagatgaagaccatccagaccgtagacgtgtttgctggcatcgctaacttcttcgtagtggggattggcggggtgctgattggtatcctgctgggattcatagcagcgttcaccacccgtttcacacacaacatccgggtcattgagccgctctttgtcttcctgtacagctacttgtcctacatcactgctgaaatgttccacctttcaggcatcatggcgatcacagcctgtgccatgacgatgaacaagtatgtggaagagaacgtgtcccagaagtcctacacgaccatcaagtacttcatgaagatgctgagcagcgtgagtgagaccctcatcttcatcttcatgggcgtgtccaccgttgggaagaaccatgagtggaactgggctttcgtctgcttcaccctggccttctgcctgatctggcgagcactgggtgtctttgtcctgactcaggtgattaattggttccggaccatcccactgaccttcaaggaccagttcatcattgcctatggagggctccgcggggccatctgctttgcactggtgttcctcctccctgctactgtgtttccccgaaagaagctgttcatcacagctgccatcgtcgttatattcttcactgtcttcatcctgggaataaccatccggccactggtggaatttcttgatgttaagagatccaataagaagcagcaagctgtcagtgaagagatccactgtcggttttttgatcatgtgaagactgggattgaagatgtttgtggacactggggtcacaacttctggagagacaagtttaagaaatttgatgacaaataccttcggaagcttctgattcgggaaaaccaacccaagtctagcattgtgtccttatataaaaagcttgaaataaaacatgccatagagatggcagagacagggatgataagcactgtcccctcatttgcatctctcaacgactgccgtgaagagaaaataaggaagctcacgccaggagaaatggatgaaattagagagatattgtcaaggaatctctatcaaatccgccagcgcacattgtcctacaacagacacaacctgacggcagacacaagtgagaggcaagctaaggagatcttgattcgccgacgacacagtcttcgggaaagtcttaggaaggacaacagcttaaaccgcgagcgcagggcttctacttcaacctcccgatatttatccttacctaaaaacacaaagcttcccgagaagttgcagaagaagaataaggtttcaaatgcagatggtaatagcagcgactcggacatggatggaaccactgtactcaatttgcagcccagggccaggcgcttcttgccagatcagttctcaaagaaagcctcaccagcctacaaaatggaatggaagaatgaggtggacgtgggttctgcgcgagccccccccagcgtcactccagcgcctcgcagtaaagaggggggcacccagacaccaggggtcttgaggcagcccctgctctccaaagaccaacggtttggccggggcagggaagacagtttgactgaagatggtccacccaagcccccaccaaggttggtgcgacgagcatcagaacccggaaataggaaaggccgccttggcaacgaaaagccatgatatgaagccaaagcagacttgtggtgaatgggcaagcatggttgtgacttgttactcaaacccaatcgaccgtggaatccacttaaagtcctctatccagaggcattctttgggaagtagagtcaagccactgattcatgggaggagcgctgcttatgtatcccaagaagaggaaggcagaggaaggaagtcccacaaaatgacttttgtgacttttggctagtaaatgtattctttcaaggcctgaaaggaaaaaaaaatgtgtgcctttatcgaacttgaatgacagaacttgaaaattttaacgcacctttgttggtgaaaattttaatatattacaaatatgcctcagatttatttatgaaaaaaatgtgtttatctgtagcgatcttttttttcccaagggaatgaaaacgttggcaagaacattttttccaagggggtaaaggtcagctcctagaggtgggtcttaagatccagatcccaccatcccatcctgagctgatggaccacttggtgagtagaacactgtccccagcagaggccttgcgtgacggtattagggcacaggttggaatgtataggcagatgaaatgccctgactctcagagtgtgggtgggaagtccctgtacaactttgaaacaaggaggttcagactgctctcagtccattcctgtgttttccatggctttggagtaacatgtaatctccacccccctcccttacccccgcctctgtcccaatttttatctaggtacagaaagattcacttgcacaaaatcagcccatagtgtttatagacttggtggcagcttccgagaagtcctaccagtgaggacctcttgtggccagtgtgagggcagccactagtgaccgcctgggttttatgtgtgtggtgatgggaggaaagggaggtggttcctttcattagggatccatggccacctgctttaataaaattgtcctgcagtcccttcagagctgcgagctgggaagggtcaacgtttatacgaaccgctttccagtgttaaagaaaatggtgggtctttgggtttgacttcgaatgaggaagcactttggagaaaccacccactttttgcactagtttttaatttgttacctcttcacctttgatgatgtagtgactcaaatttgtcattaaaaaaattagattccattctctggaatactttttaggagtatggcagagaggaaacagtgggacmmaatcattaaagattcatatttaaaccaatgcctctcaagctgcagatttattattaaagattcatatttaaacaaaaaaaaaaaaaa

SEQ ID NO: 2077 - DNA, 7259 bp, Rattus norvegicus
tctagaaagtaagccccacctgaggctttacccaggagcatctaaaccaggaataagacggttctcattcttttagccctcctctgggacagaaggctgggaatgcgacggggaacaacaggttcagtctgaccatatcaactgagagcaatcccagcaactcaccttacaagatgcccaaggaagtgccaagattggaaatctggtggccaattacagagttatgatgctctgttctgtgccaggccctgggatctgctcagttcaaccacccatcctctgcctaaacactcatcacccaaccacccggctctaccatcctgccatgcaagccgacgcccatcagcataagagagcgagacaaaaataagccactcagtccagtccttccctcctgggagttctcatctttgggtttagatgacaaaacgtaaccctgcccatcctgggtccaacctccagttccttacccagtcagtctcttgtctgcccgctcagtacgtcatacatgttacatacatgttactgtagagcagacactattccaagtcctggggaccagccgtgttactgcaacagcacctcacttacaaagtagacatgccatagagggcagcctgtgcgtagacagcccaggagctgaggagtgaactaagcttaggagtagagctggcagggagtcagatctcagtatgaacgctagacaccagagcargatcctaggcaggctaggtcgtgagcatggagaggtgtgtctggagcctgagagcaaggtattgacttcctgggcgagtggggaaagcggcatcaacaagggactatggtctgaagatggactgaatccgggggtaactggatctgttctctgcgcatcctaataggaggtccaaaaggggcagctgaagggtgtctagtcaagggtttccaaggcttaagtggttggaagaggagcttccagggaccatgattaaagggtaggtttggaagataaaagtgtttctacagtagccttgtgtacagttttagtggtgacttctgaagttacatcttaaagggttgttattttttttttcctgaatgaggtcataggtgggttctagggtacactaaggaggattgcataaggtaaaaccatggatcacaaagattgtgcaagggttaacacatggctttttgttgcgtttctttgagccagggtctcatgcatcccaaactggacctaaatttgttacacagccaaagcttgctttgaattcctcctcacctcccatattgcagccatgcagcaccacactggccacgataatatttttattttcctgtaaacagtttataatctaatttgtgagattctcaggcttttatctgggaaagggattagagtcacgtgtgcttaggcattaaaggtggttcactgtcatttaaaaagtttttaaaaaatatttcgctataaaaaatactgaatatatgcaaatttttaattgtgatggaattcttgactctcacttggcgggaggtttgataatactctggaatgagaaagaaccctcttcccatcctatgtccccttaattttctgtctttctttactgccccaatttacttagatgccatggtgttctacccgcggattccaggttctcaatggagaggggccttgctgagtgtatataacggggtgggggtcgggggyggtgcagtgtaccctgtaactagcgcaaaccaaccggctgctgaagttggccaaggcgggagaagcaggtcccacttaacgggtagagtcgacagccgcatgcctggccgccgggaagaaaacaactgccagtgggctaggtgccactcgaccttggggaggagcgacccagaggacctcgaatccacaggtcttagctggtggctgaggagcccgcagcatccagagagccaggacttctaggctggggcccaaccaagtaggtgggcgtgagcagcacaggcgcgagaccttctaacgcagcagactgtttgcattcacgtgcgcagcgggggcgggaaggccccgccctggcgcgggagggggcagcgggattaaaggccacccgggcaggcctggggacctgactgctgccagctccgggatagcgcagagggctgtgacgaagagcgcassaggtaccacggtatgcgtgtcggctcctggagctgagcagcagcgatgtggcacccggctctgggaccagggtggaagccgctgctggcgctggccgtggccgtgaccagcctgcgaggcgtgaggggcattgaggaggaaccgaacagtggtgggagcttccagatagtcaccttcaaatggcaccacgtccaggatccatacatcatcgcactctggatcctcgtggccagcttggccaaaatcgtmwkccayskgtcccacaaggtcaccagtgttgtcccggagagtgctctgctcatcgttctgggcctggtgctgggcggcatcgtctgggcagctgaccacatcgcctccttcacactcacacccacactcttcttcttctacctgctgccccctattgtgttggatgctgggtacttcatgcccaatcgactcttctttggcaacctgggcaccatcctgctatatgctgtcattggcactatatggaacgcagctaccacaggattgtccctctatggtgtcttcctcagtggcctgatgggcgaactgaagatcggcctcctggatttcctgctatttggcagcctcattgcagctgtggacccggtggctgtgctggctgtgtttgaggaagtccatgtcaatgaagtcctgttcatcattgtttttggggagtcactgcttaatgacgcggtgactgtggtcttgtacaatgtgtttgagtctttcgtgacgctgggtggtgatgcagtgactggcgtggactgtgtgaaaggcatagtgtccttcttcgtggtgagcctggggggcactctggtgggtgtcatcttcgccttcctgctgtccttggtgactcgtttcaccaagcatgtgcgtatcatcgagcctggcttcgtctttgtcatttcctacctgtcctatctgacctccgagatgctgtccttgtcagccatcctggccatcaccttttgtggcatctgctgtcagaagtacgtgaaggccaacatctcagagcagtcggccaccaccgtgcgctacactatgaagatgctggcaagtggagcagagaccattatcttcatgttcctgggcatctcggctgtggaccccgtcatctggacatggaacacagcttttgtgttgctgacactggtcttcatttctgtataccgagccattggtgttgttctgcagacctggatcctgaatcgctaccgcatggtgcagctagagaccattgaccaggtggtcatgtcctacggtggcctgcgtggggcagtggcctatgccttggtggtacttctggatgagaaaaaagtcaaggagaaaaacctgtttgtcagcaccactctcattgtggtcttcttcacagtcatctttcagggcctgaccattaagcccctggtgcagtggctgaaggtgaagaggagcgagcagcgtgagccgaagctcaacgagaagctgcatggccgggctttcgaccacatcctctcagccattgaggacatctcaggacaaattggacacaattacctcagagataagtggtccaattttgataggaagttcctcagcaaagtcctcatgagaagatctgctcaaaaatctcgagatcggatcctgaatgttttccatgagctgaatttgaaggatgccattagctatgtggccgagggagagcgccgtgggtccctggccttcattcgctccccaagtacggacaatatggtcaatgtggacttcagcacaccccgcccatctacagtggaggcatccgtctcctatttcttgagggaaaatgtcagtgctgtatgcctggacatgcagtccttggaacagaggcggaggagcatccgtgacaccgaggacatggtcacccaccacacgttgcagcagtacctctacaagcctcggcaggagtacaagcatctctacagtcggcacgagctcacacccaatgaggatgagaagcaggacaaggagatcttccacaggaccatgcggaagcgcctggagtcctttaagtcggctaagctgggcatcaaccagaacaagaaggcagccaagctatataagagggagcgcgcacagaagcggaggaatagcagcattcctaatgggaagctgcctatggagaatctggcacacaacttcaccatcaaggagaaagatttggaactttcagagcctgaggaggccaccaactatgaagagatcagtggaggcattgaatttctggccagcgtcaccaaagatgtagcctctgactctggggcaggaattgataatcctgtgttctcccctgacgaggatctggacccaagcatcctatccagggtgccaccctggctgtcccctggggagactgtggtgccctcccagagggcccgtgtccagattcccaactctcccagcaacttccgccgcctgactccattccgcctcagcaacaaatcagtggattccttcctgcaggctgatggccccgaggaacagctccaacccgcttcccctgagtccacacacatgtgatacaggctctggcacaccacttactggacgcttgtctcgtcagtcatctgctgctgcccagcacgcattgctccctgcagggcttgcccacccacgtgccccaagccccgccccacctgagcgcacttcgactgtcacttttgcctctggtgttcctgggacagagccagagcaccgggccccacccagtgcccacgctcggtcggcggctgcgcgccgggtacacagtaggcgctcattccaaaagcctcgcccacgccgacgcccagctctgctaaaactcgcttctcttccgggctctacagaactgccactgcacgctctggagcaagaagagacgccgctgtgatcgctgcctggccgatggcccagctccgagggtctccctcagtggcccctccccaaccagctagtgttcttagggtccaacgcaccctaggagttttaatgcatagcctagccctaggaagaatcttttaatccatatggtgtcctcaggataccacattgccacctgccgtcttcttgccctggttcagttcctagggctctgtggtgctgcctccccacccctacccagaggcgagcccttgttagtgtttgccacccttattctgagaggagaaagatccatgagaggcctgtagcggacttaatcactgctggtacaaacaaaggtctcaaaaattgagatttgtagaagtggcaccacccaaatcaacctcattctaaataggcagcagttttttgtgcgtccccagaatatacacccctgtggccctatctgaccccttccaagttagttctccagactgccctatcaccttatgatcaactgcagaaatatttggctcttctagctcagactttcctgtccagccccttccagcctgggccttgccgtcaaaaacaaggtgtccggcctgaactatccctaagttgggaacactgcagatggccaggcaagctgggctaggggctagaagtggcccactggaagccttccttggtcaaaattatagccagctctggcatctatcaaaggagggctctacatcacccaggagtagaggaatgcaggaatccagtctctgaacattttgtcctgtccctaggtcttcagggcctccgccttagaacattggccctctggagggtaagaggctgggccctcagcccttatcaacttcctcagaagtccagtgttcaagagtcacctgagttttgcttccaactcactagaaactttgcctgcaccacagggagatcgagatggggctaaaggtggacttaatgacttcctggagacttctgaaacaaagcactcaggtctctgctcaggaaactaaatactgtgtctcaggaacaaggttgacagttaccttcagaggagtcacaggaaagtctgtcaatctgtattaatgctgcagttgatttgtagacaggaagagagctgggaggagtgaaagcaaagcaagtccgcccaacatactgcatctgcttcagagtgtcgcccccccccccaactgagcctgccagtatgctgttgactgtctagttcacactcagccatcagatgctcagcatctggtttccacagcccttgaagcatttgtccctttccgaattgaagtccagccactgacaatgccagggtcagtaatttcaccagactatttggagctgccatttggggtacttccaaggcaggctgtgcttggctactgtacccggggtgttctgagaggcatctatcagcctctgctctgcagacaagtttctcagacctttctgtgccaggacactgccttaacacctcatccaatctgctggacatggggtccaattcccactgcagaattagaagccaagtgtgacgagacagtgcctcagcaactgtcaccttgctccagatacccagagataccaaagctagcagccgggggtgatcaatctgtggaaccctttgacactctgtccatgttttagctgtgcacaggccatgtcctttgagtgtgtgaactacaccactgggcatagccatatggaacagtcttgacaagaaagcctcattcacaaaaccccacttcctgtacctaaatgatacatacagtggctacatttcatagttgaggaccctcttgttcttgtcattgttgtacaatagaatgtaaaatcctatgaatgtatttccttaggaaaactattgtaaaagttttttttttattaggagagaatttctatttatttaatactgaactttgacctactttgtggtactacaaagtatacaaatttaggaaatttgtatttccgcttctgtattttcttgaaaataattttattacagtgttcaatatactatgtattaataatctttttatgaaaggaaatttaaagaactcatcaaaaccagaaatatattttgagtggttaaaattgtgtattaatgttgtgaacataatcatagttgaactttaattctgatctcagaataatgtgccttaaaatgcccccatgtgttgggcagcatctgtacaaggagtccattagcaaagctgcagtgact

SEQ ID NO: 2078 - DNA, 2475 bp, Rattus norvegicus
ggacaggacccccttgagctcgcccctcagctgccaccatgagcgaccatgagcgaccaagatcactcaatggatgaagtgacagctgtgaagattgaaaaaggtgttggtggcaataacgggggtagcgggaacggtggtggtgccgccttttctcagactcgaagcagcagcacaggcagtagcagcagcagtggtggcggaggagggcaggaatcccagccatctcctttggctctgctggcagcaacctgcagcagaattgagtcacccaatgagaatgagaacagcaacaactcccagggtccgagtcagtcagggggcacaggtgaacttgacctcacagccacacaactttcacagggtgccaatggctggcagatcatctcttcctcctctggggctacccctacctcaaaggaacagagtggcaacagtaccaatggcagcaatggcagtgagtcttccaagaaccgcacagtctctggtgggcagtatgttgtggctgctacccccaacttacagaaccagcaagttctgacaggtctacctggagtaatgcctaatattcagtatcaagtaatcccacagttccagactgttgatgggcaacagctgcagtttgctgccactggggcccaagtgcagcaggatggttctggtcaaatacagatcataccaggtgcaaatcaacagatcatcacaaatagaggaagtgggggcaacattattgctgctatgccaaatctactccagcaagctgtccccctccaaggccttgctaataatgtgctctcaggacagactcagtatgtgaccaatgtaccagtggccctgaatgggaacatcaccttgctacctgtcaacagcgtttctgcagctaccctgactcccagctctcaggcaggcacgatcagcagctctggatcccaggagagtggctcacagcctgtcacctcagggactgccatcagttctgccagcttggtgtcatcacaagccagttccagctcctttttcaccaatgccaacagctattcaacaactaccaccaccagcaacatgggaattatgaactttaccagcagcggatcatcagggactagttctcaaggccagacatcccagagagttggtgggctgcaagggtctgattctctaaacatccagcagaaccagacatcaggaggatcactgcaaggaagtcagcaaaaagagggagagcaaagtcagcagacacagcamsarcamattcttattcagcctcagctagttcaaggtggacaagctcttcaggccctccaagcagcaycattgtcaggacagaccttcacaactcaagctatttcccaggaaaccctccagaacctccagcttcaggctgttcaaaactctggccccatcatcattcggacaccaaccgtggggcccaatggacaggtcagttggcagacccttcakctgcagaaccttcaagttcagaacccacaagcccagacaatcaccttggcccctatgcagggtgtttccttggggcagactagcagcagcaataccacccttacacccattgcctcagctgcctccattcctgctggcacagtcactgtgaatgctgctcaactgtcctccatgccaggcctccagaccattaacctcagtgcattgggtacttcagggatccaggtgcaccagcttccaggcctgcctttggctatagcaaacaccccaggtgatcatggagctcaacttggccttcatggacctggcggtgatggaatacatgatgagacagcaggtggagaagaaggagagaacagccctgatccccaaccccaagctggtcgcaggactcggcgggaagcatgtacatgcccctattgtaaagacagtgaggggaggggctctggagatcctggcaaaaagaaacagcacatttgtcatatccaaggatgcggcaaagtatatggcaaaacctcacatctccgtgcacacttgcgctggcatacaggggagaggccattcatgtgtaattggtcatactgtgggaagcgctttactcgttcggatgagcttcagagacataaacgtacacatacaggagagaagaaatttgcctgccctgagtgccctaagcgtttcatgaggagcgatcatctgtcaaagcatatcaagacccaccagaacaaaaagggaggcccaggtgtagccttgagcgtgggcacattgcccctggacagtggggcaggttcagaaggcagtggcactgccactccttcagcccttattaccaccaatatggtagccatggaggccatctgtccagagggtattgcccgtcttgccaacagtggcatcaacgtcatgcaggtgacagagctgcagtccattaatatcagtggcaatggtttctgagattagacgccagggccagagagacatatgggccaatacccaagcctgggatgcaagtag

SEQ ID NO: 2079 - DNA, 2118 bp, Rattus norvegicus
gaattcgggctacccccgccatgtcggctaccgctgccaccgtcccgcctgccgccccggccggcgagggtggcccccctgcacctcctccaaatcttaccagtaacaggagactgcagcagacccaggcccaggtggatgaggtggtggacatcatgagggtgaatgtggacaaggtcctggagcgagaccagaagctatcggaactggatgatcgcgcagatgccctccaggcaggggcctcccagtttgaaacaagtgcagccaagctcaagcgcaaatactggtggaaaaacctcaagatgatgatcatcttgggagtgatttgcgccatcatcctcatcatcatcatcgtttacttcagcacttaagtccctgaggagtctgccctgcctaagaagggcstmtcccccaccctcagcccgtcctccacctctcagccatatctttcagccccctcccttggatccgtgtgtgtgtgtgtccgtgtgtgtgccccctgtaaatagccagctgttatttatacatatataatattatatmtawwwrrwmwrwwwrwarttttattactagaagattttttccggttgtccttaacaccccttcctgaggttcccatcacctctctctctcaccctctgccccctttcctctttcctgttcagccccaagtcccttcaywygmrkctgctatgcaatagcccctctcctccttcccttggatttaaccaatccttcccctatcttccctgtacaattccagaccctccccaaacagagcaaaccccacagaaacaaacaaaacaccccacctgtctaggcttccataggttgcatctttgtatcccttgggagcctctaagactggtcctacttggtcctaagaatcccaaggatttctgggagcttccaacatgttgattagcatatcatttgcatacactgtcttttttttccctcggtttcttcctttctgttccattactcttcactcttctgtgtttttttttttttctttctttcttttcgraagagttagtttccattggtcctcttatcacacttttatttgcacgacattatctgcaggtggtggggagcytgggcttttggggaactaggaccccaaagttgcctcctcccagcccctctagtctagtttgcttcccttaccccatttccacacctcttgtaccctcctctccctcccccagctggtgtgtaagtgtcwyggrgttcagtgtgttatgatgggaccaataattctgccacttggggtctctccctasattcctgctccccagttttcgtgtggggcattcagctgacatttcccgggggtctccctccctcccatctgcctgatctgctgcctcctcccaccaggagaactggaggctgaccacaatctggttctttgaggaggggtggctctastgtgtgtgggggtcatcactgccttggggaggagtrggacaaaacagaaccccccctaattcctgcctgaaatctctggcctcatccttgctagaggttggactgaaaactttcctccccaatcctggggggtattaccccccatcactgcccagctcctctgactgcccccctgtattcagggtgggggtactagtcactgccaatatgtgtatgggacttgctggaggatggggatccttgtccttctmtagggctgctgagccctgagagagagagagaragagrragagagararrgaragaragarmkagaagcaagcwawwkccctgwygsrwamaawrawararaaaggatctaatckkkaaaaatggcacagttttaggggtctgagggtacagccccttaacctgcctcttgggggggggtgttccccaaactcttcccccacacacaccaggttttytgtgtggaggggaaccaaggagatbtaaactgtggtgtgaaagggtaggagagatgctgggggtgggggtgcttgtgttttasacccccaatattatcccagtgtcccctgccttccttcttcccctgccccatgcccccaattctgtggcgcatccagccgaattstgaaaatgtacaataaacgtgtawtgrgtaaaaaaaaaaaaaaaaaa

SEQ ID NO: 2080 - DNA, 2402 bp, Rattus norvegicus
  misc_feature (2119)..(2119): n is a, c, g, or t
gcaccttcgcccccgcattgctgctgctgctgctrgcagmmatggacgtggtgaatcagctggtggctggrrktcagttccgggtggtcaaggagccccttggcttcgtgaaggtgctgcagtgggtctttgccatcttcgcctttgctacgtgtggcagctacaccggggagcttcggctgagcgtggagtgtgccaacaagacggagagtgccctcaacatcgaagttgaattcgagtaccccttcaggctgcaccaagtgtactttgatgcaccctcctgcgtcaaagggggcactaccaagatcttcctggttggggactactcctcgtcggctgaattctttgtcaccgtggctgtgtttgccttcctctactccatgggggccctggccacctacatcttcctgcagaacaagtaccgagagaacaacaaagggcctatgatggactttctggctacagccgtgttcgctttcatgtggctagttagttcatcagcctgggccaaaggcctgtccgatgtgaagatggccacggacccagagaacattatcaaggagatgcccatgtgccgccagacagggaacacatgcaaggaactgagggaccctgtgacttcaggactcaacacctcagtggtgtttggcttcctgaacctggtgctctgggttggcaacttatggttcgtgttcaaggagacaggctgggcagccccattcatgcgcgcacctccaggcgccccggaaaagcaaccagcacctggcgatgcctacggcgatgcgggctacgggcagggccccggaggctatgggccccargactcctacgggcctcagggtggttatcaacccgattacgggcagccagccagcggtggcggtggctacgggcctcagggcgactatgggcagcaaggctatggccaacagggtgcgcccacctccttctccaatcagatgtaatctggtcagtgaagtycatgaagatcccacgggtgggcaakagctcaagagaaggcctgccccccttttcccatccccatatcctaggyctccacccctcaacccaggagaccctaactgtctttgctgtttatatatatatatattatatataaatatctatttawmwrwmwrarmmmwamattcacccacttctccatgcactagaggcccagtcctgaatgggctcctccccaaccctgaccttgcattcctcagcccctatctgttccccagccctgtcccttgaggtaaggggctctagaaaggggacaggaagggaaccagaccttggctgcatggagtgggttggtgtgactttctctccttcctcctctccctctgcccctcctaactctggccttggtcctccagcatcacctgaacttcagaagctctcgaatggaaatctgaccccaagagtagagcagtagactgagtggaggaggcttgggtgaaacgggcagagaggagataacctctgtagagagaggactagtcagccaagagttgaattccagacatactggatgtgcagtctaaaaggaaagtggtatcctaccgcattctgcaatggggctttaagtgaccagagagagtggttctaggaggggtgtggcttaaacacagcgggctccagagtgggcaggtttgggttggatccagcatctctagaaggggtgtgtcttggaacattcaggagtttgagcttgattccaaagagcttgagcaagggtagaagtggggttcagggatgatctaagcttgagatgaggtcctgcttaggattccagacaagcatatgaagagatgtgtggtggtctcagaagaggaaacccattctgtaatggggcwgagaagaaaacacgttttcaattgagtggagtttgagrgggtgcaggaggccatggttaggagctatgaggtgagttttgctaaaagcaggagggcgtactcctggcccctgcgaattgaggtaatgtggggaaagccaagtattgtggtttggattgtgaacaaaatgtcccttgcggactccctcaagagacagctagatcatcagaagacagagtckgcasgwstgtagggmtggtctaccttctcccccctttstntgccctctccctccasactcccgtytgtcccggaatacwtggaggctgggtctggagccccgatcctgtacsctcwgctgtgtcygtsatsttrgwartgcctgtgatcgwgtgttgcyattttgtctgactgtggtccctccctcttccctccagaccccmtamtttcctgtgcccttcggtattgtttgaagaccccctccccgaggaagagcaaatatgagaaattcccctcccccaaataaactcctcaactmcstwvwmraaaaaaaraaaaaaaaaa

SEQ ID NO: 2081 - DNA, 1215 bp, Rattus norvegicus
tcgaccagctccactccagcaccgcggcggaggagagcgaggacgcccaggcaagtgcgcacctgcggagcatcaccgggtccgaccgcaaaatccaacatgaaaatcctcgtggcggtggcggtcttttttctcgtttccactcaactgtttgcagaggaaatcggtgccaacgatgatctaaattattggtccgactggtccgacagtgaccaaatcaaggaggcaatgccsgagccctttgagcatcttyttyaragaatcgcccgragacccaagcctcagcagttctttkgattaatgggcaaacsgsmysmtgayycctcaattgaaaaacaagtggccctgttaaaggctctttatgggcatggkcagatytctcmcaaaargcataaammagattcctttgttggactaatgggcaaaaragctttaamtkywgkggyttwtraaagaagsgcmatgcrraactmcraargaaggsgtaawtaaaccctgtaacgmactwtmtattcatytcmatytgkgtccscragcagtgrgcggtaaawtaaaaakgtgcgctmtkwggratgrktatttatttwatatmwaatgktgktwtgagtgraaaactcaaaaargkgtttatttttyyatatkgkgccaataagcattgtaatyytaakgkggwgmcctcytcasacagaagtagaaattagttgtaacttcagcaaagcacagtgttgatggasttgtacaagtttgccagcgatgcaagtctcmaaagacagaaaggctgctgtgaggcagtgcaggcggctgctgctggaggcagaraaactcctgtgkgtcttgcgcttccyttggttgcttttatcctaakgatgtactgagagtttggwatctgmmtctatttgwatcctagcrscatgtttcctgkgttgkgactatmymsarmkgtttttaaaagttycaakgkacttcymtggkcttmagtcattgtawgmkgwkttgkgwwagctaccwttttwaataamagaatgtatcttcaggaattttgtcacattctttcattaatatttatgctaaccacaccatctctattaggatgagtgtgatcaagctgtttgggtaaacacttctatctctctcaggcacagtgcaaattgagtgtgcgcgcaacacacacacacacacacacacacacacacacatacctccacacacattttt

SEQ ID NO: 2082 - DNA, 4738 bp, Rattus norvegicus
ggtggcaggtgtcccggggctggcatggatggggacacaggtggaaattcgacttaaatgagtatttggctgactatggagaaagcttttcttggtcaagtcttcccaggtggctggctaagctcgtgggtctccaggctcctgctcaagagtgtcgtggagaagcccctagcacaggtgactaacctgggcgactccgctctgccgcctacagcctggacgcggctactgcgcaggggactcgggcggcgaccctgggcgcgagcactgcagggaggtgtctgaagcccggcgcttcctgcctggcccttggcccagggtggtgactggctgtcgcgatcggggcgcaggtccccgcccccggctcccagtccccacccctgcgccttcgggggcgccccaacgcgggagggtggtccgcctcgccccggtcgcctaaggcagagaggtggcgggaacctccacctctttcccgtttccgccgcgggcagcgcgctggccagtgccmccgggaggcgcggtcgtccctccgcccgcgcgccgggggccggccctgtcgcctgcgcctttttcccccgcgcacaccgcggcggcgcgcggccactcgccaaccgcaaagagcgcggtggctgcagcgccctgcgctcggaagatggtccccgcggccggacagctcgctctgctagcgctgggtatcstggyarcwstgtgtcmggskctskagaacagcacgycccccctgagtgactcacccgtggcggctgcagtggtgtctcacttcaacaagtgcccagattcccacactcagtattgtttccatgggacctgcaggtttttrgtgcaggaagagaagccagcaygtgtctgccactctgggtacgtgggtgttcgctgtgagcatgcagatctcctggcagtggtggctgccagccagaagaagcaggccwtcactgccctggtggtagtctccattgtggccctggctgtcctcattatcacctgtgtgctgatccactgctgtcaggtccgcaagcactgtgagtggtgccgtgccctcgtctgcagacacgagaagcccagcgccctcctgaaaggaaggactgcctgctgccactctgagacagtggtctgaagatcccagaggaggaatttggccaggtggccgatgacagcccaaccaaggaaaggtgtctcaggacaacaccaccagcagtgcccaggccccgggacatgctgggagaccttccccctcaatgtacaaccacctgggcagctctctgtcctttacgagcttcaaaactgtgtgataaagggtgcccagcgggcaccctagagaagaggccagtagacaacatttgaacgacaagttgaacaagaacctcaaagggctggccttcttgctaacccacaccaagaaggctgtccgtggactccaaactgtttcttctccatgggccgtctaaccccccacagagactccacgcttggtgtacaaaatggacaaggggaaacatctattgtcctttgaagacaccatggccccggcatgagccctgacatctcctcaaacggttgccaggatgatgtgtcttatgtattaggtggatgacgcggttttgtttgtattctctttatgtcagtatcgggcatccatgttaatgatccacgagcggctggctgtgaagttacaccaaatagaaatgttcagccactttgataaagtaaggctgtggggatgggagcctcccaggggctgtagagacagaactcaaaagtgcattctgctgggaaccaaactgctaccaggaggttgtgcccactaagacaggaaagtccctggatatatgctgtggcaaagttagcaagggcaagaggacaagagagcctgtgtgggcactgagggaggacgcacattccatcactcgattaagttggattagcctcctcgtgagcccagctccagcatcagccatgagccgtgggccaaatccgtgaaggtgaccccctctttattggtttctgctcatttttagaaggagaaatttacctttcctatttattttcaagcattaagagaaatagcccccctgtcttgttttgttttgtttcccctttcagaatgttggcattactaatgaaatcgctaccaagcctctccactcccctccggggaaggagctatgttccctgagcactggagggcgctctgacccattgagcccacctcctccctgtgctgctcaggactgtcaggagacagtaaatacatccagctgcttgtggaggaggccattctccaactcagaacttaaagggccctccaccctccagagcctttaacgtaacgtcaggaaaaggggtgtttgacataccaaattctcagcaagttctgcctgttcctcattcttctccattccacctttctctgtgaatgttttcttttctcatatgacctagatatcaatctgcccaggtcttaaccctggctccctttgttaacaatgcctcaagctccacaagaagaaagtgggttggttcagtgctgacctctaactactcagtcgacgtggctccaggcggaaatcgtcacttgtgttgttattattattattattttggtttgatgttttatcttgttttgtgagacaaggtcttgctgtgtagcccaggttggccttgaagttaagatctgcatgctccagcatcctgagagctgggcttactggtgtacagcaccgcacccagcagagtctttacggttattaaagaagacaggttaagtttgctttccttgggtcgtgcatgtgggtcaaggccaagtgtagcctgctgctcagacacccatcgacctcactggacgttggccctctattgggcccccaatgcagaccctgtatgaagtactagctcaccagggccaacacaaagggaggggcttgttttaatttagttcacaccgttagcttccgatgataagtctttcctggtctgttggaagctcctgggtgtctgacttcttttaaagagtttgaactgatatcaaaatatcattgggaatttcttcacctagtgtcccatcctgaagatattaccatgcaagactcagcagaggtgggaaaagttagtacaaacctttaatggtggaggcagaggatcttgggaggacctcagctttagtgtctgaacattccggttctcaggtccagccagtcacagcagccagtaccatcccagtacccatacacagatgcagccggctcaaacgtctcccagaagtgccttccccaccagtcataccctctgaagagtcagaagctgagactaagttgaggcaaatctggttggacatcgtcctgccctgacataagacagccctgcttctttggtgactctgattcttggaagtcagacaaatgctgacagcacaaatctcacagcacagttagacctgggtagctgtcccagcacctcctgtcaggtcacactggccctcttgatactcagtgcagctactgagtcaggagcactcgtcagcagacacacaggtcagtggacagtgactcagaggactgtgaacattcccattaaatggattgaaattaattctggagtcattaagagagctcagttaagaatggcacttaccaatatccctgagaacatgagttcaatcccctgggacccatctggtggaaggagagaaccaacttgcccaggatgtcttctgaattctacatacacaacacacacacacacacgcacacacacacacacacacacacacccctctagctgtaactttaaacacatgatgggacatgttctctccatgcaaaactacaatggggactcagtctgaaagatagattctaggtggacatacgcagacccaaaccataagtcagtttgtcatgtgcccagaaaaaggtggtaacaatagtcccaatgtcctttttctcctaaaaaggttgtggggaggcatggttggtacccacccacccacactggtgagggaagtgactgtgtccctgagtcttagatggtgatgttgttccctgcaagtccccaggccaggtttcctagtgcctgtgagccactaggtggaccggcaacacgctgacactgcctacaggccccagtcccatggtgaatagtaaggttacctctctcaaaggccaaggggaggccacatgagacaacacgtttttcacacagggtttcactgtatagcccaggccagcctcaaacccatgattcccctgcctcagcctactgggttacaggtgtgcactgccatacctggctcacgtttgttttttaatgttctggtgtaacatgtattccctgaagccattgatctatctcaaagacacagtgttgtacgcatacatgtgcgcacgtacacacaccaaactggaaagcgacccctctccatagtgtgataagtttattataagtttattataaggaccctatgctgtttttagaactcatctttctgacttctgtatatgatgcactgaaggttaatatgtaatattttaatttattttatgtggtaagttaattttggttttctgtaatgtattaatgtgattagaagcttttttccttaatatctgaattatacttaaagagtagtgaggaatataagatactgttgtgtattgtaccttgtttggaaggatgaaggaatgaacccttttttttttcctaaaaaaaaaaaaaaaaaataaaa

SEQ ID NO: 2083 - DNA, 4441 bp, Rattus norvegicus
acagagatcattccatggacagagctctgaagacaaaagacagtggggaaacacctggaggaatcagtgacaagccgaagaagaagaggaggtgttgtcaaagatgcaagagtgaacatgattggaagcatgtacacattttggagatagagccaaggggttggaaggtgagcaatagtgcagatggtggctattggtaagggtggcattaaaatgaacactacagttttggtcagagtaatcactttgaaatagaaaaaaatcagtcagaaaaaaatgaagaaaaatatatttaaggttgctaagtgattaaaataatagcacagggtatgccatgtttgagatgcctacaaaagtcctgaggaagatacacgacttcatatatccaccaagttttctcactcataatgatcaatcccctcacatccctcagatccccctcatgactcaggcctttcatgcttccttcatatcattacccacttttctctttctcacttttgtccaggtagactgtcatgttcgatacatgtcaaacacagcagttccttcttcccttagatcctggctctgaacattctctcttggtggtgtggacattcatagctaggcccatagttaattcctcatttccttctgtttggatgccccccccccactcaccgatgccttttcttactgctttgtcatgggtatccacaccttctgttataatgcctctctacttcactccgtacattgccatctggatattttagagcctttagtatcatctattgtctgtctcctcaactaaaatgcatgcaagctccatgaaacataggcttccatgtcatttgtatctactgatatattccaagacatgactagtgtttaacagttctgaagacttggagaaggtctaagaatttacccaacttgtcagctaaaactttagccagccaccatttagggatgtagccagaagccagacaccaagctcagacaagtgatttaattatcatgtaacaatggctcatgagtcaatatttatatcaaatgctaatttcccaaagatgatgtagggaagaccatgtgacttctaaacagaaattccttgtgctgttagaaaagaacatagaaattgtctttaaattcctagtagtttcaagaggtcagtaaccctacctgagtgttgctgggaaatatatgtctttattgttctagacagaaaacaaaaaaaaataaaaataaaaaacacaacaacttaaccctttgtgacaaagggtgacataatttcatttgtcaagactgtttgttaaacaaacaccctggaaaggagtctgaaacaaagtgatgggatctttctactgtcaagataggcagaaacatgagagaaaatagaaaattgccaccaggcttggtagatactcggtgcacactggttagtaaaggatcaatcctttggattatttattaccattattttaatttttcaatgcataaattcagacaataggaaagtgaaccaattttctaaaggcatgcagctaatctggttagtacacagccccagaacacaggagacagaactggacttatctttttctccaccctggcaccagcctattagcacttaagtaatacacagcagataaagagagaaatggtggagaggacaaaaacaggaatgtaagaatagcagaaagggaagaatagaaagcatgttcgagttccacatgtctgttcatccattcagaactacagaggagacaaacaagatctttgacttcaccaacagataagaaaaccaaagctcaggaagggaggaggctttcccaaaacctgagaggatgttgggaatcagttaacttgcttttcctggcagaatttaggtccaatcttacctgccctttttcctacctaggtaacattttccccagcctggaggccaacaaagtcaatcaataaccagagatacctattatagggcacagtgggtggagtatgtattaccatctgcctatatgaccactcctcagtttctgaagagaagcaccctgcacagttcktctgagttttggacctaggtctacaaccatgaaggtagcaattatctttcttctcagtgctttggccctgctcagtttagcaggtarscctsswsytkavdtswdtskwwaaacgcctaattgccctaagcaaattatgggatgtcccaggatttatgaccctgtgtgtgggactaacggaattacttaccccagtgaatkcmktcwrtgctytkmwracaggwraktcrkaamrtytatyywcattcagaggagagggacttgctgaakktcctgattttgaaatcttttagggctaccataatgtttagcaagaaggtttgctgaataaatgcatctgaacatattttgttcttcccaaagcttttgctcaaaggcatatatgagtatattgagaatagggatctgagaagaaaaccagagtagagcaagctttaccacttagttcttcatgctcatacttcaaaaattgcagatgatgacaacacatagttgagcatgaacatgtgtaatgaatagagtttgggttaggatgaagaaggtagcctatctgtgcacaagaaagaagtagactgacttggatctttcttaggggagtttaccaaaggaaagactgccttgtatatctacagtgtttcacttgtgagacaccacaactctgcagatttactcttgttctgtgaggaaacttagaagagtcaaattgtttgactaatagtccaacatacatgatgccagggtgttcttttagatcaagctgacctcttccttcatccatatgagcactccttcttttaaccacaatcttctcttgtggatcatgccttgactttcttcaatgggaatcctagataatattccctactgtaagatcttgcatgtctatattcagtgatagaatatagacgtgatataataggatataaccaaatgaattagaaacaaggaaatattctcaaaagggaaagtatcaacaactacttttaaaaaaggaatcattttaagatcctgagtttctaaagaaaatcttagtctaagatggaaagagagtaaagagctaacacaggtgagtctgggcaaggaaccctagtacagtggggttgggtcagcacctttgccagaaataaccaagctattcagaaatacactaggaaaggagagttgcctagtaacccacttctggtcatattcagtattcatgccttgaactgaactcttgctcctagaggatgctataactaacaaaccgagcaacttaaacagcctgacagctctcaccaaataccttgctatctcaagttatggatgcaagatggctcccagtgtctatctgtgattctagaggacacttgaagggcaccaacacttaacaaattctgtgggggtaaatttattttaatcactggatgctggaagacacacacagagacacaaacacacaaagagagacagagagagagaaagagagagagagaggtagagagagagagagagagagagagggagagagagggagagagagagtgttttgggttttgttgttgttgttgttgttgatttggaattatatcaagatataagataatctcaaatgtatctttagtagttctgctccctggacccatgagaagacaggaatgaggattctgtgcatgtggtacttacatttcaaaaggagtatctaataaactggaaactgcttaaaagaatsagaskatcagcactgataagaatataaagcttcaagctatgaagagtgattcaaagaaggaaaagaattccctcaraactgggaggaccttttaaaaaattctgagtcmccgtttctaaagtttcaccttcctaacttcatgtawtttttaatagctcaargagtccaattactgctgcwcatatactcatgagtgtgacaccatscactgttactgccaatatatgaaaggccatacccctaaagaaaattgacttaagaactcsttgttwagggttgggtacttctgtgaccctcccacattcatgctggaatgttgastggcttcatttttataaggcwaaagatcttyccrctctcttytgagagagaataaatcagttttgctcartggagtgattctgagtatactaatcacgatcccaggacaggccccattctcacaagcagttagctaacacaaatagaactccatattttatrgcagttttyatcttttgtycttggttttagttcttattttcaagacagrgaaaaacacatgaagttggaagggtagmagtggggggsggcstgggtctgggaggagttgggggatagrgaaaaathtaataaamatatatgaaattstcgaraatgawtaamtmttttaaaaaacttwmaaaaaaaaaaaaaaaaa

SEQ ID NO: 2084 - DNA, 1141 bp, Rattus norvegicus
  misc_feature (940)..(940): n is a, c, g, or t
  misc_feature (950)..(950): n is a, c, g, or t
  misc_feature (989)..(989): n is a, c, g, or t
gcagacacctcaagtcctgagtgcagrtsyctgaykcmgagramgagrwsrtgkmkkacgmsgaggaasaggwrgwggarkactggagcgargaasaggaagacgagcaagaggaggcagtggaggaggaggatggtgaggccgagcctgatcccgagggtgaggcagaggcagaggaggacaaggcagaagaggttggtcctgatgaagaagccagagatgctgaagatggtccagtagaggactccrarsccaagcccagcaggctcttcatgcccaacttggtgccacccaagatccctgacggagagagagtggactttgatgacatccacaggaagcgcatggagaaggacctgaacgagctgcagactctgmwcgaggctcacttcgagaacaggaagaaggaggaagaggagctcatttctctcaaagacaggatcgaaaagcgtcgggcagagcgggctgaacagcagcgtattcgcaatgaacgagagaaggaaaggcagaaccgcctggctgaagagagggcccggcgtgaggaggaggagracaggaggaaggctgawgatgaggcccggaakaagaaggctctgtccaacatgatgcattttggagggtacatccagaaggctcagacagagcggaagagtggraagrgacagacagagcgagagmasragragaagattctggcagagaggaggaaggtgytgsccatcgamcacstgaatgaagmccagytgagagagaagsccaaggagctatggcagagtatccmcawcytrkagvccgrsamgkkcgacctgcaggaaaagttcaagcrgcwgaaathygaaatcaacgttbtgcgaaacagratcaaygwcawccagaawgtctccmaaamtcgtggraagvcmaaastcaccgggygttggaaatagatggaactgtgtwngacaaagctntgytccttgcbtgtgcccwtgccmtgtgaatcccagctntaggtcwtrvcaggcaccygwtrcagacycctgtbtggaaagtaggagctgacstagstwgaagccagtacthtgcstgaccymtatgcccacrccacgtcmggaataaaaarccagcacmktgwrvmmvwrrvamaaaaaaamaaaaaaaa

SEQ ID NO: 2085 - DNA, 5192 bp, Rattus norvegicus
ggatccccgagaaacaaccagaaagaaccaagagtagctttcacagcagagaactggaagaaaagctattctccctgagccaccttcctctcttgggggttgggccaggaagacaccagggggtcctgcctatgctctcagctgtagcctagcaccagccttccaacctccagtggaaggaggatcagagtaaactgggcagtcatccccacgggccaccctctcaccgtgtatttacttctcctatctggtgaggagcagagcaaacgtggagtctggcttcccactcccttccgtgtacccgaaagccccccaagatctctgtcctcagagacaagaaaatgctaacaggcccgtaaggtgaagcaccagagcatttcgctcaggctgggctgaaatcgccaggaaatcgcctccctccccctccagagcagtgtgatcacaggcacatgccaccatgccccacttgctgatgggatatcagcagtctgcagcagcctaggtgacatatgggggtggcagggttgagagccaaagctcacatctggaacttgagcatgccacctcaagagctgataggactccactgccccagtagaggactaaggcctgagaggagggtgcccatgaccacaagggaggcaaacccctgattcctatgctcacagtggcttcagaaatcctagccctgaagtgctgaatggcaactactaaacagctccctcttctgaaatcctgtatctggagaaaggtctgtgccaactagcccattctttataggaagcagacattgcagggagtgcctcttacctctatgccctgatgtgtagcagaggactggatcaggatcagagggagagagaacaagggaggtggcggtagactaggaaggagaggaccggggaagccaggggtcgcttccagacttttctgtaaccgacctcaaggccacgcccacagccctagtttcccacgttgcaggttgggaagcctggagagtcctcgggaaattcccgcgcccctgctggccagaaagtgcctggagaccgacttccttcaagcggatcgcataccctacttcgcgtagggacacgcggccctctccaccgaactccgcccttcctcccaccttctatcccaccgcgccatcagccccctacatccccttctcaccatgaccactcgagctctcggaaagccatctgcacgggttccctgaaaagtcgcgcgcaaagggctacgagtcggtgaccccgcgccgcacgctagcaccgaataatccgagccctaaggacaagcgtcggagggagatcagcctcagatcccccgctgccagcccgcccaatcctggagacacagcgcgggacactggcactagctcctggggactccgggagaacggatctgtgggcagtttgggcccgcgaaagggtacaggcttccgtccccgcgggggcgctgaaacattgacttcgcctccctcacgcagtgcgcgggccgagactgagtgctctgagtgcaccctgccctgggagcggcctggaggaaccccaagtcgggactcccttgtcgcagacggttccagcagcgtgattcgcggaccccatcggagcccagcctgcagccccgtaaaactgcagcccttctcgttcaggaatctgggttgcaagctggcgtgggaaccagggagcgggccgctggaccccctggagccgacgactagaggaactcaggcccggggaccgagggtgcggccgagcttggaaaacgaggtgcaggcgcggggaactctgggcggtgtcgagcccagcgtccctgcaaggagccgagagaacgcgtgttagcgagcagctccaaacgacgcgcacctctagcgggactttgcgctcacgcccccagggcgcccaggctccaccccctacctgagccgaggcaccgcctccgccgcgccattggctaacctctccgcccgtcagacgagcccccgccgcccccccccccccccagggcctggacgttcgcctcttagcgcccgggctggcccgcgccactctcccgcgctgcaccagccacagaccccgttgccgctcccggccgcttgccgccggctcagggcggaccatgcgccctccgagcccaccgcatgtccgctggctctgcgtgctggcaggagcccttgcctgcgccctcagacccgcggksagyswggcmsccmrcccrsakcmcgagkrtgrgkamytgcrgkkgmkksrgatmcagcgtcagcagtgcctggaggaggcccagctggagaatgaaaccacaggctgcagcaagatgtgggacaacctcacctgctggccgacaaccccgaggggccaggcggtagtcctggactgccccctcatctttcagctgtttgcccccattcatggttataacatcagccgtagctgcactgaagagggctggtcacaactggaaccaggcccctaccacattgcctgcggcctgaatgacagggcatcgagtctggatgagcagcaacagaccaagttctacaataccgtgaagaccggctacaccatcggctacagcttgtcccttgccagcctcctggttgccatggctatcttgagcctgttcaggaagctgcactgtacccgaaactacatccacatgcatctcttcatgtccttcatcctgagggccactgccgtcttcatcaaggacatggccctcttcaacagcggggagatagaccactgctctgaggcctcggtggggtgcaaggcagcggtggttttcttccagtattgtgtcatggccaacttcttctggctgctggtagagggcctctacctatacaccctgctggccgtctccttcttctccgagcggaagtacttctgggggtacattctcatcggctggggagtgcccagtgtgttcatcaccatatggacggtcgtcaggatatattttgaggatttcgggtgctgggacaccatcatcaactcctccctgtggtggatcataaaggcccccatcctcctctccatcctggtgaacttcgtcctgtttatctgcatcatccggatcctggttcagaaactacggccacccgacattgggaagaatgatagcagcccatattcgaggctggccaagtccacgcttctgctcatccccctgtttggaattcactatgtcatgtttgccttcttccccgacaacttcaaggcccaggtgaaaatggtcttcgaacttgtcgtgggctctttccagggtttcgtggtggccatcctctactgcttcctcaatggtgaggtgcaggcggagctgcggcggaagtggcggcgttggcatctgcagggcgtcctgggctggagctccaaatcccagcatccgtggggaggcagcaacggcgccacatgcagcacgcaggtatccatgctgacccgcgtcagcccgagcgcacgccgctcctccagcttccaagcggaggtctccctggtctgaccgccagaggccgccaggccccttcacaccctctccacaacggcccctggagcagaggtctgtagcgacaccgttggctccagcttttcatagggacacactcctttgccgcagccaggaccgggtctatgctagctggagagcggggagctctaaccttggaggatggtaggaggatccagcatcagactccacctcccaaggccattctgccagtcatgcgcacaaaatctgcatacacctggaaagcaaccgcttgccctcaaagctttggaactcgcggggcagaaggttccgcccgccctgtggtgcctagaatccactgggacgctcgtgtcgctttgggttaagcgttgccattgagactcctctctgaggatgcagccccctccctgcgtttatctgccagctcttctgggtgggtgagttcttctacctcaggcagatggttatgacctggagtttcagtttggggatcgcagctgtgttgtggtcctctctcaggatggaattgtcccagtgtatcctcagacctgggagctcagggacctacctctggggagggagaagacaaccccagtcagtgctcaccaagtgactttgtccaacaaataggaccagtcccactagccttatgtacaaccaaagcaatatcgagctgcctgctctgggcgctcatctacacacgccaaccactgctgcaagggtcagaggcatgaacacacaggccccttgatcctgaggtcaccctaacatcactggtagtgacacctgggtctcggtgagagtgggtatcctttcccgtggctagtgcgaacgtaaagactacctttttacatagtatgatctgctggattctcttggggttgtactaccacagatgctattgccccacagtccccagttcttgctgccttggagcgtgattatgtggctgacataaaagcccaggggtcaaggcatcttaagtcctcctccacccttaattcaacacggcttctaatccaagcagttgtcagcaggcccctgcagagctgcaccaggcttgtacgacaataaacgttggctctgacaggcttagttcccctggccactgtgggtctcctgcttctcctgagaagctgtgtcacctctgcagtggtgagaggtgacccactaaagctaccacccttcactcctcggacaggcaggagccacctacttccatgggaggacttatcccaagagcctttgattcacattcgagtgtgaagagattgtgacaggggttccgttgtgaccctctctcccctaaacccatctggaaggagacagatgctgcctccgaccgaatcaaaacagccaacggagctgtcacaaacagcaagggttcacgatcattcctgaaaacacagcaaagaggatatgcagccaccaggttgctgctgtctacgggccaaccaagagggtcgggtcagtggaggtttcccagtgtaagtcagtgaggagaggccatgtggctaagggaaaggagtagacacagcaatggggcaaagcaggtgacattggtcagagagaaagagagaaagagagagagagagcactcccaagggtttgtgcaaacacacttgtgtaaacttgtggagttgtcttgctgatgaagccagaagtgtatgctggtgtgaagaagccagaatgggctagcagggggg

SEQ ID NO: 2086 - DNA, 1900 bp, Rattus norvegicus
gggggattcccaatctgcagcagagattcacccgagcgtgttgcagcggccactgggcttgcaaggcgcaatccaagagggatttaagcaacccggagctcccagaaaagaagcgagagagaaccactcacagagacggtttagccgttagkctgaattaaatatatatatttttttgaaagaacygtytagwtytatcatkwtccttaagtgacgrkgcacagcgctataactgcaaaatggggaaacagaatagcraactggccccagaagtcatggaggacctggkgaagagcactgmgttcaatgagcatgagctcaagcagwggtacaagggcttcctyaaggactrkccgagcgggaggctgaatctcgaagagttmcagcagctctatgtgaagtkcttcccctatggagatgcctmcaagttygctcagcacgccttycgcaccttygamaagaatggtgatggcaccatckacttccgagagtkcawytgtgctytgkccatcamctycagaggsagstttgagcagaaamtgmactgkgctttcaacatgkatgatctggatggkgmcsgcragatmacmarggtggagawgytggagaktatcraggctwtctacaagawggtgggcmctgtgatcatgatgaaaatgaakgaggakggcctcmcgccrgaacagcgartggmcamgatyttyagcaagakggwtaagaacaaagawrmccmgattacattggatgaattcaaagaagctgcaaaaagcgacccttccattgtattactcctgcagtgcgacattcagaaatgagctgatgtcaatgctatggactgcacagaagtcttgatgwtccattcagtctgcagctacacacacacacacacacacacacacacacacacacacactacacacacacacaattgcttggactacctatawatggacttgcttcttgwgtttgaaacacttgwgtgcatgagaatgtcatttgctaatgaattttaaaagcatatattataaaaacccahsrkrcccggatccwcaatgwgatatgwgtaatatcatttcatcaaattacatcttcctccaaagcctgggcagaagcgtgctgcaaagaattctatgatttcttgtacatgttttgctaatgcttgwgwctccttgattatataatattagtagcactgagaccccccacggtaatgtaacttattatgggctgcgtcaccattctcctgtaaaatagtactggacagacacmrgaggggccyttggcttcctgwctggcccacatacaatacacagcttgtattatmagtgaatataaatgtactacmwttgcawgccttkggktwwgccttaawtcttacctcawttgtaacctcycgatctggaaararctgttttgsatgaatrcagtatacmrcttaaaaawyctgstaamctattcattaagkataacbatctawatatctatrgacmcmaavgkrwtawatattkrmcataawmacmtaataawgggaatgtatkgatttgttysacgtttcaraggsttycagaaaggtggcaatagakgtcccwaataaatttstaawawttgatttagycccytaatwhttaayttaccmytttyagstcarkgtwmawmggsgtcarctwgtgrkgmcttactaaatstacccttacacacatctttggaatttgcagaatgactgaagggggggggggrrggaaagtcactttccaacttgtcatccagcccctcccccaaagagggctaattaatatggcatgtaacatttaaagaaaacaggagatttgttcmttytggaaaacaatgctcattatgtgacaataaactttatctcagtgtgraaaaaaaaaaaaaaaaa

SEQ ID NO: 2087 - DNA, 3481 bp, Rattus norvegicus
aaaagcacatgcccatgcctcagtctatagtcctgtaaaatgggactgatccccaggctttctctgctaagcctgagcatgggggttgaatgagtttaagcacatgaagtcttgaggactagtataactggcccatatcaggatctccacagacgctgttacagggactgacccttgtggtttctattcttagccaaggttcctttctgacttgacagcccactcacatgcccccgagcatcttcctttggttttctccatctctgtatgtcaccataccacactaggggtccggaagttaggaatggtcctttctcatcgatcctcctagattttccctagtgttcatttccaatatctcgttctcactgatcagctctgccttagctccccaatctaggccaagcttccacatcctttggatgaagttagtggtctctacagtgacctctctgcttttctttaccactctttcagccacagcctgagggatctgtgatgaatgcaaaagtgggacaggacataaagtgaggattctgactaagactctgtaggtgtctggcctccccagtgggctttgtgttctctagtctcatggtcttacgttagcacttaaacggcagagtctcccagcaccaggcctccatccagttctcttcatgctgccctacactctctacaggacaaactgctctttcacaggcaaatctcagcacatggctttcctcccacagtcttccccaccgcctagcggaccatcccacaggctgtcccctgtgggacaaccccatttgtagaaccttcacaacactgttctccactctccttcacttgtagactgttcatccatctgcaaagaaaattctccagagttgggggccagcatcatttgtgaatatgacagatgctgaccccatatatactccatgaatggctgagtgatgtcatggtgagctgtttccctgcacacccaaccttcttatctatttttcaagatgaaacacactgactaataagcaaataaaatcattcagtgtctttcatcaaatcaggtcagagctagaagagccaacccacactggactatgggtaagcctttacacaaccaagagacccgccaactcatgctgatagtgctcacccaaggcaagatctatggttgacccaatactctgctaagcatgcctctcatctcagtccagtaactgagggacttggaggtagctggtgacaaagcagacagtgctgtccacctggctaatgtctggcccccagattttgtgggacacccagagtgccctggtctgtgtcagattgacaaaggtctagagaggcaaatcctggaagaggtctttctctgaggaatggttattagaggagcagtcaatggttacaaccattttgtttcttgatgaccacaaggcccatctgtctgctcctgtttccagggaagctaacatgaatgtttattgacaacacagtcatcaagaaaataaagttgctgattcattgccttgccctgaaaccctttgttctccctctgcttccttcctctttatagagaaaggcacactctaagaaagagcccttttgggagactcactggatgggatgtttgctcattacatattccttccttcactgcctacacacagctcaggactcctataagggcaggasaysmwsmysvdmtytcctcmtagrwmraasmcctctggggtctcagaggaaaaatggaagtgttggggcttctcaagttcgaagtcagtggtaccgtagtgactgtgactctgtccgtggttctcttggccctcctgaaatggtactccacatcagcgttctcaagactgaggaagttgggcatcagacaccctgagccttctccttttgttggaaacttgatgtttttccgccagggcttttgggagagccatttggagctccgagagcgatatgggcctctgtgtgggtactatcttggccgtcggatgtacattgtcatttcagacccagacatgatcaaggaggtgttggttgagaacttcagtaacttttccaacagaatggcctcaggtctggaacccaagctgatagcagacagtgtcctgatgttacgtgacagaagatgggaggaagtcagaggtgccctgatgtctgcattcagtcctgaaaaattgaacgagatgacacctctcatcagccaagcctgtgaacttctcctgtctcacttaaaacactctgcggcatccggggacgcattcgacatccagaggtgttactgctgttttaccacaaatgtggtggccagtgtggcctttggcatcgaggtgaactcccaggatgctccagaagacccctttgtgcaacactgccagcgtgtttttgctttcagtaccccaaggcctctcctggctttaattttatcatttccatccataatggtcccattggcccggattctgcccaataagaaccgagatgaactgaatggcttttttaacacactcattaggaatgtgattgccttacgggacaagcaaacagcagaagagaggcggggagacttcctgcagatggtgctggatgcccagcgttccatgagctctgtgggtgtrgaagcctttgacatggtcacagaagccctgtcctctgctgagtgcatgggggacccaccccaaaggtgtcatcctacatccacagctaagcctttaactgtggatgagattgccggccaggctttcctcttcctcatcgctggccacgagatcaccacaaacacgctctccttcatcacatacctgctggccacccaccctgagtgccaggagaggcttctgaaagaggtggacctcttcatggagaagcatccagcccctgagtactgcaacctgcaggaaggtctgccctatctggacatggtggttgcagagaccctgaggatgtacccaccagcyttcagrttcacaagggaggcagcacaggactgtraggtgctgggacagcacatccctgcaggttctgtgctggagattgctgtgggtgccctacaccaygacccagagcactggccgaaccytgagacctttgaccctgaaaggtttacagcagaagcccggcttcagcagaagccattcacatacctgccttttggagctggtcccaggagctgccttggagtacggctggggctgctggtggtcaagctgacactgctccaggtcctacacaagttccgctttgaagcttgccctgagactcaggttccacttcagctagaatccaaatctgctctatgccccaaaaatggagtctacgtcaagattgtgtcacgctgacatagaaggcaggygygaaagaggaagcactttgtaatagtgacgtctgtgcatcactgttaggagggcgccatttatgtcacagttctaaatgttgaataaatgtttgtcatgcttcawwwwramrwwaaaaaaaaaaaaaaaaa

SEQ ID NO: 2088 - DNA, 2090 bp, Rattus norvegicus
ccacacacgctctgccttgatcacacaccgcgccactcgatcattcgagcacattccttccttccgtcttactgtctcagctcttgacttctacaaacccatggaacatttctggrwagrcgctkwkgawccwgsarggtggctcatccgctgctgagccctctgcgtgcgcgggaagccaatctgtacctcggcggctgccactgaccatgaccatgacccttcacaccaaagcctcgggaatggccttgttgcaccagatccaagggaacgagctggagcccctcaatcgcccgcagctcaagatgcccatggagagggctctgggcgaggtgtacgtggacaacagcaagcccgccgtgttcaactaccccgagggcgccgcctacgagttcaacgccgccgccgccgccgcggccgccggggcctcggctccggtctatggccagtcgagcatcacttacggtccggggtccgaggcggccgcctttggtgccaatagtctgggggctttcccccagctcaacagcgtgtcgcccagtccgctgatgctgctgcacccgccgccgcacgtgtcgccgttcctgcacccgcatggccaccaggtgccctactacctggagaacgagcccagcgcctacgctgtacgcgacaccggccctcccgccttctacaggtccaattctgacaatcgacgccagaatggccgagagagactctccagcagcagcgagaagggaaacatgatcatggagtctgccaaggagactcgctactgtgctgtgtgtaacgactatgcctctggctaccattatggggtctggtcctgtgaaggctgcaaggctttctttaagagaagcattcaaggacataatgactacatgtgtccagctacaaaccaatgcaccatcgataagaaccggaggaagagttgccaggcctgccggctgcgcaagtgttacgaagtgggcatgatgaaaggcgggatacgaaaagaccgccgaggagggagaatgttgaagcacaagcgtcagagagatgacttggaaggccgaaatgaaatgggcacttcaggagacatgagagctgccaacctttggccaagtccacttgtgatcaagcacactaagaagaatagccccgccctgtccttgacagctgaccagatggtcagtgccttattggatgctgaaccacctttgatctattctgaatatgatccttctagacccttcagtgaagcctcaatgatgggcttattgaccaacctggcagacagggagctggttcatatgatcaactgggcaaagagagtgccaggctttggggacttgaatctccacgatcaagttcaccttctggagtgtgcctggttggagatcctgatgattggtctggtctggcgctccatggaacacccggggaagctcctgtttgctcctaacttgctcttggacaggaatcaaggtaaatgtgtagaaggcatggtggagatctttgacatgttgctggctacgtcaagtcgattccgcatgatgaacctgcagggagaagagtttgtgtgcctcaaatcaatcattttgcttaattctggagtgtacacatttctatccagcaccttgaagtctctggaagagaaggaccacatccaccgagtcctggacaagatcaacgacactttgatccacttgatggccaaagctggcctgactctgcagcaacagcatcgccgtctggcccagctcctcctcatcctttcccatatccggcacatgagtaacaaaggcatggagcatctctacaacatgaaatgcaagaatgtcgtgcctctctatgacctgctgctggagatgctggatgctcatcgtcttcatgcccccgccagtcgcatgggagtgcccccggaggagcctagccagagccagctgaccaccaccagctccacttcagcacattccttacaaacctactacatccccccggaagcagagggcttccccaacaccatctgagaactcccaggctccccacaaggttctgcgaatccctgaaacgttttacccatgtcctgtatgactttagcagaattc

SEQ ID NO: 2089 - DNA, 3990 bp, Rattus norvegicus
gcggccaacacgcgcgtgaagttcaggctgagatggatcttgaggcagcaagaaacggaacagcgcggcgcctggacggcgactttgaactaggcagcatcagcaaccagagcagagaaaaaaagaagaaagtgaatttaattggcccgttgacactgttccgatactctgattggcaggataaattgtttatgctcctgggcaccgccatggccatagctcacggatcaggtcttccccttatgatgatagtctttggagaaatgacagataagtttgtagataatgctgggaacttttccttgccagtgaatttttcattgtcaatgctaaatccaggaagaattctggaagaagaaatgactagatatgcatactactattcgggactaggtggtggagttcttttggctgcctatatccaagtctccttctggactttggcagctggccgacaaataaggaaaatcaggcaaaaattttttcacgccatccttcgacaagaaatgggctggtttgatatcaagggcaccaccgaactcaacacgcggctgacagatgacatctccaaaatcagtgaaggaattggtgacaaggttggaatgttctttcaagcaatagccacgttttttgcaggattcatagtggggttcatcagaggctggaaactcaccctcgtgatcatggccatcaccgccatcttggggctctctacagccgtttgggcaaagatactctcaacattcagtgacaaagaactagctgcctatgcaaaagcaggtgccgtggcggaagaggctctgggagccatcaggaccgtgatagctttcgggggccagaacaaagagctagaaaggtatcagaagcatttagaaaatgccaaaaagattggaattaaaaaggctatctcggccaacatctccatgggcattgcctttttgttaatatatgcatcctatgcactggccttctggtatggatccactctggttatatcaaaagaatatacaattggaaatgccatgacagtgttcttctcaatcctcattggggccttcagtgtggggcaggctgccccctgtattgatgctttccccaatgctagaggagcagcctatgtgatctttgacattattgataataatcctaaaattgacagtttttcagagagaggacacaagccagacagcatcaaaggaaatttggagttcagtgacgttcacttttcctacccatctcgggctaatatcaagatcttgaagggcctcaacctgaaggtgaagagcgggcagacggtagccctggttggcaacagtggctgtgggaaaagcacaactgtccagctgctgcagaggctctacgaccccacagagggtacgattagcatcgatgggcaggacatccggaactttaacgtcaggtgtctaagggaattcatcggcgtggtgagtcaagagccggtactgttctctaccacgattgctgaaaatatccgctatggccgtgggaatgtaacaatggatgagattaaaaaagctgtcaaagaggctaatgcctatgacttcatcatgaaactgccacagaaatttgacaccctggttggtgacagaggggcgcagctgagcgggggacagaaacagaggatcgccattgctcgtgccttggtccgcaaccccaagatcctcctgctggacgaggccacgtcagccttggacacagaaagcgaagctgaggtgcaggccgctctggataaggccagagaaggccggaccaccatcgtgatagctcaccgactgtcaactgtccggaatgcagatgtcatcgctgggtttgaggatggcgtcatcgtggagcaaggaagccacagtgagctgataaagaaggaagggatctacttcagacttgttaacatgcagacatcaggaagccagatcctgtcagaagaatttgaagttgagctaagtgatgaaaaggctgctggaggtgtggccccaaatggctggaaagcacgcatatttaggaattctacgaagaaaagtctgaaaagttcacgggcgcatcaaaataggctggatgtggaaaccaatgaacttgatgcaaacgtgccaccagtgtcttttctgaaggtcttaagactgaataaaacagagtggccctactttgtggtggggacactctgtgccattgccaacggggccctccagccggcattctccatcatcctgtcagagatgatagctatctttggccctggggatgacacagtaaagcaacagaagtgtaacatgttctcgctggtcttcttgggcctaggagtccactccttctttactttcttccttcagggtttcacattcgggaaagctggcgagatcctcaccacaaggctccggtccatggccttcaaagcaatgctaagacaggacatgagctggtttgacgatcataaaaacagtactggtgccctctctacaagactcgccacagacgctgcgcaggtccaaggagccacaggaaccaggttggctttaattgcacagaacacagccaaccttggaacgggtattattatatcatttatttacggttggcaactgacacttctgctcttatcagttgttccattcattgctgtagcgggaattgttgaaatgaaaatgttggctggcaacgccaagagagataaaaaggagatggaagctgctggaaagattgcaacagaggcaatagaaaatattcggactgttgtatccttgacccaagagagaaaatttgagtcaatgtatgttgaaaaattacacggaccttacaggaattcagtgcggaaggctcacatctacggcatcacttttagcatctcacaagcattcatgtacttttcttatgctggctgctttcgatttggttcttacctcattgtgaatggacacatgcgcttcaaggatgtcatcctggtgttctcagcaatcgtgcttggtgcagtggctctaggacatgccagctcatttgctccagactatgcaaaagccaagctgtctgcagcatacttattcagtctgtttgaaagacaacctctgattgacagctacagcagagaaggaatgtggccsgataagtttgaaggaagcgtgacattcaatgaagttgtgttcaattatcccacccgggccaayrtgccagtgcttcaggggctgagcctsgaggtgaagaaggggcagaccctggccctggtgggsagtagtggctssgggaagagcaccgtggtccagctgctcgagcgcttctacgaccccatggccggaacagtgctcctcgatggtcaggaagcaaagaaactcaatgtccagtggctccgagctcaacttggcattgtgtcccaggagcccatcctgtttgactgcagcatcgccragaacatcgcctacggagacaacagccgtgtcgtgtctcaggatgagattgtgagggcggccaaggaggccaacatccaccccttcattgagacactgccccaaaagtatgaaacaagagtaggagacaaggggacacagctctctggaggccagaaacaraggattgctatcgcccgagccctcatcagacagcctcgggtcctactgctggatgaagccacgtcrgctttggacactgagagtgaaaaggtcgtccaggaagcgctggacaaagccagggaaggccgcacctgcattgtgatcgcrcaccgcctgtccaccatccagaacgcagacttgatcgtggtgatcgacaacggcaaggtcaaggagcacggcacccaccwgcwgctgctggcccagaaaggcatctatttctccatggtcaacattcaagctggcacacagaacttatgaacttgttacagtatatttttaaaataaattccaatcgkkktyttggtaaagtttccttgaaataataattccattgagtgtgagatcaatttaataaaaaaaattgtaaacaactttttag

SEQ ID NO: 2090 - DNA, 1882 bp, Rattus norvegicus
gcaggcctggctaaactggtgagggccctacccagccatgcccaccgtggatgatgtcctggagcaagttggagagtttggctggttccagaaacaagccttcctgttgctatgcctgatctcagcttctttagctcccatctatgtgggcatcgtcttcctgggcttcacccctggacattattgccagaatcctggggtggctgagctgagccagcggtgtggctggagccaggcagaggagctgaactacactgtgccgggcctgggaccttcggacgaggcctccttcctcagccagtgcatgaggtatgaggtggactggaaccagagcacccttgactgtgtggacccactgtccagcctggttgccaacaggagtcagttgccattgggcccctgcgagcatggctgggtatacgacactcccggctcctccatcgtcactgagtttaacctggtgtgtggagacgcctggaaagtggacctttttcagtcctgtgtgaacttgggcttcttcctgggctccctggttgtgggttacattgcagacaggtttggccgtaagctctgtctcttggtgaccacgctggtcacatctgtgtccggtgtgctaacagcggtggccccagactatacatccatgttgctctttcgcctgctgcagggcatggtcagcaagggcagctgggtgtccggctataccttgatcacagagtttgtcggctctggctacaggagaacgacggccattttgtaccagatggccttcacagtggggctagtggggcttgccggggtggcctatgccattccagactggcgctggctccagctagctgtgtccctgcctaccttcctcttcctgctgtattactggtttgtcccagaatccccccggtggctgttgtcccagaagagaaccacgcgagctgtcaggataatggagcaaattgcacagaagaacgggaaggtgcctcctgctgacctgaagatgctctgccttgaggaggatgcctcagaaaagcgaagtccttcgtttgccgacctgttccgcactcccaacctgaggaagcacaccgtcatcctgatgtatctatggttctcttgtgctgtgctgtaccagggtctcatcatgcacgtgggagccacaggggccaacctctacctggacttcttttattcttctctggtggaattccccgcggccttcatcatcctggtcaccattgaccgcattggccgcatctacccaatagcggcctcgaatctggtracgggggcagcytgcctcctcatgatctttatcccgcatgagctgcactggttgaacgttaccctcgcctgtcttgrccgtatgggggccaccattgtgctgcasatggtctgcmtggtgaacgctgagctgtaccmtacattcatcaggaatcttgggatgatggtatgctctgccctgtgtgacctgggtgggatcttcaccccyttcatggtgttcaggctgatggaagtttggcaagcchtgcccctcattttgtttggggttttgggcctgactgctggggccatgactcttcttctcccagagrccaagggtgtggctttgcctgagactattgaagaagcagagaacctgggkaggaggaaatcaaaggccaaagraaacrsgatttaccttcaggtccaaacaggcaagtcctcaagtacctgacagggatgctgtgccaggagctgagtggcagagagaaaggaggacttgccacttggaggattcccagaagcctttgcctttccagactcttgtatatatgcaccaggttccaaatgaactaccaaccttaaagacttttctgaaagcccaaaaaaaaaaaaaaaaaaaaaaaaa

SEQ ID NO: 2091 - DNA, 1240 bp, Rattus norvegicus
tgcgagcctgggcgcggcgcttgactttcsgggagccccgtggctcggacaagcttactcctccgcgctaaccctcccctgactgcctgtgaaatccttacaaccatgagggaacacctcaaaggccacgagacccaaacaacttgttgggaccatcccaaaatgacagagctctaccagtctttagctgacctgaataatgtcaggytctccgcttataggactgccatgaagctcagaagactccagaaggccctttgcttggatctcttgagcctgtcagctgcatgtgacgccttggaccagcacaacctcaagcaaaatgatcagcccatggatatcctgcagatwattwactgtttgactactatttatgaccgcctggagcaagagcacaacaatttggtcaatgtccctctctgtgtggatrtgtgtctcaactggcttctcaatgtttatgatacgggacgaacagggaggatccgtgtcctgtcttttaaaactggcatcatttctctgtgtaaagcacacttggaagacaagtacagataccttttcaagcaagtggcaagttcaaccggcttttgtgaccagcgtagactgggtcttcttctgcatgattctattcaaatcccaagacagttgggtgaagttgcctcctttgggggcagtaacattgagccgagtgtcaggagctgtttccagtttsccaataataaacctgagattgaagccgctctcttccttgactggatgcgtctggaaccccagtctatggtgtggctgccggtcttgcacagagtggctgctgctgaaacagccaagcatcaggccragtgtaacatctgtaaggagtgtccaatcattggattcaggtacagaagcctgaaacactttaattatgacatctgccaaagctgctttttttctggccgagttgctaagggccataaaatgcactaccccatggtagagtactgcactccgactacatctggagaagatgttcgtgactttgccaaggtactgaaaaacaaatttcgaaccaaaaggtattttgcgaagcatccccgaatgggctaccttccagtgcagactgtgttagagggggacaacatggaaacgtgagtagtggcagaagcaaagcaaactttaaactttcatttgctatatccttggaccccctcccggccaaaaaaccgtccttcgctctcaaatgcaaacagtctcctaagctaat

SEQ ID NO: 2092 - DNA, 1953 bp, Rattus norvegicus
gccagtagtgagcgggccgaacaggacgaaggttgctcggctgttagaggcgaggtcggagcgtgtgcggcgagggtgagggagccggagccggagccggagccggagccggagccgggccgccgcggtttggagaagctgcgtcggggcgcacgggttattagaaatggcaactccacagtcagttttcgtctttgccatctgcattctaatgataacagaattaatcctggcctcaaaaaactactatgatatcttaggtgtgccaaagtcagcctcagagagacaaatcaaaaaggcctttcacaaattagccatgaagtaccaccctgataaaaataaaagccctgatgctgaagcaaaattcagagagattgcagaagcatatgaaacactctcggatgccaatagacggaaagagtatgatataattggacacagtgcttttactaatggcaaaggacaaagaagcaatggaagtccttttgagcagtcatttaacttcaattttgatgacttatttaaagactttaatttgtttggtcagaaccagaacactcggtctaagaagcattttgaaaatcacttccagacacgccaggatggttccagtagacaaaggcatcacttccrggagttttcttttggaggtggattgtttgatgatatgtktgaagacatggagaagatrttttcttttagtggctttgatagcaccaatygacgcacagtacagactgaaaatagatttcatggatccagcaagcactgcaggaccgtcactcagcggagagggaatatggttactacgtacaccgactgttcaggacagtagtkggatcttttcctgtgtccactaagcccacctagtttactcttcctcactatgtctgatgaaaaaagttttctgtgaactagtttggcatgatttcacttatgttaagcagtttgttattaggtatttcatatattgaaatttttttttttttttttaacaaaacacattcagctagtaaacaattytaattttcytgattaggraaagttcttttgaaagatcatttgaaagatagattttcctctttacctgtcctttggctcattaatttgcccctccctcccccaacaaaaaaaraaaawmmcaaacaactcagttagccccaacatacttaatgattaaataatgattaaattttaagttatcatagatttgyattgtatgaacttgaataatatttgcagtgaamcctctgggaacttaaaactacacagcckakggtccctgtaactcgggctactaaatgtatatgaagctgtaattgagtcatttagtgaagaccaccattgtttttggctctttgccmctgaaagctttagaaagtgatggtttgatgtctatcacagaaagattcctcttctacagragaattggtgtgatggggatgattgtattgcacgtagttaagctgaagaaagtttaaawtttataaactattgccaagaaattgtgttttagtaatgggctaatgattttgtatgatcmmaatcrtrgctttgtaaacttctttttgaatatttttgtwtgttgactttctaggtcttcgtatgaawttgttwtttgtytttggtgtgtgtgtgtgtarttactctgttgcacttatcttyatctagagattgactaatacctcattctttttgtaaaagcagccagtaatttctgtgcaaccttactatgtgcaatatttttaaattttaagaaacgtgtgcttcwtttgttgttagagttatttcwttagttctgcactttkccatgttatactccatatgagtattaatcctatggatgcatatgaaaactagtaatgtctcatacaataktgtstrtgagtgagagaaactataaataktwacaacctgaaaaaaaaaaaaaaaaaaaaaaaaactcgagactag

SEQ ID NO: 2093 - DNA, 3013 bp, Rattus norvegicus
atcgccaccgcagcctaggcagagccagtcggcccaggcccctgtctctgcctggcctcagctccccgccggcccgccgcgcaccttacccgcacatcccttggaggtctagccgggtgcccccagaccccggcctccagcacagaggcaagaggcagagagcagcagcgagggcgaggacgaagaaggggaggaggagctcgtcgcaggatgaaggatcggactcaggagctgcggagtgcaaaagacagtgacgatgaagaggaagtggttcatgtggatcgagaccactttatggatgagttctttgagcaggtggaagagatccgaggctgcatcgagaaactgtccgaggatgtggagcaagtgaagaaacagcacagtgccattcttgctgcccccaaccccgatgagaagactaaacaggagctggaggacctcacggcagacatcaaaaagacggcaaacaaggtccggtccaagttgaaagcgatcgagcagagcattgagcaggaagaggggttgaatcgttcttctgcagacctgcgtatccgtaagacccagcactccacactctcacggaagttcgtggaggtaatgaccgaatataatgcaactcagtctaagtaccgggaccgctgcaaggaccgtatccagaggcagctggagatcactggcaggactactaccaacgaagagctggaagacatgttggaaagcgggaagctggccatcttcacggacgacatcaaaatggactcgcagatgacaaagcaagccctgaatgagatagagacaaggcacaatgagatcatcaaactggaaaccagcatccgagagctgcacgacatgtttgtggacatggccatgctcgtggagagccagggtgagatgatcgaccgaattgagtacaatgtggaacattctgtggactacgtggagcgagccgtgtccgacaccaagaaagctgtgaaatatcagagcaaggccaggaggaagaaaattatgatcatcatttgctgtgtggtgctgggggtggtcttggcgtcatctattggggggacactgggcttgtaggcccctacccttctcttccccaggaccctccccacacatcgggagcaatacccccaccaccctttcactctttcccctgctccaagctcactcccaaaacagacccaggcagttccagcctctctcaccctcacgcagaccctggagtccctggctctcaccttgccatggatccccctccaccttgccgcacatagatagcagcaggcgtgatcacacatgcacaccaacatgcatgccgagggcacatgctcaagacgtgtggacaccccagcgtgtgtgtacttgtgtagatgtatgtagatgccctgaacctcttcttgctgccaccttcatcctgtgtggtctgaacttccctctctagccggttctgtgctgactgtagcagcctaccatggcccaacctgttctgtgtgaatagacatggtgtgtatgtgtgtgtgtgtgtgtgtgtgtgtgtgtgtgtgtgtgtgtgtgtgtgtagatctgtgcccatacaatgtatgtacatggagttttgtgaatgtgaaaacccaaagcatttcctccaccttctctcctatctgttacatttggagtgggaggcatatgtgaggataatttacattctcagaggatccagggtggcccggtgaccatgccacacatcttttgtgatgtagaacaaactttcctggcttggttactgccaggggtcacatcatgtcctgaggattctctctctcagcctctctctctgtctctctgtccctcagtctctgtctctgtctctgtctctgtgtgtgtgtgtgtgtgtgtgtgtgtgtgtgtgtccacatgtatgtaacccctagattagctgtgctgaggaaggaggctgcctgtccattccagaatattctgctgcagggcccagcacctcctgcccccaccttggcttctttggagatgtcagaggaggccccaggatctagttcccttcttctttcagcccagccagaactcccattaactcagatgtttctagcagcctccctgacaccccagtcatggtgttcacaaggacagggctgtggctggcatgctgctcctgcctctttgaatggcactgggcccacagctgcccaccactgagcctcaaacagatgagccgtccctgagaswckrskgtaacccagctttctaagacccacacctcacacgatggacatgttcgttgactgctgtccacatgtgtatcctggatggttgtctgggggctggtgtctgttgcatgttctcagatgtgtgctgcgtgccctccacacaccccaaaccatcaagcccaattatactcccttggtggtcccaggcccaagccaggactcaatgcttccattctccctttccttgcctcttacaaagcacctgcgtgtccatctcatgtgcccatgggtcatcatgctsccgtcataccttgagcgtgtacacatgtgtgttctatgcactcgccctgccctacctacccaacagaggacaagatggtcggcccctagctcccttctcccccacctagcctttccccacgccctgctgtgcagctgtgtgcgttggtgtgtttctgtgtcgctggcgtgtcatgtgatgtagccatgtttgctgacatgagcccctgcccccttctctttttctccattggtttctagaactctcttccycccctcccctgagggacaggactcctggggcytagctgggggcccgagmytggccaccctcctgttagccctcagagtcttatttctctctattggtgaccaagttgcaaatggataaaatacaggaaattytgaccccctgccccagacctgcatgtcctgtccccagtgcccccgaaccccatcytgggccgggttgggcctggtgggacgggagaaatagcaactaatccaacagcgrrraaaaaaaaaaaaaaaaa

SEQ ID NO: 2094 - DNA, 1304 bp, Rattus norvegicus
agcagagccccgggccccgccgtcctccagcgcgctccgctgcaamcccgcagctgagcccagaggctccggccctgtgcgccctaccgyggccccgccactatggccggcgtgtgggcgccggagcactcggttgaagcgcacagcaaccagtcaagtgctgccgacggctgcggctctgtgtccgtggccttccccatcaccatgatggtcactggcttcgtgggcaacgcgctggccatgttgcttgtgkygcgcagctatagacgccgggagagcaaacgcaaaaagtctttcctgctgtgcattggctggctggcgctcaccgacttggtggggcagctcctgaccagtccggtggtcatcctcgtgtacctgtcgcagcgacgctgggagcaactcgacccatcggggcgcctgtgcaccttcttcgggctgaccatgacagtgttcggactgtcctcgctcttggtggccagcgccatggccgtggagcgcgccctggctatccgtgcgccgcactggtatgccagccacatgaagactcgcgccacgcgcgcggtactgctgggtgtgtggctgtctgtgctcgccttcgcgctgctgcctgtgctgggcgtgggccgctacagcgtgcagtggcccggcacgtggtgcttcatcagcaccgggccggcgggcaacgagacggactctgcgcgggagccgggcagcgtggcctttgcctccgccttcgcctgtctaggcttgctggctctggtggtgacctttgcctgcaacctggcgaccatcaaagccctggtgtcccgctgccgggccaaagccgccgcctcgcagtccagcgcccagtggggccggatcaccacggagacggctatccagcttatggggatcatgtgtgtactgtccgtctgctggtcgccgctattgataatgatgctgaaaatgatcttcaatcagatgtcagtagagcaatgcaagacgcagatgggaaaggagaaggagtgcaattccttcctaatcgccgttcgcctggcttcgctgaaccagatcttggatccctgggtttatctgctgctaagaaagatccttcttcgaaagttctgccagatgatgaacaacctgaagcggagtttcattgcaatacctgcttccctgagtatgagaatttcttcccccagggaaggataactgaatcattttggattgtatcttctttcggcctcatattttaagttttccttgccattaaacacaccgagacwrgmtycctgggtttatctggccattaaacacaccgagac

SEQ ID NO: 2095 - DNA, 1749 bp, Rattus norvegicus
agaagaaaggactggccagagactcagatccccatccgctcaagcaggccaccatgtgccgaggcttctctttcaggcacttgctgccgctgctgctcctgcagctgtcaaaactcctagttgtcacccaaggaaagaccgtggtgctggggaaggaagggggttcagcagaactgccctgtgaaagtacctcgaggaggagtgcatccttcgcgtggaagtcctctgaccaaaagacaattctgggatataagaacaagttattgattaaaggttcacttgagctgtatagtcgttttgattccagaaaaaatgcatgggagagaggatcatttcccctcatcatcaataaacttaggatggaggactctcagacttatgtctgcgagctggagaacaagaaagaggaggtggagttgtgggtcttcagagtgaccttcaatccgggtaccagactgttgcaggggcagagcctgaccctgatcttggatagcaaccctaaggtctctgaccccccgatagagtgcaaacacaaaagcagtaacattgtcaaggactccaaagctttctccacgcacagcctaaggattcaggacagtggcatctggaactgcaccgtgaccctgaaccagaagaagcactcatttgacatgaaactctcagtgctgggctttgcgagcacatccatcacggcctataagagtgagggggagtcagcggagttctccttcccactcaaccttggagaggaaagcctgcagggagagttgagatggaaggcagagaaggctccttcttcccagtcctggatcaccttctccctaaagaaccaaaaggtgtctgtgcagaagtctactagcaaccccaagttccagctgtccgaaacgctcccactcacccttcagataccccaggtctcccttcagtttgctggttctggcaacctgaccctgactctggacagagggatactgtatcaggaagtgaacctggtggtgatgaaagtgactcagcccgacagcaacactttgacctgtgaggtgatgggacccacctcacccaagatgagactgatcttgaagcaggagaatcaggaggccagggtctccaggcaggagaaagtgattcaagtgcaggcccctgaagcaggggtgtggcaatgtctactgagtgaaggtgaagaggtcaagatggactccaagatccaggttttatccaaagggttgaaccagacaatgttcctggctgtcgtgctggggagcgccttcagctttctggttttcacggggctctgcatcctattctgtgtcaggtgccggcaccaacagcgccaggcagcacggatgtctcagatcaagaggcttctcagtgagaagaagacttgccagtgctcccaccggatgcagaaaagccacaatctcatatgaggcctgggccccacctgcagccctgcctgtgtcctgtcgctgacccaggcctgtggaccagatgaatgtagcccacacagtgcctctggcctcctgcttttctcttccacaactggccacggtttctctgcctctgttcccaagcccgttggctgagcttgcgctcggctgtgtttcagacactcaagcacacccagccagcttattgatcctccgtagctgcctttacgccagagcccagcccttctctgactaacatcctggatcttctttccagctgtctgcttggatctaagggcacctgacctggatggtgggactg

SEQ ID NO: 2096 - DNA, 1400 bp, Rattus norvegicus
tgaattcagagtgttttaaagagagatcaagaggctcacacagatcagcgagcctaactgacaaaccttcagcgcctaactgaaaaacccagaagttacaaagcagcatcttgaaggcgcatttgaagagagaagctttgagatggatccaaataattgttcccacctgaacttggaagtggatcctttcctgtcctgcaacaacaccttcaatcaaactctgagtccccccaagatggacaactggtttcacccgggaatcatctatgtcattcctgcagtttatgggcttatcatcgtgataggcctcattggcaacatcaccctgatcaagatcttctgtacggtcaagtccatgcgaaacgtgccaaacctgttcatctctagcctggcattgggagacctactgctgctggttacatgcgcccctgtggatgccagcaagtacctggctgacaggtggctatttggcaggattggctgcaaactgatcccctttatacaacttacttcagtgggggtgtctgtcttcacacttacggcactgtcagctgacaggtacaaagccatcgtcaggccaatggatatccaggcatcccatgccctgatgaagatctgtctcaaagctgccttaatctggatcgtctctatgctgttggccatcccagaggctgtattttcggaccttcacccctttcatgtgaaagataccaaccaaaccttcattagttgtgccccctacccacactccaatgagctgcaccctaaaatccattccatggcttcctttctggtcttttacattatcccactgtcgatcatctctgtctactactacttcattgcccgaaatctgattcagagtgcctacaatcttcctgtggaaggaaatatacatgtcaagaagcagatcgaatcccggaagcggcttgccaagacagtactggtgtttgtgggcctcttcgccttctgctggctccccaatcatgtcatctacctgtaccgttcctaccactactctgaggtggacacctccatgctccactttatcaccagcatctgtgcccgcctcctggccttcaccaactcctgtgtgaacccctttgccctgtatctgctgagcaagagcttcaggaagcagttcaacactcaacttctctgctgccagcccagcctgttgaacaggtctcacagcacaggcagaagtaccacctgcatgacctccttcaagagcaccaacccctcagctaccttcagcctcatcaacggaaatatctgccatgaggggtatgtctagacaaaccttcagcctcgactcttaaggaactcctggtactattctacagatatctaggatccctgaaattgattgttgtctctataccttccaaagacccttc

SEQ ID NO: 2097 - DNA, 880 bp, Rattus norvegicus
gatctccgcactgctaggatgctgcaagccggagcacctaccgccggctctttccggacgggagaagtccacaccgggacaaccatcatggctgtggaatttgacgggggtgtcgtggtgggctctgattcccgagtgtcagcgggagcagccgtagtgaaccgcgtgtttgacaagctctcccctctgcaccagcgcatctactgtgccctctcgggttccgctgctgatgcccaagccatagccgacatggccgcctaccagctggagctgcacgggttggaactggaggagccgccccttgttctggctgctgcaaacatagtgaagaacatctcctacaagtaccgcraggacttgttagcgcatctcatggtagctggttgggaccaacrtgaggggggcmmgrkgtatggaaccatgggagggatgctaattcgacagccctttgcratcggyggttccggaagcacctatatttwcggttatgtggacgcagcttataaaccasgcatgaccccmgaggagtkccggcgtttcaccacakacgccatsrmwykrgssatgaaccgagatggctccwgtgggggtgtcatmtacstggtcaccatwacagctgatggtgtggaccatcgcgtcatcmtgggagacgagctgccaaaattytrcgatgagtgragtcccywctttgtttgcartaaactttatggagccmgadrwwrrwrwaawrrrmavaggtgaaatgggtatcagagaaacgsagtgcgtggagggaagcttcctcccggccsagagrtcagcaagcacctcccattcttttttaaaaaataaactttattmttmaawthaaaaamwmwwawaaawaaaaaawaarwaaaac

SEQ ID NO: 2098 - DNA, 4173 bp, Rattus norvegicus
tttcgatccaatgtgtggattactcaccaagtgtctgtctttctttctttctctctttctctctttcttcctcccttccttccttccttccttccttccttccttccttccttccttcctttctgttcaattgctcgtttctcccttcatctctcgccagtataccgcacactcaaacttaaattttcatttcaatgcgttctcttctggcacgtgcagcataattacactcatgattgtcaactccgtgatctgtttgcacaccttacccccccccccaaggttttatctgcatttaaaaaaaagggattatcaagaaatttattcttaattcagaaatgtgatcaaagttgtcagatccgttctttactgcctcctgttggaaaaaaaaaatatccagttcctggatttttctaaaacacagaaaagagacctgggacaggggtataggattgagcaggcatggtgagcaattttatactgaatagattcattgtgacttaccggtctcctgagggaaataatcacttttcccaggtagagagcagcctagcaagagatcagagtgcaagcataaaacccatgtgctttataagtgtatttattttatgcattttctgtttataaggacatgagtggactttttatttgtcccttccatacaggactacctagactattgggatgggatgactgaaaatatgttttcaagtagacttccttccggaactaccttcatatggttctgaaggcaaagtggaacactgcacgggtgtcctcttctcccaagaacttggccatggcgtcgtcgttttgagtctatgtctgagccacgaatgccataacagcccttcctgttactctcacagtggcacagagctgtttctaaacaagaaggaagtcttccatcttgtgtcaggatgctaatgacgtcaccaatggcagtaagtgttcaccacagcccgttgctaaggcaattatgttatccctcctgtcagagtttcctgtattaaaatatactgagtttaattttatgtcggattccatgacatacattcagcaaggaaaccaacagtatcttttgttctttcaacagtgatttcctgtcaccatttaactgttgtctcgcccccattctttaaaatgtctctgcacctcaccttgcctcccagatacactcccaaactcatttccctggacacacttgaaatgttgctgctagcaagccacagctaccacgtcttctctgtcagggttctagacaactcatctaaagcagcaccaggtctctcttagaaatcagacatcggatgtcatggtcatagtatacctcacagctactttggacattcatgggcccagtattattttccagggctgaggtttaactcaagagcctcatgctcacatggctggtggtctggccacacagctatgactcgtctccatttattcttcaaacttttattcggagctccgttgtgttctgttgtctcctgtgcctttctatatgtgtgactgctcctttgcctgtaaatgagaagctatgtcaaattcaacgtaaaaaaggcaacttcatgggcttctgtgagatagcatgctaaacagtgtcagctccactacactgtgaccaggaaaatttgatcaggccctggttactctcggagcataaaagaagaaaaaaaaatctcttccccgctctactctggattttgtttgaaaataaaaggtccaatctgtccttataaaacatgcatagaataaatatactagaaaacacactttgtttgcaaagggtatgtgataaagtcagagggttgataaagatttgctgaggcttatgacatagaaaaggtccctgacattgcatccctgtgcaaagtacctgggaacattaccaatgtccccaactgtgcagaggggaggaagttgacatttagagataatttttttaaaaaagcaggcagtgcttttgtagtgtcagttatatctgtaatacatccagctagagatatataaatgtgaaagtcagctcagctctcagtgaaggtccttcttgacaagatgaagtcctctgtcttcattctatctctgttcctccttctggaaagacaggcagctgtggttggacagtatggtgagtagggagatggtgactagagggaaagtcactcagggagaatgtttttaagggtgctctgggagtagcagatcctttcataggggaatttttttttaaatgagacctaattcttctctactgaaaaccaaaacccttgtgggaacatcaatggttttatgaggaaattttggaaatgaagtmctctgkmwksattctrtckcwgwtcmtsywwctgkaaagmcwkscwsctstsrwtgkacagyatggtgggacaaaaggtcacttccagagcagctcatcagggtttatgcttggtcagaaaggccacctcaattttgggctcaaaggaggaagtgaggaagcagctgaagaaagcattttcatgcaatcacaacaccagatgttcggccaggatggtggtgacatggcgcagacaagtgtttcacaagagcatacaggtgtaaagggggccgcgatttgtcgtaaaggacaagtatcccaattgaaatcccaagaatcccaaataaaatcctttagacaagtaaaatccagtggacagctgaaatctggaggatcccaattaaaatcctttggacaagtgaaatccagtgagtcccaattaaaatcctttggccaagtgaaagccagtgggtcccaattaaaatccttcggacaagtgaaagccagtgggtcccaattaaaatcctatggacaaatgaaatccagtgggtcccaagtgaaatcctttggacaaatgaaatccagtgggtcccaagtaaaatcctttggacaaatgaaagccagtgagtcccaaataaaatcctttggacaaagaaaatcccaaggtggtcaactacaatcctatggccaaatgaaatcctatgggcagacgaaatccctagaatcccaggccaaatccttcggacaagtaaagtcccaaagtggccaaatgaaatcctcctatggtcagagaaaatcctatggtgaagagactcaactgaagtctttcgaccaagatgcccaactaaaatcctatggtcaacaaaaatcccaaaawcaatcctcctttagccaagtaaaatctcaaagtgsccaactaaagtcctttgrccaacaaaaatccctcaaagggttttstcaacaaaytcaacagaaaggatttgccatggatgaagatttktcacaagtgcggaaacaatttgacgatgatgacctytytgtacaacagaagtytacccaacagatgaaaacagaggaagasttatcccaatttggacawcaacgacaatttggacaagaacgctcccaatcctataaaggatatcttgcmyaawrcaraaaraaawwamarraamaacaacaacagaaaaattttaatcaggataacttttttacaaagggaggggcaggcctatatcaggctcaacttaagggataacatattcactgagcaactgaagaccaagatcaatgtcaaggtatgttccaccaagtaggaagatattatccaaatttacttgtggtatataggaatcctggatccattatggattgatacccatttgttactatcagtagaagtattgttacacacttttagaaggatgaagaacagaccctggtaaaatgagtccttgtagagtaaaggcagagtaagcaagctaagttaacaattggtcctgaattactacattcagggagcacttttcagtgcttctctgagcacagacagtttatattattaaatgtgtaccacctatgcaatcatatttaacatttcatgatggaatcttatttgttcttacactttgacttgataaaaaaaaaagattggtttcttgcttatattggtataaggtggtattgcagctgagctctttctctacaccagtgcgtgttcttgagtcccctgggacctctgctttccatcacaatccatggggttaaggattagctgcttttccatcagatggaagatttggttacaaagatctctgcctggagcagacactatattcagttgtatgtccaatggtgaccctgttgaattc

SEQ ID NO: 2099 - DNA, 2715 bp, Rattus norvegicus
agagctctctggcaggcgaggcagggcagctgtttcagtggagattgcgagcaggactcggtacaggtgagcactgacttgggctgaagctcaagagttggttctgcccggggaccctccagcccaactgcctcgagtggccagagtctccaatcacctttcaaggatgcccctgcggctgttgcttctgctgctgtggctctggggattgtcactccagagggcggagacagattctgaggggcagacgacgggagagctgtaccagcgctgggagcgttacggctgggaatgccaaaacaccttggaggccacagaacctccctcaggcctggcctgtaatggttccttcgatatgtatgcctgctggaactacacggctgccaacaccactgcccgggtgtcctgcccctggtatctgccctggtaccgccaggtggctgcaggcttcgtcttccgccagtgtggtagtgatggccaatggggatcttggagagaccacactcaatgtgagaatccagagaagaatggggcctttcaggaccagaagctgatcttggagcgcctgcaggtcgtgtatacagtcggctactccctgtccctggccactctgctgctagccctactcattttaagtttgttcaggcggcttcactgcactcgtaattacattcacatgaacctgttcacgtctttcatgctgcgagcaggggccatcctcacccgagaccagctgctgcctccactgggtccctacacgggaaaccagacccctaccctgtggaaccaggccctagctgcctgccgcacagcccagatcttgacccagtactgtgtgggagccaattacacctggctgctggtggagggtgtgtatctgcaccatctgctggtggttgtgagacgctcagaaaagggccacttccgctgctacctgcttcttggctggggggcccccgcgcttttcgtcatcccctgggtgatcgtcaggtacctgtacgagaacacgcagtgctgggagcgcaacgaagtcaaagccatttggtggatcattcgcacccccatcctaataaccatcttgatcaatttcctcatctttatccgcatccttggcatccttgtttcaaagctgaggactcgacagatgcgctgtcccgactaccgactaaggctggctcgctccacgctgacactgatgcccctgctgggtgtccacgaggtggtatttgctcccgtgaccgaggaacaggctgaaggctccctgcgctttgccaaactggcctttgaaatcttcttaagttccttccagggtttcctcgtgagtgtgctctactgcttcatcaacaaagaggtacagtcggagatccgccgtctgcgtctcagccttcaggaacagtgtccacgtccgcacctggggcaggccccccgggcggtgcctttgagctctgcaccccaggaagctgccatccgcaatgccttgccctctgggatgctgcatgtgcctggagatgaggtcttggaaagttactgctaggacaaccgactgggagsccacttgcgaagacatgatgggacatgtttgggagagtggagacagcttgaagagttggaggataagattccaggcagacggaacagcacaggaaaaggtcctgggaacaggaagaatggagaaagacttccatggtcccactggaaaaagccagggcctgcagatggggaaggagtgggcagggggtgcagaaactggaatttcaccgcaggctcactgaagattttatttttacttttacgtgwamaawwrmwwwrmmwrwgtayacgrrkggataccacatgcatacagtgtttgcatatgccagaggacagaagatctctgggaccgaatgcttgtcagcctttatgtagatgaastgaacacaactccatctctccagtcccacacagattttagcagcagtgtctcctgggctgtttccatggctctctgttctagggactakgggcagtgagttgggagcccaktgagaggaatgcaggtggctggaccagaatggaggccacagagaggtgggaaggatttgctgaggggtcccaggagagggatcaaaggagacagtcaagacaaaaggagagcaatcaaaagtcaaaaggctctgtggtgtgggaggctctgctgtgccaggctgtgagagatgagcagcaggacctggagctgtaggtggtgagagctggcagccaagcaagaggatcctgtggtcagtggaggtagccagatcttcccacctcccagagagggttggggatgaagcmtcattgtgactggtccacctgtggatggryggacasrcagacacacacacacacacacagaggcctcctttatcagtactgggtgctgtgtttccccagggttcccagaaagatgtgtytcctagctgaccccgcactcaacacttcagggctttgccttctggagtggagactctagtaaattaagcttctttatggggtgggaggctaggctagaaagggagatgactagggtgtgtgtgaggtagtctgccatagatcaatgaggctcatttggagccatatgttggcacaaaaaaccatggacaccacattgctactgtaccctcccctaagataacctttattgakaactaagacatatgtacaaattaaarwwrwrwrwrwraaaaaaaaaaaaaaaaa

SEQ ID NO: 2100 - DNA, 1412 bp, Rattus norvegicus
gacactaggcagaacaactccagcctttaccgctcctggtttctcggcttctcatcgcagtcagtcttggactttgcgggttttgccgctgtcagaaggacgtctcggactttctgcttcaagtgcttgacaactcaccctttcagcagggtatcggagcatcgctacagaatgaagctggtttccatcgccctgatgttattgggttcgctcgccgttctcggcgcggacaccgcacggctcgacacttcctcgcagttccgaaagaagtggaataagtgggcgctaagtcgtgggaagagggaactacaagcgtccagcagctaccctacggggctcgttgatgagaagacagtcccgacccagactcttgggctccaggacaagcagagcacgtctagcaccccacaagccagcactcagagcacagcccacattcgagtcaaacgctaccgccagagcatgaaccaggggtcccgcagcactggatgccgctttgggacctgcacaatgcagaaactggctcaccagatctaccagtttacagacaaagacaaggacggcatggcccccagaaacaagatcagccctcaaggctatggccgccggcgccggcgttccctgccagaggtcctccgagcccggactgtggagtcctcccaggagcagacacactcagctccagcctccccggcgcaccaagacatctccagagtctctaggttataggtgcgggtggcagcattgaacagtcgggcgagtatcccattggcgcctgcggaatcagagagcttcgcaccctgagcggactgagacaatcttgcagagatctgcctggctgcccctaggggaggcagaggaacccaagatcaagccaggctcacgtcagaaaccgagaattacaggctgatactctctccgggcaggggtctgagccactgccttgcccgctcataaactggttttctcacggggcatacgsctcattacttacttgaactttccaaaacctagcgaggaaaagtgcaatgcttgttatacagccaaaggtaactatcatatttaagtttgttgatgtcaagaggttttttttttgtaacttcaaatatatagaaatatttttgtacgttatatattgtattaagggcattttaaagcgattatattgtcaccttcccctattttaagaagtgaatgtctcagcaaggtgtaaggttgtttggttccsygtgtgtgtgtgtgtgtgtgtgtgtgtgtgtgtgtgtgtgtgtgtgtaaggtggagagcgcctgattaccgcctgtggatgaagaaaaaacattgtgtcttctataatctatttacataaaatatgtgatctgggaaaaagcaaaccaataaactgtctcaatgctgaaaaaaaaaaaaaaaaa

SEQ ID NO: 2101 - DNA, 3635 bp, Rattus norvegicus
gctcgccacagctgctgcgcgctgccgggagsgccaggcgcggtgagctgtgagcttggagccttgagcctagggagggcgcaggcagcaagggcgcaaggtgagcgtcccaaccggcggccacaccggcccacttcagctgggatgttccccaatggcaccgccccctctcccacctcttctcccagctccagcccaggcggctgcggggaaggagtctgcagcaggggtcccgggtccggcgctgcggacggcatggaagaacctggacgaaactcttcccagaacgggactttaagcgagggtcagggtagcgccattctcatctctttcatctactccgtggtatgcttggtgggactgtgtgggaactccatggtcatttacgtgatcctgcgctacgccaagatgaagaccgcaaccaacatctacattctaaacctggccattgctgatgagctgctcatgctcagcgtgccctttctggtcacttccacgctgttgcgccactggccctttggcgcgctactttgccgcctggtgctcagcgtggatgcagtcaacatgttcaccagcatctactgtctgactgtgcttagtgtggaccgctatgtggctgtggwgcacccgatcaaggcagcgcgctaccgtcggcccactgtggccaaagtagtgaacctgggcgtgtgggtgctgtcgctactggttatcttgcccatcgtggtcttctcacgcaccgcagccaacagcgatggcacggtggcctgcaacatgctcatgcccgagcccgcccagcgctggttggtgggcttcgtcttatacacatttctcatgggcttcctgctgcctgtcggggccatctgcctgtgttacgtgctcatcattgccaagatgcgcatggtggccctcaaggccggctggcagcagcgcaagcgctcagagcgcaagatcactctaatggtgatgatggtggtgatggtttttgtcatctgctggatgcctttctacgtggtacagctagtcaacgtgttcgccgagcaagacgacgccacggtgagccagttgtctgtcatcctcggctatgccaatagctgtgccaaccccatcctctacggcttcctgtcggacaacttcaagcgctctttccagcgcatcctgtgcctcagctggatggataacgctgcggaggagcctgttgactactacgccactgccctgaagagtcgtgcctacagtgtggaggacttccagcctgagaatctggaatctggaggcgttttccgtaatggcacctgcgcttccaggatcagcacgctttgaggccggacgctaaccggagsgggagagtggtcagaaaggtggagaggggaagcaggtgggagggaatgayagccgcacaccaggtgctatgggagtagtgcgtgacagcgatgcagcgcccctgtttagcaaagctatgtgactaaggtaaacgggagagatttgagaatkttttcgggccatctggtattctgaactgtgttctccaaacccgataatttccatcctccctcccagttctgctagtacaaactgcaaacttaacgtcgccaactccgtttgaccctttccctctcaagctgttatttctgcttctttaaactgagccatcttgtgtttcttttgggctgagtccccaccttgcgctgaaccccctgcgcaggtcagcgggccagactcttcagagcggctaccagactgtccccagttaccgctccccttttgcacagccttactgtcaagtaagcccagctccaggatgaccaggcaactggtcttttctactctcaaagaaggcaccatcttcccttgggccctttctctgcttcactgcatccagagcagagctgggtgcttaagaaaaagtcctgtgcccagatggccagacttggtgtagtcccacccattccctcctttggagcacaaaaaggagctaagagccagcagaagggcaagtttctaagattcctgggctgtggttgtgggtgccagagaagccaccctcccatagagctcaggacctgagcactaggcttggaggtcccagctaggggagctcccggcttgtgaataacttatgcaccctggtgtgtgaacctgaattgcacagcagttccccttggaggtctccctagaataacaaaggattgggttgcctgctccctttcctagtccagctcctgttccagtgacaaaccgcagagcccttgccaaagctggatggctaacttcagcttgtctggtccctgacattttttgcctttcaagcggtgcctaataagttatttcttgtttgacatatttatttatttatttatggtgttgaaaaaaaaagtgtgtttccactttctttttctgtatttgcctaacagggctgttcttgagaatcctctggcaggcacgtggtggtgtggaggtgtggaggggagcaggggtggagaaagttctctcaccccaagactccctcagaagtttcccttcttttgcactccattggccttttcttgatccttcttggttttgcttgtgtccagtgaagtttggagattttaaaaatataykkyyrcwrkagttttgtcttgttaaaataagtacatggcaatttggtttaacttttgtcagtgtggagtggaaggcctgaatccctggcatcccagaaaacacaggggaacaaatcacatgatccgtgatgtatgtctgtatatgtgctgtcacacacaagtcacatatwtacgtgtatatatatatcatatatgtacacacacatataaaggtagatttgtcaatcttgacaactgtcactagttcatgacaattataaggacacccacaatgtgtgacctgagctgtagcactccagctgggatctgagaaacgtcagagattggagtcgctgctgaagatgctgctgcccttttctatcccctcagaggtgattcttacccagtaagtctagtcacttttgttgaggaatggaagcgaaacaattgtgtctgcatttactgactaccgtggaaacctgaacacggaaggacccatctcttcacttgttgcatttgctgtgttcctgtgtatgctcgtttgtacataggggccactgaaaggatatcttgcttggttgtttaaggaagccagtgtatatcagtggtcttagaacaatgaacctggggttctcgggtccacagtgacctgacatctaacctgcaatggtcgaatgcactgttgaaaatggtgttttgtgtacatttgcttcaagaacacatccatgcttttcctaaaagcaggaaccaagagttaaactgtctcttctgttttgtttaaataaatgaacaaatatgcttttgatcataagtgagaaagtttagatcttttcctaagaatagtatatatatatatatatatgtatatatatatatatatatatgtatatatatatacttttctgttaattagattttttaaccgataagaagagtgaactttataaactgaaatctccatcattatcatctcgacaggataaaaatgtagtgctcttaccctgtaatagtaactgaataaaaagatgtattatgctgttgaaaaaaaacctcgtg

SEQ ID NO: 2102 - DNA, 2596 bp, Rattus norvegicus
atggactgtattgacaggtcaaacagaagacactgatgccagaagcccagtgtcaacactggagccaagcagagaccaacctcagtgccatattcggagagcttgaagactagcttcatgtgaagactccttctcctccagcagcacaaagcaaccatccttccaggatgattttattcaaacaagtgggttattttgtttccttgttcgctacagtttcctgtgggtgtctgtcacaactgtatgcaaataccttcttcagaggtggggatctggctgccatctacaccccggatgcccagcactgtcagaagatgtgcacgtttcaccctaggtgcctgctcttcagcttccttgccgtgagtccaaccaaggagacagataaaaggtttgggtgcttcatgaaagagagcattacagggactttgccaagaatacaccggacaggggccatttctggtcattctttaaaacagtgtggccatcaattaagtgcttgccaccaagacatatacgaaggactggatatgagagggtccaactttaatatatctaagactgacagtattgaagaatgccagaaactgtgcacaaataatattcactgccaatttttcacatatgctacaaaagcatttcacagaccagagtacaggaagagttgcctgctgaagcgcagttcaagtggaacgcccaccagtataaagccagtggacaacctggtgtctggattctcactgaagtcctgtgctctctcagagatcggttgccccatggatattttccagcactttgcctttgcagacctgaatgtaagccaggtcgtcacccccgatgccttcgtgtgtcgcaccgtttgcaccttccatcccaactgcctcttcttcacattctacacgaatgagtgggagacggaatcacagaggaatgtttgttttcttaagacatctaaaagtggaagaccaagtccccctattattcaagaaaatgctgtatctggatacagtctcttcacctgcagaaaagctcgccctgaaccctgccatttcaagatttactctggagttgccttcgaaggggaagaactgaacgcgaccttcgtgcagggagcagatgcgtgccaagagacctgtacaaagaccatccgctgtcagttttttacttactcattgcttccccaagactgcaaggcagaggggtgtaaatgttccttaaggttatccacggatggctctccaactaggatcacctatgaggcacaggggagctctggttattctctgagactgtgtaaagttgtggagagctctgactgtacgacaaaaataaatgcacgtattgtgggaggaacaaactcttctttaggagagtggccatggcaggtcagcctgcaagtgaagttggtttctcagaaccatatgtgtggagggtccatcattggacgccaatggatactgacggctgcccattgctttgatgggattccctatccagacgtgtggcgtatatatggcgggattcttaatctgtcagagattacaaacaaaacgcctttctcaagtataaaggagcttattattcatcagaaatacaaaatgtcagaaggcagttacgatattgccttaataaagcttcagacaccgttgaattatactgaattccaaaaaccaatatgcctgccttccaaagctgacacaaatacaatttataccaactgctgggtgactggatggggctacacaaaggaacgaggtgagacccaaaatattctacaaaaggcaactattcccttggtaccaaatgaagaatgccagaaaaaatatagagattatgttataaccaagcagatgatctgtgctggctacaaagaaggtggaatagatgcttgtaagggagattccggtggccccttagtttgcaaacatagtggaaggtggcagttggtgggtatcaccagctggggtgaaggctgtgcccgcaaggagcaaccaggagtctacaccaaagttgctgagtacattgactggatattggagaagatacagagcagcaaggaaagagctctggagacatctccagcatgaggaggctgggtactgacggggaagagcccagctggcaccagctttaccacctgccctcaagtcctactagagctccagagttctcttctgcaaaatgtcgatagtggtgtctacctcgcatccttaccataggattaaaagtccaaatgtagacacagttgctaaagacagcgccatgctcaagcgtgcttcctgccttgagcaacaggaacgccaatgagaactatccaaagattaccaagcctgtttggaaataaaatggtcaagggatttttattaggtagtgaaattaggtagttgtccttggaaccatyctcatgtaactgttgactctggacctcagcagatcacagttaccttctgtccacttttgacatttgtgtactggaacctgatgctgttcttccacttggagcaaagaactgagaaacctggttctatccattgggaaaaagagatctttgtaacatttcctttacaataaaaagatgttctacttgaaaaaaaaaaaa

SEQ ID NO: 2103 - DNA, 5588 bp, Rattus norvegicus
  misc_feature (4291)..(4291): n is a, c, g, or t
ggacaagacagtgtctaaaaaaattgagctctacacttgtactagtgcatagcagaggaaaacatccacaaggaaaagtaggaagtttgaggtcggccattagtcatatcaktgcacacattttccatgaaatacatacacccaccagagtataggtaccagtggtgtacatgctttgcaaatttctgagtgtamgtagaataaggatgaatttgtgagtaaagcagttcastaaagtttacagagacattcaccacaagccagctctttgtcactgaaacactccaaagaggtgtgcagataggcagtggtcagtcctcaaaggaacgtcttaaatgatttgagtcctttagggtgcagcactgtgaacagttcatagtcctctgtagacttgatgctcttggctgtagggttgaaactttcaattttttcctttgttttttccagacagggtttctctgtgtatccctggctgtcctggaactcactatagascaggctggcctcaaactcacaaaagtcagcctgcctstgcacaccgactgytgggattaaaggcccgtgcccccattgcccagctaggtttggaatttaataagttagatgatactctcagattgcttgtcctgcctattaaattacaagttagtgcggtgccagaccttccaagcatgggagcmwmgtstccccgaaaggacacaattagatgaaatgtttttgaaagctacaaggaagctgaccaaagagtttatgaattgccttcacaggcaacaagacaaacccactgatttttaaccttcaggaaatgacactcggagactgttgcagctttgcaaagcagaacaatttacattgttagcagcttgccttagaggagagagcagagtataccgcagacatcatttctactacagtggaggagccgtacaggacctgtttcactgcagggggatccaaaacaagccccgtggagccgcagctagagctacaacagccgcaggacactgtgtctctccctctgttcccccttccccacgcaaccccagatccatttacactttacatccgtagacgttatcctgcaccgttcaacgagtcaccagggtggtcccttcacgctacgaatctgtctgccatcctgatccaacagtctcttcctccactccctctgcagagaagggcatcacatgtcagacagcctgtaagaaccactcactgagaaccaagacgcagaagtgcctgagaaaaaccactcagagggatgccgattcggacctaattacaggaaattgcagcatcctggaacggaatgaaaggatctgtgcagagacggcaaaagtcaggttacagtagaccctgagcaaaacagagtggactccagcctgcgtggatgatcttgaaacaggaatggtttggggttcgggcctcttacactgaatttccctactgccaccctttctactcaagcaaaatcttcaagaaaagatcgcctgggagggaagtagctgcttgtggctttgcactgtgatgagggcaaatgatacagttttccaaagaaaatagaccaaaactttcttcttgacaagaaacaaacctgctgtcgtcagagggtatttctaacctctctgtgaaagaaagacaacaccagagcctgggcggcccagttgctgagggaagtttccatggtgaagtctcagggaggcttcctgggagcagaacatagtgaatgctaatccggagctgctactgccagcctagagaacccacggggagatgattcctcatgaagggcctggatcccctacagaaatccaatgtgactctctgtttatcagactaaaaccagagccagccagacagtgaaacagccaccgtggaggggggacggcgaaaaatgaaatctaaccaagagcggagcaatgaatgcctgcctcccaagaaacgtgagatccccgccaccagtcggccctccgaggagaaggccactgctctgcccagcgacaaccactgcgtggagggtgtggcatggctccccagcacccctggcagccgcggccacgggggtgggcggcacgggccagcagggacttccggggaacatggtttacaaggaatgggtttacataaagcactgtccgcagggctggattactccccacccagtgcccccaggtcggtccccacagccaacacgctgcccaccgtgtaccctcctcctcagtcagggacgccggtgtctcctgtgcagtacgcccacctatcacataccttccagttcattgggtcctcccagtatagtgggccttacgcgggctttatcccttcccagctgatctccccaccaggcaacccagtcaccagtgcggtggcctcggctgcaggggccaccactccatcacagcgctcccagctggaggcatattccaccctgctggccaacatgggcagtctgagccaggcaccaggacacaaggttgagccccctccgcagcagcacctcggcagggctgcgggattagtcaacccggggtcccctccacctacccagcagaaccagtacattcacatttccagctctccgcagagctccgggcgggcaacatctccacccatcccggtccacctccatccccatcagacgatgatcccgcacacgctcaccctggggccttcatcccaggtggtcgtgcaatacagtgacgccggaggccactttgttcctcgagagtccaccaaaaaagcagaaagcagcaggttgcagcaggctatgcaggccaaggaggtcctcaatggggagatggagaaaagccggaggtatggggcgtcatcttctgtggagctgagcctggggaagacgagcagcaagtcagtgcctcacccctatgagtccaggcatgtggtggtccacccgagcccagcagactacagcagtcgtgatacctccggggtccgtggatctgtgatggtcctgcccaacagcagcacaccctcagccgacctggagacacagcaggccacacatcgagaggcctccccatccaccctcaatgacaagagcggtttgcacctagggaagcccggccacaggtcctacgcgctgtccccgcacacggtcattcagaccacacacagcgcatcagagcctctcccggtgggcctaccagccacggccttctatgctggcgctcaacctcctgtcatcggctatctgagtagccagcagcaagcaatcacctatgctggtggtctgccccagcacctggtgatcccaggtacccagcccctgctcatcccagtgggcagccctgacatggacacacctggggcagcctcggccatagtgacgtcatcgccccagtttgctgcagtacctcacacgtttgtcaccaccgccctgcccaagagcgagaacttcaacccagaggctctggtcacccaggcagcctacccagccatggtgcaggcccagatccacctgccggtggtacagtccgtggcatcccctgccgcggcatcacccacgctgccgccatatttcatgaaaggctccatcatccagctggccaacggggagctgaagaaggtagaggatctgaagacagaggatttcatccagagtgcagagattagcaatgacctcaagatcgactccagtactgtggagaggatcgaggacagccacagccccggtgtggcggtgatacaatttgctgttggtgaacaccgagcccaggtcagtgtcgaagttttggtagagtatcctttttttgtatttggacagggctggtcatcctgctgtcccgagcggaccagccagctctttgatctgccgtgttccaaactctccgttggggacgtctgcatctcgctcaccctcaagaacctgaagaatggctctgttaaaaagggccagcccgtggaccctgccagtgccctgctgaagcacgcaaagaccgacagcctggctggcagcagacacagatacgccgagcaggaaaacggaatcaaccaggggagcgcccaggtgctctctgagaacggcgaactgaagtttccagaaaaaattggattgcctgcagcacccttcctcaccaaaatagaaccgagcaagcccacagccacgaggaagaggaggtggtcggcgccggagacccgtaaactggagaagtcggaggacgagccacctttgactcttcccaagccttcgctcattcctcaggaggttaagatctgcatcgaaggccgatctaacgtgggcaagtagagaccgtgcgggcagccgaggcgtggnccccgtttgctgtctgtatccagattactgtactgtaggctaaataacacagtatttacatgttatcctctttaggttcgtgttctaaccttgtcattagagtcaaacaggtgtgtggcaggaaactggtgcgtccgcgatgtgatgtctgtcgaggagctggcgggtggagggtggtcataaccgtggccatggagctccggggcatcctaaggggccctgaaggggggcttcatcagcacctgccttctccagcagcacagagctgaggggcgtcagttcccactggtttcaagagcaaactcagtgggaagtaacttgcaagtaacctgcaagggtgtgtctgggtgcgtccctggtgaagaaggggtgcgcaggtgccatggcggtgagggagggtctctctttctctgcctctgtctccctcacttgctcactctcagcatgggattgggggacctgggtttcccacatgcaaagtggtcaggaacccagcttccaggcactgtagggaaggcatcagactggcagatgggaaactagtttcaaagaacgtggttctctccaacatattttacaataaaaagcaacttttaatcatarawawarawawawatatatttccccccatggggcctgactgcactgagttttttgttgttgttgttttattttgttattttgggttttttgttttgttttgttttgttttgttttgttttgttttttaagagcagctgccacttggcaaggatttcgtccctccctgctttaccagtccagtgacatcgccatggtgtcgtggtgggcagggacgtccttgctcaggtcactcctggtcaggcaggtagcagtggggcccagggacagagggagcaccaacactggtttctgcgcagtgttaggaaacccaatcaggttatttgcattgctcccaagaagaaaatgccagctcccctccccactcccgagagggtcagggcgctctcagagcccagctggcagcataattgtccacctcttaggtctagtactgttcctgattctgtgaggaattcgatccggaagatgctcaatctgttactatctcgtaaacagttaaaaatgccgtgcagtcttcttaaccaagcaccttgttctgtcattcaacaagtactgtatctactttcgactctttgtggggggaaaaaaagacaaacctaagttgcttttgatcttcttcttcttcttcttcttcttcttcttcttcttcttcttcttcttcttcttcttcttcttcttcttcttcttcttcttc

SEQ ID NO: 2104 - DNA, 2304 bp, Rattus norvegicus
caagggctgcctgtttagctgctgcaaggtagaagggactcgcctgcttgcagcctcgctccaggaaacatgagttgcgccggcaacgatcaggcggcggccagcggttccagctcgggcagcggcggcatcttccggagtcccgcggcgaagatgctcaaagtcacggtgccctcctgtccctcctcgccctgctcctcggtcacctccagtactgagaacctcgtcccggattactggatcgacggctctaaacgggatcctctgagcgatttcttcgaggtggagtcagagctgggacggggtgctacatccattgtgtacagatgcaaacagaaggggacccagaagccctatgctctcaaagtgttaaagaaaacagtggacaagaagatcgtgagaactgaaataggagttctcctgagactctcacacccgaacatcataaaactcaaggaaatatttgaaacccccacagaaatcagcctggttcttgagctagtcacaggaggagaactgtttgacaggattgtggagaaaggctattacagtgaacgcgacgcggccgatgctgtgaassagatcctggaggcagttgcttacctgcacgaaaatggaatcgtccatcgcgacctcaaaccagagaatcttctttatgcaacgccagcccctgatgcaccactcaaaattgctgattttggactttctaaaatcgtggaacatcaagtgctcatgaagacggtgtgtggaaccccggggtactgtgcacctgagattctccgaggctgtgcctatggccccgaggtggacatgtggtctgtaggaataattacctacatcctactttgtggatttgaaccattctatgatgagagaggtgatcagttcatgttcaggagaattcwsrakkgtgaatattactttatctccccctggtgggatgaagtttctttaaatgccaaggacttggtcaagaaactcattgttttggaccctaagaagcggctgactacattccaagccctccaacacccgtgggtcacaggaaaagcagccaactttgtccacatggataccgctcagaaaaagcttcaagaattcaatgctaggcgcaagcttaaggcggcagtgaaggctgtggtggcctcttctcggctgggaagtgccagcagcagtcacaccaacatccaagaaagcaacaaagccagctcggaggcacagcccgcccaagacggcaaggacaagacagatcctctggaaaacaaaatrcaagcgggggaccacgaggcagccaaggctgcagccgatgagacgatgaagctacagtccgaggaggtggaggaagaggaaggtgtaaaagaagaggaggaagaggaagaagaggaagaggagacctccaggatggtacctcaggagccagaggacaggctggagacagatgaccaggaaatgaagagaaattcagaggagacgttgaagagtgtggaggaagaaatggacccgaaagctgaggaggaagccgctgccgtgggacttggggtccctccacagcaggatgctattctgccagagtactaacccrgcttcctttaggccccaggccaaccccagcattttatgcactttgtccttcagcaaggtggggaagcatgataagcactatagtgattctgttttgaggtgcaaaaaaaaaatccatatataccagttggtaaccctaacgtcagtgcatgtgtttgctttatgaaatagagaagttttctacggcatgtaatggattcctaatacccaggagttaaatttgaaatttctagcaaacaacacagcccttaaaaatcattcccggcctctggtagcacacactgaagtgaaatagcacagggactttggaggcttaggcatcctacaccctccacaagtcttcaaagagggcaactcctttgaactcagctacaaccagctggagttaccagacacattcccatgactttccaaatactttgagggggaccagccttgtaggccgttataaaagtaggtaatggagggttataaaagatacctggagaaggtgcaaaaacatctgtttatagtgtagagaagctgaagcattcttacagggtactgagtccacagtccccttaagtgtatgcagagaatgtctaattttttagtacaccatataatacccaaagtgctcatcatagagttctgccagtttacagttcttgggaaatttttttttaaactgagccgctcccttcctttacctgcctttcaaataaaatgcctcttcagagtcaa

SEQ ID NO: 2105 - DNA, 4811 bp, Rattus norvegicus
atctgtgtgcgagtgcgtgtgcgtgcgtgtgtgtgtgtgtgtgtgtgtgtgtgtgtgtgtgtgtgagcgtgtgtgtttttggatttcatactaattttctggagtttctgcccctgctctgcgtcagccctcacgtcacttcgccagcagtagcagaggcggcggcggccgccggttagagcccagtcgctgcttcagctgctgttgctgcttctgcggcgctctgctccctgcgctggctacgggaggccgggggagccgcgccgacagtcctctgtggccagggccggcactgtcctgctaccgcagttgctccccagccctgaggtgcgcaccgatatcgatatccgtgccggtttagcggttctgcgacccaaagagtccagggagagccaccgagtggcgcctggcgtataggaccatgcagccgccttgtggcttggagcagcggcccgtgatgttccagccactgtgaaccatttggtcagcgccaacctgctcagccccagcaccgacaggctcagcctctggtacgctcctctcggcgggaggccatcagcaccaagcagcaagagggctcagggaaggcctcccccctccggcgggggacgcctggctcagcgtagggacacgcactctgactgactggcactggcagctcgggatgtcgccctggccgaggtggcatggacccgccatggcgcggctctggggcttatgcttgctggtcttgggcttctggagggcttctcttgcctgccccatgtcctgcaaatgcagcaccactaggatttggtgtaccgagccttctcctggcatcgtggcatttccgaggttggaacctaacagcattgacccagagaacatcaccgaaattctcattgcaaaccagaaaaggttagaaatcatcaatgaagatgatgtcgaagcttacgtggggctgaaaaaccttacaattgtggattccggcttaaagtttgtggcttacaaggcgtttctgaagaacggcaacctgcggcacatcaatttcactcgaaacaagctgacgagtttgtccaggagacatttccgccaccttgacttgtctgacctgatcctgacgggtaatccgttcacgtgttcctgtgacatcatgtggctcaagactctccaggagacgaaatccagccccgacactcaggatttgtattgcctcaatgagagcagcaagaatacccctctggcgaacctgcagattcccaattgtggtctgccgtctgcacgtctggccgctcctaacctcacggtggaggaagggaagtctgtgaccatttcctgcagcgtcgggggtgacccgctccccaccttgtactgggacgttgggaatttggtttccaaacacatgaatgaaacaagccacacacagggctccttaaggataacaaacatttcatcggatgacagtgggaaacaaatctcttgtgtggcagaaaacctcgtcggagaagatcaagactctgtgaacctcactgtgcattttgcaccaaccatcacatttctcgaatctccaacctcagaccaccactggtgcatcccattcactgtgagaggcaaccccaagccagcacttcagtggttctacaacggagccatactgaatgaatccaagtacatctgtaccaaaatacacgtcaccaatcacacggagtaccacggctgcctccagctggataaccccactcatatgaataatggagactacaccctaatggccaagaatgaatatgggaaggacgagagacagatttctgctcacttcatgggccggcctggagttgactatgagacaaacccaaattaccctgaagtcctctatgaagactggaccacgccaactgacatcggggatactacaaacaaaagtaatgagatcccctccacggatgttgctgaccaaaccaatcgggagcatctctcggtctatgctgtggtggtgattgcctctgtggtaggattctgcctgctggtgatgctgcttctgctcaagttggcgagacattccaagtttggcatgaaaggcccagcttccgtcatcagcaacgacgatgactctgccagccctctccaccacatctccaacgggagcaacactccgtcttcttcggagggcgggcccgatgctgtcatcattgggatgaccaagatccctgtcattgaaaacccccagtacttcggtatcaccaacagccagctcaagccggacacatttgttcagcacatcaagagacacaacatcgttctgaagagggagcttggagaaggagcctttgggaaagttttcctagcggagtgctataacctctgccccgagcaggataagatcctggtggccgtgaagacgctgaaggacgccagcgacaatgctcgcaaggactttcatcgcgaagccgagctgctgaccaacctccagcacgagcacattgtcaagttctacggtgtctgtgtggagggcgacccactcatcatggtctttgagtacatgaagcacggggacctcaacaagttccttagggcacacgggccagatgcagtgctgatggcagagggtaacccgcccaccgagctgacgcagtcgcagatgctgcacatcgctcagcaaatcgcagcaggcatggtctacctggcatcccaacacttcgtgcaccgagacctggccacccggaactgcttggtaggagagaacctgctggtgaaaattggggacttcgggatgtcccgggatgtatacagcaccgactactaccgggttggtggccacacaatgttgcccatccgatggatgcctccagagagcatcatgtacaggaaattcaccaccgagagtgacgtctggagcctgggagttgtgttgtgggagatcttcacctacggcaagcagccctggtatcagctatcaaacaacgaggtgatagaatgcatcacccagggcagagtccttcagcggcctcgcacgtgtccccaggaggtgtacgagctgatgctgggatgctggcagcgggaaccacacacaaggaagaacatcaagaacatccacacactccttcagaacttggcgaaggcgtcgcccgtctacctggacatcctaggctagactccctcttctcccagacggcccttcccaaggcacccctcagacctcttaactgccgctgatgtcaccaccttgctgtccttcgctctgacagtgttaacaagacaaggagcggctctccggggtgaggcagtgcgcacttccccatccacagacagtatcgactcgcttctggctttgtcgctttctctccctttggtttgtttctttcttttgcccattctccatttatttatttatttatttatttatttatttatttatttatttatttatctatctatctatctatttwtttwtttwtttattggtcttcactgcttcatggtcctcggcctctctccttgaccgatctggcttytktwytyytwttywcwgtmcayakacaaaggccttaacaaacctgatttgttatatcagcagacactccagtttgcccaccacaactaacaatgccttgttgtattcctgcctttgatgtggatgaaaaaaagggaaaaaaaataatcaaacatctgacttaaaccgtcacttccgatgtacagacacggggcgtttctatggattcacttctatctatctatttatttatttatctatttatttatttctcttctttgttgttttccggtggttttagcctgtgtatgagaagggaaagtcatgtacagtctgggaaaactttatctgtgggaaatggaaaccagaaggggaaagaagctttaccataaagcacagcaggagtgagacacagaaaagccattggatcagccagagtccgtcctgcataggaaaacccagcagccatcaggctggaggatcatgttcggcactgacccccgaggacctttctgaggaggacacagaatgttaaactctgcatcatggacacagtttccgatcacagatactggccttcaatsswmrwraaaaaaaaaaaaacccagatagttcttgtgagacctggacagcacgtccaacatccagacattgtggtcgggcacagtgacagagttgatgcatttctcacgggttattctacagagcttttgtcaagtccaatggaaggaggtagattcttgttcagatatgatttcgggaaaaaccgagtccttgacaragrcaggagacaccctcagttgggaggcaagtttctcttaccttggactttctcacacagcaattctcacccccamsmmytcsrcwckmrsctgtcwtgtaactgtgcaaacaaaagtgtgcatggtctttgtcagttgatacctttgtgcacctctgtgcagaaactgctgtctgtcccggctgtggtacccgatcagtggggtagatccmcgaaaggtctcattttaggccgctttgggaaggtaaccagatcggtagctggaagcactctccagtaggtggcgaagggtgagtgggtctgctgaagcctgcatatcttcacccacctcaaacccaccgggctgcacaggggacaggcacaggccacccctgagggacagggaagctctcttgggataccacctgagtttacattcagtgtgctcaggtcaagtctctcgctcggggctctgtttcggggagaatggtttcattccaacgcactcattatcaggattctgttttcttaactatactccattaaaaaggttttttttacaaaaaaraaaaaaaaaaaacc

SEQ ID NO: 2106 - DNA, 905 bp, Rattus norvegicus
agactgttggagagctccgggggaggtcgccacatccttcrggatgaaagctgcagtgttggctgtggccctggtcttcctgacaggttgccaagcttgggagttctggcagcaagatgagccccagtcccaatgggacagggtgaaggatttcgccactgtgtatgtggatgcagtcaaggacagcggcagagactatgtgtcccagtttgaatcctccactttgggcaaacagctgaacctgaatctcctggacaactgggacactctgggttcaactgttggtcgcctacaggaacagctaggcccagtgactcaggagttctgggctaacctrgagaaagaaacagattggctgagaaacgagatgaacaaggacctggagaatgtgaaacagaagatgcagccccacctrgatgaattccaggagaagtggaacgaggaggtcgaggcctaccgccagaagctggagcctctgggcaccgagcttcacaaaaacgcgaaggagatgcaaaggcatctaaaggttgtggccgaggagtttcgagaccgcatgcgtgtgaatgcagacgcgctgcgcgcaaagtttgggctctacagcgatcagatgcgcgagaacctggcccagcgcctgaccgagatcargaaccaccctaccctgatcgagtatcataccaaggccrgcgaccacctgargacacttggtgagaargccaaacccgcgctggatgacctrggccagggcctgatgccggtkctggaagcctkgaaggccaaaatcwtgrgtwtgatcgrtgrggccaaaaagaagctgaacgcttagtgaggcgcccgtcaccactccccacccctgaattggctttcttacaataaacgtttccaaagtggraaaaaaaaaaaaaaaa

SEQ ID NO: 2107 - DNA, 1552 bp, Rattus norvegicus
atgggctccctgcagccggatgccggcaatagcagctggaacggcaccgaggcgcccggaggcggcacccgggccaccccttactccctgcaggtgacgctgacgctggtgtgcctggctggcctgctcatgctgttcaccgtgtttggcaacgtgctggttattatcgcagtgttcaccagccgcgcgctcaaagcgccccagaacctcttcctggtgtctctggcctcagcggacatcctggtggccacgctggtcattcccttttctttggccaacgaggttatgggctactggtactttggtaaggtgtggtgcgagatctacttggccctcgacgtgctcttttgcacgtcgtccatagtgcacctgtgcgccatcagccttgaccgctactggtccatcacgcaggccatcgagtacaacctgaagcgcacsccgcggcgcatcaaggccatcattgtcactgtgtgggtcatctcggccgtcatctccttcccgccactcatctccatagagaagaagggcgctggcggcgggcagcagccggccgagccgagctgcaagattaacgaccagaagtggtatgtcatctcgtcgtccatcggctccttcttcgcgccttgcctcatcatgatcctggtctacgtgcgtatctaccagatcgccaagcgtcgcacccgcgtgccgcccagtcgccggggtccggacgcctgttccgcgccgccggggggcgccgatcgcaggcccaacgsgstgggcccggagcgcggcgctggtaccgcgggcgcggaggccgagccgctgcccacccagcttaacggcgccccgggggagcccgcgcccacccggccgcgcgacggggatgcgctggacctagaggagagttcgtcgtccgagcacgccgagcsgcsccaggggcccggcaaacccgagcgcggtccccgggccaagggcaagaccaaggcgagccaggtgaaaccgggggacagtctgcsscggcgcgggcccggggctgcggggccgggggcttcggggtccgggcagggagaggagcgtgccgggggcgccaaagcgtcgcgctggcgcgggaggcagaaccgcgagaaacgcttcacgttcgtgctggcggtggtgatcggcgtgttcgtggtgtgttggttcccgttctttttcacctacacgctcatagcggtcggctgcccggtgccctaccagctcttcaacttcttcttctggttcggctactgcaacagctcgctgaaccctgttatctacaccattttcaaccacgacttccgccgcgccttcaagaagatcctctgccgtggggacagaaagcgcatcgtgtgagcgctcgggctgtgccctgcttacagaccctggtcagatgcaggccctgggcttcgagggggcgcgtctacgcatgcagcccctagcactctgaaaccctggaccttcctgctctgtgtaatacccagtttggaggggacttggtggcttttgagaccttttgttaccatgtgtaaagttctggctgagagggacatat

SEQ ID NO: 2108 - DNA, 2144 bp, Rattus norvegicus
ctagagatccctcgacctcgagatccattgtgctctaaagctctgggctacagaagtgttgaacaggtcattgagtcacacctgctgaagctgcttcagaacatcaaggagtgacgactcctcagaaaaggccacctgcccttctcagccctgggtccttaatgatagttttgtttacgtgtaaatttttatagttcgtttgagtgtaaatttttatctcagttgcaaatttgctggtttttagtgagttttaatacatattcctctggataattcacttgtctataataaaattaatcctgattttttaaaactcgggaccacyagykwgsrctrtgsmcasmmcymgsgmccmccagcttgcactatgcccacccccagcgccccctcgccacagcccaagggcttcagaagggccgtctcagagcaggatgccaagcaggccgaggytgtcacgtccccaaggttcatcggacggcgacagagtctcatcgaggatgcccgcaaggagcgggaggcggcggcagctgcagcagcagmagcggtagcctcctcggaacctgggaacccactggaggctgtggtatttdaggagagggatgggaatgctgttctcaacctgctcttctccctgaggggtacaaaaccctcctccttgtytcgggctgtaaaagtatttraracatttgaagccaaaattcaccacttagagacccggcctgcccagaggccactggcaggaagcccccacctggagtattttktgcgcttcgaggtgcccagtggagacctggctgccctcctcagctctrtgcgtcgggtgtctgacgacgtgcgcagtgccagagaggacaaggtcccctggttcccaagaaaagtgtcggaattkgacaagtgtcamcacctggtcaccaagtttgaccctgatctggacctggaccacccgggcttctytraccaggtgtatcgccagcktcggaagctgattgcagagattgccttccagtacaagcacggtgaaccaattycccatgtggaatacacagcggaagagattgctacctggaaggaggtatatgtcacgctgaagggcctctatgctacccatgcctgccgggagcacctggagggtttccagcttctggaacggtactgtggctaccgagaggacagcatcccayagctggaggacgtgtcccgcttyttgaaggagcggactggcttycarctgcgacccgtggccggtctactgtccgcccgtrattttytggccagtctggccttccgcgtgtttcaatgcacccagtatatccgccatgcctcctcacctatgcattcacctgagccggactgctgccatgagctgttgggacatgtacccatgttggctgaccgcacatttgcccagttctcccaggacattggacttgcatctytgggggcctcagatgaagaaattgaaaaactctccacggtgtactggttcactgtggaattcgggctatgtaaacagaatggggagctgaaggcttatggtgcagggctgctgtcttcctacggagagctcctgcamtccctgtcagaggagcctgaggtccgagcctttgacccagacacagcagctgtgcagccctaccaagatcaaacctaccagcctgtgtactttgtgtccgagagcttcaatgacgscaaggacaagctcaggaactatgcctctcgtatccagcgsccattctctgtgaagtttgacccrtacacactgsccattgacgtactggacagccctcamaccatccagcgytcyttggagggggtccaggatgagctgcacamcctggcccacgsamtgagtgccattagctaaatgcatagggtaccacccacaggtgccagggcytttcccaaagtytccatccccttytccaacctttcctggcccagaggctttcccatgtgtgtggctgggccctttgatgggctcctcttggacccccatcctcccaacactgcttctcaaccatgtcttactactgcatgcactccagggtggtcctgcattcctcctgccctccatgctctatactaccctgattattctctcaataaaggaaggaaagaatctaaccaaaaaaaaaaaaaaaaaa

SEQ ID NO: 2109 - DNA, 2189 bp, Rattus norvegicus
acccgcccgtcgttccgcacagggttggatagttgtgtcggccagggtggctccaggatgttagggactgtgaagatggaagggcatgagagcaacgactggaacagctactacgcggacacgcaggaggcctactcctctgtcccggtcagcaacatgaactccggcctgggctccatgaactccatgaacacctacatgaccatgaacaccatgaccacgagcggcaacatgaccccggcttccttcaacatgtcctacgccaacccgggcttaggggccggcctgagtccgggtgctgtggccggcatgcccgggggctctgcaggcgccatgaacagcatgacggcggcgggcgtcacagccatgggtgcggcgctgagcccgggaggcatgggctccatgggcgcgcagcccgcggcctctatgaacggcctgggtccctacgctgccgccatgaacccgtgcatgagtcccatggcgtacgctccgtccaatctgggccgcagccgcgcggggggcggcggcgacgccaagacgttcaagcgcagttaccctcacgccaagccgccctactcctacatctcgctcatcaccatggccatccagcaggcgcccagcaagatgctcacgctgagcgaaatctaccagtggatcatggacctcttcccctattaccgtcagaaccagcagcgctggcagaactccattcgccactcactgtctttcaacgcttgtttcgtcaaggtggcgcgatccccggacaagccgggcaagggctcctactggacgctgcacccggactccggcaacatgttcgagaacggctgctacttgcgccgtcaaaagcgcttcaagtgtgagaagcagccgggggccggaggtgggagtgggggcggcggctccaagggggtcccagaaaaccgcaaagacccctcaggcccggttaaccccagtgccgaatcacccattcatcggggtgtgcacggaaaggctagccagctagagggcgcgccggcccccgggcccgccgccagcccccagactctggaccacagtggggccacggcgacagggggcggttcggagttgaagtctccagcttcttcatctgcgccccccataagctccgggccagggggctggatctgtacccccctctcaccgacatggcttgccccccacgaatctcagctgcacctgaaaggggccccccactactcctttaaccaccccttctccatcaacaacctcatgtcctcctcggagcagcagcacaagctggacttcaaggcatatgagcaggcactgcagtactctccttacggcgccaccttgcccgccagtctgccccttggcggcgcctcagtggccacgaggagccccatcgagccctcagccctggagccggcctactaccaaggtgtgtattccagacccgtgctaaatacttcctagctcccagaactgagggtttgtctgcatggccaacctggtatggtagcaggagagaaaaaccaacagtaaacacacacacacacagagtcacacacacatacagagtcacacacacagacacacacacacactgacacactcacactgacacactcacagagtcacacacacatacagagatatctgcaaatacagctcagggtttgaaagaataatatataaccgaagactaagaaagtgtgtgagcccagtatgcattcacagaactccaggtattttgtgggaactgagtgactttggaagtgaaagcagatgcagcagcattggaaagtagcccagaactccacactggctgaaacttggattttattcaccaagctgcatgtccttggttctggaaagcaatttagttcttgttcttctttcggtgagcatgaaactggactgctcaggagtatggaaactgtaaaaacttcagagtcagcaaaaggaaatcatgacttcactttagcagaggagattttaaaacttctgacttttgagaccacatcttaataactacataagaaaccctgagttatgatgacccagctaaacaagttccccaaacactagcatcatcagctgcgacagtgttcactaaccctttgcttgaaattgatgtcacaagcttcaggcaggtaccctgtctgtcctgtcccagtgctagacagcctgatgtgatggaattc

SEQ ID NO: 2110 - DNA, 2225 bp, Rattus norvegicus
tctcccgggtattggctgcagctaagcggggcttcctgggccgactgaggtgggtagccagaaaaaggcctgaggtggctgacaaccagggcggccagacaacgcgagtcctgcgcgccttctgaggcctccctgggacttaactgtaacggggaggggcctctggagcagcggccagcgagttaaagtatgctgggagccgtgaagatggaagggcacgagccatccgactggagcagctactacgcggagcctgagggctactcttccgtgagcaacatgaacgccagcctggggatgaatggcatgaacacttacatgagcatgtccgcggctgcaatgggcagtggttccggcaacatgagcgcaggctccatgaacatgtcatcctatgtgggcgctggaatgagcccgtcgctggctggcatgtccccgggcgcgggcgccatggcgggcatgagcggctcagctggggcggccggcgtggcgggcatgggaccgcacctgagtccgagtctgagcccactcgggggacaggcggccggggctatgggtggccttgctccctacgccaatatgaactccatgagtcctatgtacgggcaggcgggcctgagccgcgctcgggaccccaagacgtaccggcgcagctacactcacgccaagcctccctactcgtacatctcgctcatcaccatggccatccagcagagccscaacaagatgctgacgctgagcgagatctatcagtggatcatggacctcttccctttctaccggcagaaccagcagcgctggcagaactccatccgtcattctctctccttcaacgactttctcaaggtgccccgckcgccagacaagcctggcaagggctccttctggaccctgcaccctgactctggcaacatgttcgagaacggttgctacctgcgccgccagaagcgcttcaagtgtgagaassaactggcgttgaaggaagcagcgggtgcgggcagtggcggaggcaagaagaccgctcctgggacacaggcttctcaggttcagctcggggaggccgcaggctcggcctctgagactccggcgggcaccgagtccccccattccagcgcttctccgtgtcaggagcacaagcgaggtggcctgagcgagctgaagggaacacctgcctctgcgctgagtcctccggagccggcgccctcgcctgggcagcagcagcaggctgcagcccacctgctgggcccacctcaccatcctggcctgccaccagaggcccacctgaagcccgagcaccattacgccttcaaccaccccttctctatcaacaacctcatgtcctccgagcagcaacatcatcacagccaccaccaccatcagccccacaaaatggacctcaagacctacgaacaggtcatgcactaccctgggggctacggttcccccatgccaggcagcttggccatgggcccagtcacgaacaaagccggcctggatgcctcgcccctggctgcagacacttcctactaccagggagtgtactccaggcctattatgaactcgtcctaagaagatggctttcaggccctgctagctctggccactggggagaaggacaagggaaatgacaggctgagtggaaacattgggggaactttgaggaaaaagtagccaccacacttaaggccccaaaggagcagtttcacctgtctgtgtccctaaatagctgggccacactgatctgtcattctaaatagggaagggaatggaaatatatatgtatacmcataaacttgttttaatggaggacctttggttcccactatgtagactactgcttctcaaggcacctgcagattttgatttttgttcttgattctctctcwattgckgtcgttgacagagaagtctgacttaaaaaaaaahcaaactaaacaaaaaaaaaaacttttgatgagtgacttgagtgtaaaaccatgtagttttaacagaaaaccagagggttgtattgatgtttaaaagagaaaaaaaaataatgatgtaagagtctggtataaatgaccaggagaaaggacaaaaatgcatccattctggacatggtgaaatccaggtctcgggtctgatttaatttatggtttctgcgtgctttatttatggcttataaatgtgtgttctggctagaatgccagagttccmcaaatctatattaaagtrttattgccaatttt

SEQ ID NO: 2111 - DNA, 2471 bp, Rattus norvegicus
ggaaaatgcagatttagcatcaagcacagacacacactagctctttctctcgggtacacacagctccgcacattcgcacccctgccagtcagccgggctgcgcgactccacggcttcctggcagccagctgctggtggacagcgcacagatttgctgtttgccaagcttctcttctgcctcttttgctacacaaagattttttaaaaaaagaaaaacagaaacaaaaactacatacctattttttatttgcatcttccctcttcttcccctgctccaccaccctgcgcgcctcgcagccccacttttcactcccaaagaaggatggagggcggttgtggatctcagtggaaggcggccgggcttctcttctgtgtcatggtttttgcgtctgccgagagaccggtcttcacgaatcattttcttgtggagttgcataaagacggagaggaagaggctcgccaagttgcagcagaacacggatttggagtccgaaagctcccctttgcagaaggcctgtaccacttttaccacaatggccttgcgaaggccaaaagaagacgcagcctacatcmcaagcggcasytggagagagaccccaggmtaaagatggccctgcagcaagaaggatttgaccgtaaaaagagagggtacagagacatcaatgagattgacatcaatatgaatgatcctctttttacaaagcaatggtacctgttmaacactgggcaagctgacgggactcctgggmtagacytgaatgtggccgaagcctgggagctgggatacacagggaaaggagtsmccattggaatyatggacgatggaattgactatctccacccagacctggcctacmmcyatarctcwgatrmaastymtgwctycagyrgmaawrammmmwawmmawaccctcgatacacagatgactggttcaacagccatggaaccaggtgtgcaggagaagtttccgctgcagccagcaacaatatctgtggagtcggtgtagcatacaactccaaggtggcaggtatccggatgctggaccagccctttatgactgacatcatcgaggcctcctccatcagccacatgcctcaactgatcgacatctacagtgcaagctggggccccacagacaacgggaagacagttgatgggccccgagagctcacgctccaggccatggctgatggtgtgaacaagggccgtgggggcaaaggcagcatctatgtgtgggcctccggggacggtggcagctacgatgactgcaactgtgacggctatgcgtcaagcatgtggaccatctccatcaactcggccatcaacgacggcaggaccgccttgyatgacgagagctgctcttccaccttggcctctacgttcagcaacgggaggaagaggartcccgaggccggtgtggctaccacagacttgtatggcaactgtactctgaggcattctggkacmtcwgcagcwgcycctgagrmwkctggcgtgtttgcattggctttggaggctaacgtggatctgacctggcgagacatgcaacatctgacagtgctcacctccaagcgaaaccagcttcacgatgaggttcatcagtggcgacggaatggggttggcctggaattcaatcacctctttggctacggagtccttgatgcaggtgccatggtgaaaatggctaaagactggaaaactgtcccagagagattccactgtgtgggaggctcggtgcagmacsmkgagaaaataccacccaccggcaagttggtactgaccctccaaacaaatgcatgtgaggggaaagaaaacttcgtccgctacctcgagcatgtccaagctgtcatcacagtcaacgcaaccaggagaggagacctgaacatcaacatgacctccccgatgggcaccaagtccattttgctaagccggcgtccaagagacgacgactccaaggtgggctttgacaagtggcctttcatgaccacccacacctggggggaggatgcccgagggacctggaccctggagctggggtttgtgggcagtgcaccacagaagggcttgctgaaggaatggaccctcatgctacatggmrsccagartkcsscakasrtcgatcaggtggtgagggattaccaatcgaagttggccatgtccaagaagcaagagctggaggaagagctagatgaagctgtggagagaagtytgcaaagtatcctgagaaagaactaggrccacgcttccgcctccatctccccttcctccctgtctctgcctctccttggtccacagttctggcagccaccagccacccagcaattcctgttaccctcacacaagcagtcccagcctggtctgaagctttgcttgctctcaatgattattttcactacaatggaagcaatcatttttattctgtagcccaaatatagcgttcctaccaacawmwaaaaaaaaaaaaaaaaaa

SEQ ID NO: 2112 - DNA, 2924 bp, Rattus norvegicus
atggctcagtggaaccagctccagcagctggacacgcgctacctggagcagcttcatcagctgtacagcgatagcttccccatggagctgcggcagttcctggcgccttggattgagagccaagattgggcatatgcagccagcaaagagtcacacgccactctggtgtttcataacctcttgggcgagatcgaccagcagtatagccgattcctgcaggagtccaatgtcctctatcagcacaacctgcgaagaatcaagcagttcctgcagagcaggtatcttgagaagccaatggaaattgcccggattgtggcccgatgcctgtgggaagagtctcgcctcctccagacggcagccacggcagcccagcaagggggccaggccaaccaccccacagctgccgtagtgacggagaagcagcagatgctggaacagcatcttcaggatgtccggaagcgtgtgcaggatctagaacagaaaatgaaagtggtggagaatctccaggatgactttgatttcaactataaaaccctcaagagtcaaggagacatgcaggatctgaatggaaacaaccagtctgtgaccagacagaagatgcagcagctggagcagatgctcacggccctggaccagatgcggaggagcatcgtgagcgagctggcagggctcttgtcagcaatggagtacgtgcagaagacactgaccgatgaagagctggctgactggaagaggcggcagcagatagcgtgcatcggaggccctcccaacatctgcctggaccgtctggaaaactggataacttcattagcagaatctcaacttcagacccgccaacaaattaagaaactggaggagctgcagcagaaagtgtcctacaagggggaccctattgtgcagcaccggccaatgctggaggagaggatcgtggatctgttcagaaacttaatgaagagtgccttcgtggtggagcggcagccctgtatgcccatgcacccggaccggcccttagtcatcaagactggtgtccagtttaccacaaaagtcaggttgctggtcaaatttcctgagttgaattatcagcttaaaattaaagtgtgcattgataaggactctggggatgtygctgccctcagagggtctcggaaatttaacattctgggcacgaacacaaaggtgatgaacatggaggagtccaacaacggyagcctgtctgcagagttcaagcacctgaccctgagggagcagagatgtgggaatggsggccgygccaattgtgatgcctccttgattgtcactgaggagctgcacctgatcacctttgagacagaggtgtaccaccaaggtctcaagatcgacctagagacccactccttgccagtcgtggtgatctccaacatctgtcagatgcctaatgcttgggcatcaatcctgtggtataacatgctgaccaataaccccaagaacgtgaacttcttcactaagcctccgattggaacctgggaccaagtggccgaggtgctgagctggcagttctcgtccaccaccaagcgagggctgagcatcgagcagctgaccaccctggccgagaagctcttagggcctggtgtgramtactcagggtgtcagatcacatgggctaagttttgcaaagaaaacatggccggcaagggcttctcgttctgggtctggctagacaatatcatcgaccttgtgaaaaagtatatcttggccctttggaatgaagggtacatcatgggtttcatcagcaaggagcgggagagggccatcctaagcacaaagcccccgggcaccttcctgctgcggttcagtgagagcagcaaggaaggaggggtcactttcacttgggtggaaaaggacatcagtggcaagacccagatccagtctgtagaaccatataccaagcagcagctgaacaacatgtcatttgctgaaatcatcatgggctataagatcatggrcgctaccaacatcctggtatccccactggtctacctctaccctgacattcccaaggaggaggcattcggaaagtattgtcgccccgagagccaggagcaccctgaagctgacccaggtagtgctgccccttacctgaagaccaagttcatctgtgtgacaccaacgacctgcagcaataccattgacctgccgatgtccccccgcactttagattcattgatgcagtttggaaataacggtgaaggtgctgagccctcagcaggagggcagtttgagtcgctcacgtttgacatggatctgacctcggagtgtgctacctccccgatgtgaggagctgaaaggcaaagctacagagtatgactgagacactgcccatgtcaccttagcagcaactcagatcactgaactcactgtgtccagattttttctttaacctcctacttctgctgtctttgggcagtctgggtactttttaaaatagagaactgagtgagcgtgggtgatgcgctcttatgtgaggaggagggcacctcttgagtccgtgatggctgtgaaagcagagggctgggggggagcgaaaggaaacacctatgttctgtccgcctgtcctcctggtttgttgttgacaagcgcctcctggtgccatggcatcctgctgcccctttctgtgagctgataccccaggctgggactcccggctctgcactttcaacctggttaatgtccacatagaagctaggactaagcctataggcttctctttaagttaaaaaaaaaaaaaatactaagaattaaagggcaaaacacactgaaaacagcatagcctttccatatcaaagaaaactcgggtaacagccttttcggtgctttaagctgtcttaggctgatcatttatataaactctgcaatggttcaatcaatctgtaaagacagctgagaac

SEQ ID NO: 2113 - DNA, 2550 bp, Rattus norvegicus
agatcccggagagccttggkgctctccggttccttgggttgtggcagtgagtcccaccagacccgccctttgcacaccacttccgaaggccggggtctwswkcccgscaggcckkgryrctmtaccstatycattkkkttrtkgcagtgcctgagtcttcttttaaaacaagatgccgtcgggtttccagcagatcggctctgaagatggggaaccccctcagcagcgagtgactgggacactggtccttgctgtattctcagctgtgcttggctcccttcagtttggctataacattggagtcatcaacgccccacagaaagtgattgaacagagctacaatgcaacttggctgggtaggcagggtcctgggggaccggactccatcccacaaggcaccctcactaccctttgggctctctccgtggccatcttctctgtgggtggcatgatttcctcctttctcattggcatcatttctcaatggttgggaaggaaaagggctatgctggccaacaatgtcttggctgtgctggggggcgccctcatgggcctagccaatgccgcggcctcctatgagatactcattctcggacggttcctcattggcgcctactcagggctaacatcagggttggtgcctatgtatgtgggagaaatcgcccccactcatcttcggggtgccttgggaacactcaaccaattggccatcgtcattggcattctggttgcccaggtgttgggtttggagtctatgctgggcacagctaccctgtggccattgcttctggctatcacagtactccctgctctcctgcagctgcttctgttgcccttctgtcctgagagcccccgatacctctacatcatccggaacctggaggggcctgcccgaaagagtctaaagcgcctgacaggctgggctgatgtgtctgatgcactggctgagctgaaggatgagaaacggaagttggaaagagagcgtccactgtccttgctgcagctcctgggcagccgcacccaccggcagcctctgattattgcagtggtgctgcagctgagccagcagctctcaggcatcaatgctgttttctactattcaaccagcatctttgagttagctggggtggaacagccagcctacgccaccataggagctggtgtggtcaataccgtcttcacgttggtctcggtgctcttagtagagcgagctgggcracggacactccatctcctgggcctggcaggcatgtgtggctgtgccatcttgatgacggtggctctgctgctgctggagcgggttccatccatgagttatgtgtccatcgtggccatatttggctttgtggccttctttgagattggtcctggccccatcccctggttcattgtggccgagctcttcagccagggcccccgcccagcagccatggctgtagctggtttctccaactggacctgtaacttcatcgttggcatgggtttccagtatgttgcggatgctatgggtccctacgtcttccttctatttgccgtcctcctgcttggcttcttcatcttcaccttcctaagagtgcctgaaaccagaggccggacatttgaccagatctcggccaccttccgacggacaccttctctcttagagcaggaggtgaaacccagtacagaacttgaatacttagggccagatgagaatgactgaggggcaaaatggtgggagagccaccctccccaccagactccctcctttcctcgcagcactttagccctctcttcccttacctccaggatgaaggaaacagcagcctggggaactgggaagctggagggaggggcgggtcacatacccctcattccctctgtgtgattcttttggattatttatgtgttgtggctaggctgtggccacctagatgggcttttctcccgtcctgccttcctcttacccctatccagagactcagctctagaatacttctgttccctttaagagaaggggtctgctggagggtgaagctgccctgagttcagsrsgakgagaagcaggggggctgtgagtgagtgctttcctactatgactcctcccacaaactggcgctttcactgaactcttgccacatagactctgggtgaagggggttgtcttgacccctccagggcaawrgatrsrcyytycymmmrtcwwgccttgcctckywscystakscwscasmctccagskcwaaggaacacaacagtacatccctgacagggcaaggatggtagagcacatcagtctccatttggggccctggcctgttccccagggctgccaagtgtgggtaccaacactttcttgttcccctccaggaagggtgctaaacccgaaagcttctgaccaactaaggcaggaggggatttgaaaggctgcctataaacactggttgggagggagcctttggtatttttgtatgtacgatagggagcagaaacctgggggctggtgtattaaatatgtatatagagattcatccataaagtcmcwrwawrrrramaarwaaaaaaaaaaaa

SEQ ID NO: 2114 - DNA, 2555 bp, Rattus norvegicus
cgggggagctggcccagggggagcggctggtgctgccactggcatccctaggcacccaggtctgcaataaagtctggcagccactgcatggctgagcgacaaccagtggctgggagtccggctctgtggctgaggaaagcacctgtctgcatttagagaatgcaaaatagagaatgtttacctgccagtcattacatctgagtcccatgagtctctgagaacataatgtccatctgtacctcttctcacaaggagttttctcagctgcgaccctctgaagacatggagatcaaaaactcaccgtcgagccttagttccctgcttcctataactgtagccagtccatcctacccctggagcacggccccatctacatcccttcctcctacgtagacaaccgccatgagtattcagctatgacattctacagtcctgctgtgatgaactacagtgttcccggcagcaccagtaacctggacggtgggcctgtccgacwgagcacaagcccaaatgtgctatggccaacttctgggcacctgtctcctttagcgacccattgccaatcatcgctcctctatgcagaacctcaaaagagtccttggtgtgaagcaagatcactagagcacaccttacctgtaaacagagagacactgaagaggaagcttagtgggagcagttgtgccagccctgttactagtccaaacgcaaagagggatgctcacttctgcsccgtctgcagcgattatgcatctgggtatcattacggcgtttggycatgtgaaggatgtaaggccttttttaaaagaagcattcaaggacataatgattatatctgtccagccacgaatcagtgtaccatagacaagaaccggcgtaaaagctgccaggcctgccgacttcgcaagtgttatgaagtaggaatggtcaagtgtggatccaggagagaacggtgtgggtaccgtatagtgcggaggcagagaagttctagcgagcaggtacactgcctgagcaaagccaagagaaacggtgggcaygcaccccgggtgaaggagctactgctgagcaccttgagtccagagcaactggtgctcaccctcctggaagctgaaccacccaatgtgctggtgagccgtcccagcatgcccttcaccgaggcctccatgatgatgtccctcactaagctggcggacaaggaactggtgcacatgattggctgggccaagaaaatccctggctttgtggagctcagcctgttggaccaagtccggctcttagaaagctgctggatggaggtgctaatggtgggactgatgtggcgctccatcgaccaccccggcaagctcattttcgctcccgacctcgttctggacagggatgaggggaagtgcgtagaagggattctggaaatctttgacatgctcctggcgacgacgtcaaggttccgtgagttaaaactccagcacaaggagtatctctgtgtgaaggccatgatcctcctcaactccagtatgtaccccttggcttctgcaaaccaggaggcagaaagtagccggaagctgacacacctactgaacgcggtgacagatgccctggtctgggtgattgcgaagagtggtatctcctcccagcagcagtcagtccgactggccaacctcctgatgcttctttctcacgtcaggcacatcagtaacaagggcatggaacatctgctcagcatgaagtgcaaaaatgtggtcccggtgtatgacctgctgctggagatgctgaatgctcacacgcttcgagggtacaagycctcaatctcggggtctgagtgcagctcaacagaggacagtaagaacaaagagagctcccagaacctacagtctcagtgatggccaggcctgaggcggacagactacagagatggtcaaaagtggaacatgtaccctagcatctgggggttcctcttagggctgccttggttacgcaccccttacccacactgcacttcccaggagtcagggtggttgtgtggcggtgttcctcataccaggatgtaccaccgaatgccaagttctaacttgtatagccttgaaggctctcggtgtacttactttctgtctccttgcccacttggaaacatctgaaaggttctggaactaaaggtcaaagtctgatttggaaggattgtccttagtcaggaaaaggaatatggcatgtgacacagctataagaaatggactgtaggactgtgtggccataaaatcaacctttggatggcgtcttctagaccacttgattgtaggattgaaaaccacattgacaatcagctcatttcgcattcctgcctcacgggtctgtgaggactcattaatgtcatgggttattctatcaaagaccagaaagatagtgcaagcttagatgtaccttgttcctcctcccagacccttgggttacatccttagagcctgcttatttggtctgtctgaatgtggtcattgtcatgggttaagatttaaatctctttgtaatattggcttccttgaagctatgtcatctttctctctctcccg

SEQ ID NO: 2115 - DNA, 1858 bp, Rattus norvegicus
gcgagctcctgggcccggccgcggaccaccggagccgccagggcctcgccggaggagggcggggagaggaccatgtgaatgtgctccggaaccgagcgccacgccacgcagtgtttgaaaggaacacaatgctgatctagtcgtggcaaaaggtcagtcctactgctggtttagaagacatgtggtgtatataacgtttgtgatagttggtggaaatttgggagcttggataatgggctgtgtgcaatgtaaggataaagaagcagcgaaactgacggaggagagggacggcagcctgmrccagrgsyctkggtmccrstatggcmcmsaccccwcccctyagcwytaccccagcttcggtgtgacctccatcccgaactacaacaacttccacgcagccgggggccagggactcacggtctttgggggtgtgaactcctcctctcacaccgggaccctgcgtactagaggagggacaggagtgacactatttgtggcactttatgactatgaagcacggacagaagatgacctgagttttcacaaaggagaaaaatttcaaatattgaacagctcggaaggagactggtgggaagcccgctccttgacaactggggaaactggttacattcctagcaactacgtggctccagttgactccatccaggcagaagagtggtactttggaaaacttggccgcaaggatgctgagagacagctcctgtcctttggaaacccaagaggtacctttcttatccgcgagagcgaaaccaccaaaggtgcctactccctctccatccgagactgggacgacatgaagggagaccatgtcaaacattacaaaatccgcaagcttgacaacggcgggtactacatcaccacgagggcccagtttgagacccttcagcagcttgtacagcattactcagagagagccgcgggtctctgctgccgtctagtagttccctgtcacaaagggatgccaaggcttaccgatctgtctgtcaaaaccaaagatgtctgggaaatccctcgagaatccctgcagttgatcaagagactgggaaatgggcagtttggggaagtatggatgggtacctggaatggaaacacaaaagtagccataaagactcttaagccaggcacaatgtccccggaatccttcctggaggaagcacagatcatgaagaagctgaagcacgacaagctggtgcagctctatgcagttgtgtccgaagagcccatttacattgtcacggaatacatgaacaaaggaagtttgctcgacttcttaaaagacggtgaaggacgggctctgaaattgccaaacctcgtggacatggcggcacaggttgctgcaggaatggcttacatcgaacgcatgaattatatccacagagatctgcggtcagctaacattctggtggggaacggactcatttgcaagattgctgacttcgsakwggcccggttgattgaagacaatgagtacacagccagacaaggtgcaaagtttcccattaagtggacagcccccgaagcggccctgtatggaaggttcacaatcaagtctgacgtgtggtcctttggaatcttactcacagagctggtcaccaaaggcagagtgccgtacccaggcatgaacaaccgtgaggtgctggagcaggtggagagaggctacaggatgccctgcccgcaggactgcccgatctccctgcacgagctcatgatccactgctggaaaaaggatccggaggagcgccccactttcgagtacttgcagggcttcctggaggactactttaccgccacagagccccagtatcagcccggtgaaaacctgtgagagcctgcgctt

SEQ ID NO: 2116 - DNA, 1331 bp, Rattus norvegicus
gcctgaagtggtccagcacaagaactcctcatggaccaatcaaatatgacatcctttgctgaggagaaagccatgaatacctccagcagaaatgcctccctggggacttcacacccacccattcccatagtgcactgggtcatcatgagcatctctcctctcggctttgtggagaacgggatcctcctctggttcctttgcttccggatgaggagaaatcccttcacggtctatatcacccacttgtccattgctgacatctccctcctgttctgtatttttattctgtccatcgactatgctttagactatgaactctcttctggccattactacacaatcgtgacgttatcggtgacttttctatttggctacaacacaggcctctatctgctgacagccatcagtgtggagagatgcctttcagtcctctaccccatctggtacagatgtcaccgccccaagcaccagtcggcattcgtctgtgccctcctgtgggcactttcatgcttggtgaccaccatggagtacgtcatgtgtattgacagcggagaagagagtcactctcagagtgactgtcgggcggtcatcatcttcatagccatcctcagcttcttggtcttcactccgctcatgttagtgtccagcaccatcttggtggtgaagatacggaagaacacatgggcctcccattcttcgaagctgtacatcgtcatcatggtcaccattatcatattcctcatctttgccatgcccatgcgggtcctctacctgttgtattacgagtactggtcaacctttgggaacctgcataacatctccttgcttttctccaccatcaatagcagcgccaaccctttcatctacttttttgtgggcagcagtaagaagaagcgcttcagggagtccttaaaagtggtcctgaccagagctttcaaagacgagatgcaacctaggcgycaggagggcawtggcaacactgtatccattgagactgtggtctgaggaccgcagggggagtcttagacagaaacagctgaatgtgggtggctttcgatttgtgcttggaatgcaatttaagtccatttaaatctcctaaatctgataagaaggaagcattctacatgcatgggggtctaatcgatgatgagcttgtgttgctacttagtatcttctggaaatgcttccatatgtgacgggactctgtcttttctatcattatcaaagactcattcttctcttagctgtccagtagtgttcaacagttaactataaaaactgccctagcaggaactatctgaattgtgactcagagaaaaaaaaaaaaaaaa

SEQ ID NO: 2117 - DNA, 5333 bp, Rattus norvegicus
gcaagtggaggctccctctccttccctccgtctctgtggccacccccatttttaagcctgccagtttggtcctttccacgctccatgctgcctggtgcccgggagcccaggccatctgcgactccaggacaggaagtcagaagaggggagctcagacatgacaggcaagccacatggctggtacaatgagtaccatggaacctgaaggagcgcatgtgtttgatagtgttggctcttcaagaggcatcatctatggaagtgccaagggtgtgtacaagagctattctccacatacctcccagagctctgaaggggtgcagacatggcgggcaatgctgtggacaatgccaaccacctgacctacttttttggcaacatcacccgggaagaggccgaagactacctggtccagggaggcatgaccgatgggctctacctgctacgccagagccgcaattacctgggtggttttgctttgtcggtggcacacaacaggaaggcacaccactacactatcgagagagaacttaacggcacctacgccatctccgggggcagggcccatgccagcccggcagacctctgccattaccactcccaggaacccgaaggcctkgtctgcctcctcaagaagcccttcaaccggcccccgggggtacagcccaagactggaccctttgaggacctgaaggagaacctcatcagggaatatgtgaaacagacctggaaccttcagggccaggctctggagcaagccatcatmagtcagaagccccaactggagaagttgatcgccacgacggctcatgagaagatgccctggttccatggcaacatctccagagacgagtcagagcagacggtcctcatagggtcaaagaccaacggaaaattcctgatcagggccagagacaacaacggctcctttgcactgtgcctgctgcacgaagggaaggtattacactatcgcatcgacagggacaagaccgggaagctttccatccccgaggggaagaagtttgacaccctctggcagctagtggaacattactcttacaagccagatgggctattaagagtcctcacggtaccatgtcaaaagattggcgtgcagatgggccacccaggaagttcaaatgcccatcctgtgacttggtcaccaggtggaataatctcaagaatcaaatcctactccttcccaaagcctggccacaaaaagcctcccccaccccaagggagccgtccggagagcaccgtgtccttcaatccctatgagccaacgggaggggcctggggcccagacagaggccttcagagagaagccctgcccatggacaccgaggtatatgagagtccttacgctgaccctgaagagatccggcccaaagaggtctacctggacaggaaactgctgaccctggaggacaatgaactgggctctggcaacttcgggactgtgaaaaagggatactaccaaatgaaaaaagttgtaaaaacagtggctgtgaaaatcctgaagaatgaggccaacgacccggctctgaaggacgagctgctggcggaggccaacgtcatgcagcagctggacaacccctacattgtgcgcatgatcggaatctgtgaggcggagtcgtggatgctggtgatggagatggcggmrykggggcccctcaacaagtacctgcagcagaacaggcacatcaaggataagaacatcatcgagctggttcaccaggtttccatgggaatgaagtatttggaggagagcaattttgtgcacagagatctggccgcgaggaacgtgcttctggtcacccagcactacgccaagatcagtgacttcggtctttccaaagccctccgtgctgatgaaaactactacaaggcccagacccacgggaagtggccggtgaagtggtacgcccccgaatgcatcaactactttaagttctccagtaagagtgatgtctggagcttcggagtcctgatgtgggaagcgttctcctacgggcagaagccatacagagggatgaaagggagcgaagtgactgccatgctggagaaaggagagcggatggggtgccctccaggatgcccgagagagatgtacgacttgatgwwcctatgctggacttacgatgtggagaacaggccaggattcgcggctgtggaactgcggcttcgcaattactactacgacgtggttaactaagagcttgggtgcctgtccgcggccacctcgaattctcaagcgatcgcaggaaatttattcagatgaactggctctcagagtttcatctccctctgcccagaggagagctaaccaagcaaagctaggaactcactctcgcaacagttctggtcccaaaagacagacaagcagcaagcccgcgggacctgaggacttgtctgtctggcttttgtttccatctgtgtggttttcgtcttgggtcacgttccgggaaccatttccaaattcgcttgacgtcattccgttgctctggggccaggatttcagtgtcgccccctgcaggtcagaaagagaagtgcttcgccatttcagcaaaggactgagagaaacctcaccaatgccgttcggaaggcggaagacggttaaggaaaatgacagactcaggcactgcttttgctctcagcactgagactgaaacaccacgtgaatgggatgctgagacatggctggcttgcttgcacgcccctggagtccgcctccttgtagaatgacttgaagtccgctgttgtgtgcttacaggaggaggcgtgaatagcattctgcatgaaggctgccaggcagggtgggctcccatgatcctctgcgactgagccaagtgtatcaggcatgggtcagagtccctttctctgcagaaggaatgaatgcatccaggactccttgttgcggccacaatacctgaccagcaacctcagggaggaaacgcttgtttgggctcacaggccatcatggtggcaaagactttacaacaggcaggaaagacttgagggcatgaacaagaagctgtaaggtcacgtggtatccacacagaggaagcgaagaatgaacaggaagtaggaccaggctataaggccccaaagcccacccaccccaccccaccccccatcccccaccccccgtgacccactttccttcagcaagaccccacttcccaaaggttccacaggtctctcagacagtgaatgccaacagctggggaccaaagtgttcaaatatacgagcctctgtggggagcctttcacattcaaamwrmaararrwwmmatccattttctgatgctatgactgaacacctagatagggtggtgacaaagagaagcaatgtatctcttagctgtacatccctctccaagggtcggaactgcccccagtgagatgcagtgccaggcagcagccttcctgaatgtcacagggtgatatcccgatcagaggggggaagccttctcaggtgtgtccttctcttatgagcccctgataccgtcccagagcctcctcaggccccacttcttcttaaccatcccccaaggtcccatctccaaacaccatgctgtgaacctaggcactaagtcttcaacacatgagccctgaggggacacattcatactagagcagacggcaacacagtgaccaggaccacctcaggatgagctcgcggatggaattttaattcagaataaaaccagagaggtgaccttccccacaagtaagccttgctaagtgtgactttgagctctatcctcctgacttgcataaggttcggctaactaccgaccacacaccaagtgtcacctgtccatagcacagttgctgaggacataaaagttacaaaggcatagccttccgtctaggtctaggggaatgtacaaaggaagcatctcatcctcacccctgagacactgacaaacacagccagggacggcatgggaggccccactggcggcgggttcgatgaacagagccggtgaaatgggttcccctctttagaccagtagttctcaaccgagaccctccagtacagttcctagtgctgtgatgacccccaatcatcaagttactttgtggctacttcataactgtaattttgctactgttatgaatcatagtgtgaatatctgttgatatgcaggatatgcaatgtgcatcccccaaggagggcacacccacaggttgggaaccactgcctttgatatggaggcgctacacttagaagctatggtgtgtcttggaactgtgctagtaggtcagtcgccctgttgggggcagatccctgtgtgttgctggctgagtgggcctgcagaacacctccttggtgaggaaatcccgtgggtcactgcctgattgagtcaagggaggaagagacactgtgttggttatggaggacaggaccgtctagtctgaggaagaagctctctgctgagctcctggcctaccttcccctgtcctcagggtagggctattaaaaggccaccttgaaggtctgggggtggttgtgcgagaaccctatggaggcctctgtctttttcagtcttgtttgctttctggcctctctagtagtgcctctcctttccagggggttggactgaccattcgttatcggatgtgaccaagcagaacggagggagacacggctttgtctcccttcagaaggtcgaaactggctcctggacgcagaagtcatgtgtggctattgtccagggctctcatctgttgaaaactgtgtcttgctgtcaagattaattctctcccctggggccacagagaggagggcggatggagagaggatcctcctggagggtttagattctgaatgcaccataaatttgcaaggtcggaaacaaggtccttctcaggcgtctatacttggcctaggtctgctcacaagctgcctytggtgctccgaatcccttctgcctggcgctgggctcactgtrtgcyttmmcctatgaccykttaatcagcagagcacmcggagcacstaatytgcytbgcmacatchtaytgacctsgccacaccacatacctcatgcagaaccgaatgtctckccakkaaacgcccaagccagccattcataaaawmmwrwmwmwrtgtgcactggaacrtgtcmtccctgtacccaaacccamtttgtgtgccagacagtgactccacagggacgccaggcctgtgatcgcattgctcgttgcagagsgaagccccgggttgtccgtctcagggattactcccacccagagcagcacacagtgttcccctgttatktcagaamtkatttttaataaagatctrmtattaaaataaaaaaaaaaaa

SEQ ID NO: 2118 - DNA, 2858 bp, Rattus norvegicus
ggaacgagggtgcacggggcctccccgaggggccaagggagaggcaggcagccactatggagctctggcgacagtgcacccactggctgatccagtgtcgggtgctgcctcccagccaccgtgtgacctgggagggggcccaggtgtgtgagctggcacaggcactgcgggatggtgtcctcctgtgtcaactgcttaacaacctgctcccccacgccatcaatctgcgggaagttaacttgcggccccagatgtcccagttcctttgtcttaagaacatccgaaccttcctgtctacttgctgtgagaaattcggcctcaagcgcagcgaactctttgaggcttttgacctctttgatgtgcaggactttggaaaggtcatctacaccctgtctgccctgtcatggacacccattgcccagaacaaagggatcatgcccttcccaacagaggacagcgccctgggtgatgaagatatttacagtggcctttcagaccagattgatgacaccgcagaggaagatgaggacctttatgactgcgtggagaatgaggaggcagagggggacgagatctatgaggacctaatgcgctcggagtcggtgcccacacctcccaagatgacggagtacgataagcgctgctgctgcctgcgggagatccagcagactgaggagaagtacacagacacactgggctccatccagcagcacttcatgaagcccctccagcgattcctcaagcctcaagacatggagaccatctttgtcaacattgaggagctgctctctgtgcacacccacttcttaaaggaactgaaggatgccctgtctggcccgggagcaacgatgctgtatcaggtcttcatcaagtataaggagaggttccttgtttatggccgttattgcagtcaggtggagtcagccatcaagcacttggatcaagtggccacagcacgggaggatgtgcagatgaagctggaggaatgctctcaaagagccaacaatggccgcttcaccctgcgggatctgctgatggtgcctatgcagcgggtactgaagtatcacctcctcctccaggagctagtgaaacacacacaggatactacagaaaaggagaacctgcggttggccctggacgccatgagggacctggcgcagtgtgtgaatgaggtcaagagggacaatgaaaccttacggcagatcacaaactttcagctgtccattgagaacctggaccagtctctggccaactatggccggcctaagattgacggtgagctcaagattacctcagtggaacggcgctccaagacagacaggtatgccttcctgctggacaaagcactgctcatctgtaagcgccgcggggactcttatgacctcaaggcctcagtgaacctgcacagcttccaagttcgggatgactcttccggggagcgggacaacaagaagtggagccacatgttccttctgattgaggatcaaggtgcccaggggtatgagctgttcttcaagactcgggagctaaaaaagaagtggatggaacagtttgaaatggccatctccaacatctacccagaaaatgctacagccaatggacatgattttcagatgttctcctttgaggagaccacttcctgcaaggcctgccagatgttactcaggggcacattctaccagggatatcgctgttacaggtgccgtgcacccgcacacaaggagtgtctgggaagggtgcctccatgtggccgtcaagatttctcaggaaccatgaagaaggacaagctacatcgaagggcccaggacaagaaaaggaatgaattgggccttcctaagatggaggtgtgtcaggaatactacgggatccctcctcctcccggagcctttgggccatttctgcggctcaaccctggggacattgtggaactcactaaggcagaggctgaacacacctggtgggagggaagaaatacagctacgaatgaagtcggctggtttccctgtaacagagttcgtccctacgtccacggccctccccaggacctgtctgtgcacctctggtatgcgggccccatggagcgagcaggcgccgagggcatcctcaccaaccgctctgatgggacctacctggtgcggcaaagggtgaaagatacagcggaattcgccatcagcattaagtataatgtggaggtcaagcatattaaaatcatgacgtcagaggggttgtaccgcatcacagagaagaaggctttccggggcctcccggaactggtagagttttatcagcagaattccctaaaagattgcttcaagtcgttggacaccaccttgcagtttccttacaaggaacctgagaggagagccatcaacaagccgccggttggaagcaccaagtattttggcactgccaaagcccgctacgacttctgtgcccgggaccgatcggaactgtcccttaaggagggtgacatcatcaagatcctcaacaagaagggacagcaaggctggtggcgtggggagatctatggccggattggctggtttccctctaactatgtggaggaagactattctgaatactgctgagcccgatgccctgcaggacacagagagaggcagatgatggctgagcccaggatgccagcagggttgaggggctgtgagctgttctcattggcagaggatctggatggagctcagatggctagtggccagctagcagggttcccaggatgaagcccagagatggttaatttatagcacactgattttctcgagtcctccaagaaagctgattctaataaagtgaggacagcaggaaaaaaaaaaaaaaaaaaaaaaaaaaaaaaaaaaaaa

SEQ ID NO: 2119 - DNA, 1313 bp, Rattus norvegicus
atggccgacaaggtcctgagggcaaagaggaagcaatttatcaactcagtgagtgtagggacaataaatggattgctggatgaacttttagagaagagagtcctgaaccaggaagagatggatacaatcaaacttgcaaatatcactgttatggaaaaggcacgagacctgtgcgatcatgtcactaaaaaaggaccccgggcaagccagatgtttatcacttacatttgtaatgaagactgctacctggcagaaattctggagcttcagtcaggtccatcagctgaaactgtttttgttacagaagattctaagggaggacatcctttctcctcagaaacaaaagaaaaactgaacaaagaaggtggcgcatttcctggaccgagtggttccctcaagttttgccctttagaaatagcccagaaattatggaaagaaaatcattcagagatttatccaataatgaaaacacccactcgtacacgtcttgccctcattatctgcaacacagactttcaacatctttctcggagagtcggagctgatgttgacctcagagaaatgaagttgctgctgcaggatctgggctatactgtgaaagtcaaagaaaatctcacagctctggagatgacaaaagaattgaaagaatttgctgcctgcccagagcacaagacttctgacagtaccttccttgtattcatgtctcatggtctccaggagggaatatgtgggatcacatactctaatgaagttgsagatattttaraggttgacacamtctttcawatgatgaacacattgaagtgcccaagcttgaaagacaagcccaaggttatcattattcaggcatgccgtggagagaaacaaggagtggtgttgttaaaagattcagtaggraactccgaagagggattcttaacagatgcaatttttgaagatgatggcattaagaaggcccatwtagagaaagattttattgctttctgctcttcaacaccagataatgtgtcctggagacatccygtccrgggatcyctcttcattgagtcactcatcaaacacatgaaagaatatgcctggtcttgtgacttggaggacattttcagaaaggttcgattttctttcgaacaaccagactytagactacagatgccaaccactgaaagggtgaccctgacaaaacgtttctacctcttcccaggacattaragaatccaagacttcattcttatgtacctgtgttgggaatcatgccaataagaagccaataatccccaaaatgatacaataaatttcaaaacaaaacaaaaaaa

SEQ ID NO: 2120 - DNA, 1880 bp, Rattus norvegicus
  misc_feature (1549)..(1549): n is a, c, g, or t
gtgcctcaaagccaaggccagcgaggactccccttgggatcacattgacctcaccacaccactaaggtgctgaaccttctgcatcaacaaggcgcaggttaaaccccagtgtccacatggattttcctggtctaggggccctgggaacctcagaacccttgccccagtttgtggattctgccctggtgtcctcgacatcagactcagcgggtttcttttcctctgggcctgagagtywsgakrcakcatcttcctccacttctccwaatgcagccacggcagcagccacggyactggcctactacagagaagctgaggcctacagacactccccagtctttcakgtgtacccgctgctcaacagtatggagggaatcccagggagctcaccttatgctagctgggcctatagcaagacggcgctctaccctgcctcaactgtatgtcccagtcatgaggatgccccttcccagaccctggwagacccagatgggaagaacaacawtacattcttggaaaccttgaagacggagcggctgagtccagacctcctgaccctggggactgcactgcctacatcactccctgtcaccagcagtgcttatgggggagctgactttcccagtcctttcttctctcccactgggagccctctcagctcagcagcctattcttcccccaagtttcatggaagcctaccattggctccttgtgaggccagagagtgtgtgaactgtggagcaacggctactccactgtggcggagggacaggacaggtcactacctgtgcaatgcttgtggcttgtatcacaagatgaatggtcagaaccggcctctcatccggcccaagaagcgaatgattgtcagcaagcgagcaggcacccaatgcactaactgtcaaacaacaaccacgaccctctggcggaggaatgccagtggagacccggtgtgcaatgcctgcggcctctactacaagctgcaccaggtgaaccgcccactgaccatgaggaaagatggaatccagacgaggaaccgcaaggcatctggaaaagggaaaaagaagcggggctcaagtctggccggagcaggagcggctgaaggaccagctggtggattcatggtggtagctggtggcagcagtagtgggaattgcggagaggtggccccaggcttgacactgggcactgcaggtactgcccatctctaccagggcctgggacctgtggtgctgtcagggcctgtcagccatcttatgtctttccctggacctctgctgggatcgcctacggcctccttccccacaggtcctgtgcstaccaccaccagcactagcgtagtgtctccactcagttcttgaaggtacacaaaatgcctttggccttgtggcagaggasaygmksscmwmskyyyyywyytttatktkttggagacaggatcttgtgtakctcaggctgcctgtgaactatgtagctaagggtgaccccaaatttcmcattctcmtgcctctacctcctgagattaaaggcatatrkcmcmadrvwwrrmahnddmmdhdrhhdmrrttttktttttkttytkaracagggtttcamtatgcagccgakgctggctttgaattccctatgtagtccagactaacctcaaacttgagattytcctgcctcagttcccgagtgmtggaatcacaggcathtgcwaccactcctgttwctccctmstyttaragccaccagcctttacagcccaaccatytccttgccctgtaccstcaaagattttgtaaaataaaaccvccaargmcctgaammwrraramwrwrarctggtatttggctaaataaatgtcagtgtcaarwrrwrwmmaraaaaaaaaaaaaaaa

SEQ ID NO: 2121 - DNA, 1768 bp, Rattus norvegicus
cgcaggttgcccacaggaggtcgacttgccggcgctgtccttcgcgccgagctccctccatccttctttccgtctgctgagacgcaaggttgcggcgcgcacgctgagcagcgcactgactgccgcgggctccgctgggcgattgcagccgagtccgtttctcgtctagctgccgccgcggcgacctgcctggtcttcctcccggacgctagcgggttgtcaactattacctgcaagcataggccaacgaacaccttctttccaaattaattggaatgaaacaattctgttaacttcctaattctcagtttgaaactctggttgcttaagcctgaagcaatcatggtgaaccttggcaacgcggtgcgctcgctcctgatgcacctaatcggcctattggtttggcaattcgatatttccataagtccagtagcagctatagtaactgacacttttaattcctccgatggtggacgcttgtttcaattcccggacggggtacaaaactggccagcactttcaatcgtcgtgattataatcatgacaatagggggcaacattcttgttatcatggcagtaagcatggagaagaaactgcacaatgcaaccaattacttcttaatgtccctagccattgctgatatgctggtgggactacttgtcatgcccctgtccctgcttgctattctttatgattatgtctggcctttacctagatatttgtgccccgtctggatttcactagatgtgctattttcaactgcgtccatcatgcacctctgcgccatatcgctggaccggagtttcagttcctatccctgtgattggactgagggacgaaagcaaagtgttcgtgaataacaccacgtgcgtgctcaatgaccccaacttcgttctcatcgggtccttcgtggcattcttcatcccgttgacgattatggtgatcacctacttcttaacgatctacgtcctgcgccgtcaaactctgatgttacttcgaggtcacaccgaggaggaactggctaatatgagcctgaactttctgaactgctgctgcaagaagaatggtggtgaggaagagaacgctccgaaccctaatccagatcagaaaccacgtcgaaagaagaaagaaaagcgtcccagaggcaccatgcaagctatcaacaacgaaaagaaagcttccaaagtccttggcattgtattctttgtgtttctgatcatgtggtgcccgtttttcatcaccaatatcctgtcggttctttgtgggaaggcctgtaaccaaaagctaatggagaagcttctcaatgtgtttgtgtggattggctatgtgtgttcaggcatcaatcctctggtgtacactctctttaataaaatttaccgaagggctttctctaaatatttgcgctgcgattataagccagacaaaaagcctcctgttcgacagattcctagggttgctgccactgctttgtctgggagggagctcaatgttaacatttatcggcataccaatgaacgtgtggctaggaaagctaatgaccctgagcctggcatagagatgcaggtggagaacttagagctgccagtcaacccctctaatgtggtcagcgagaggattagtagtgtgtaagcgaagagcagcgcagacttcctacaggaaagttcctgtaggaaagtcctccccaccccccgtgattttcctgtgaatcataactaatgtaaatattgctgtgtgacaagacagtgtttttataaatagctttgcaac

SEQ ID NO: 2122 - DNA, 1905 bp, Rattus norvegicus
tctcactcacacgcgacgcgtcgcttctcctaggactcgctagcccgcactcctgctctcacccgtgagccatagcaggatggagctgctgtgttgcgagggcacccggctcgcgccccgggccgggcccgacccgcggctactgggggaccagcgtgtcctgcagagtttgctccgcttggaggagcgctacgtgccgcgaggctcctacttccagtgcgtgcaaaaggagatcaagccgcacatgcggaagatgctggcgtactggatgctggaggtgtgtgaggagcagcgctgcgaggaggatgtcttccctctggctatgaactacctggatcgctacctgtcctgcgtccccacccgaaaggcgcaactgcagcttctaggtaccgtctgcctgttgctggcctccaagctgcgcgaaaccacacccctgactattgagaagctctgcatctatacggaccaagctatggctccctggcagttgcgggaatgggaggtgctggtcctggggaagctcaagtgggacctggctgctgtgattgcgcacgacttcctggccttgattctgcaccgcctctctctgcccagtgaccggcaggcactggtcaaaaagcatgctcagacctttttggccctctgtgccacagattacacctttgcgatgtaccctccatccatgatcgccacgggcagcatcggggctgcagtgctaggcctgggtgcctgctctatgtctgcagatgagctcacagagctgctggcgggaatcacaggcactgaagtggactgcctgcgtgcctgccaggagcagcagatcgaagctgccctcagggagagcctcagggaagctgctcagacagcccccagccccgtgcccaaagcccccggggggtctagcagccaggggcccagtcagaccagcactcccacagatgtcacagccatccacctgtagtttgggacaggccccctcaggtggccaccaagcagaggaggggcccctgccaccccctcsctscctctaggaacaattcatgccatatctgaagcccgagggggctctttttcccctcacaaagccsarggggccaggtcctgcctatccccacagtgtgcactaaggggctgcttggtcatgagggtgtctacatggccagtcagttcctcttccttcccactcaaccagcttggctgtcctgggccatgatggtcagagagatacaaacaggtagaacccacacaccagcatttcttttgagtccctcctctgtctggggcgccgatcctttcagttgccaaaacgccccagtaccttcmaaaggtgttgttgcccctmgcagggtcactgcatttggatctgggtcyttcagaaatccmgatagacgcctatgaggasccaamctagatggmtgctgtgtaatccctactccagctgctcttagcgggaaccagcmtaggccttggctagaagagcaagcgcccgtaaacwgtkgstwkgmttccwgctakscwtctrtggttragggtcttrakkskscygatggtcatyttaattwattgctttgaawacmccgtaaragggyacagtdaggcctgtaccccacaagtggtggtaaccctggcggttgykctttccctcccctytgctaccgctttgtrgcccaggagctgctacagcctgggagggggtcmtgccttcctcwccgtagccmtccagstcatcttcagcggggagggtttaatagggatggatsccgtggaggtgactggactatcyggagagagggcgasccccatkgacacaggtstttcctcagrccacmmggtttggsvygsyggcccatttctatcatgctgccttaataaarrtttcmgrwthmwaaaaaaamaaaaaaaaat

SEQ ID NO: 2123 - DNA, 2308 bp, Rattus norvegicus
gaattcaaggtcctatgacccagaataggggttcgggatacagttgtgacttcgaaggccactctcctatcctctaagtctctggtttgtctagaggcctctggatctcctccacccagaagtgttccaggagagacaccaagagaggtgtttgggagaagctaattcatgggtttggggcaagggtgtggcactgggttcactctcggacctgtgtgtggcctctaaagttggaagaagacatcagagagtcatgaagctaggaagcaggtgggagggtgcgcgggctgcagaagcgtggctgataggggcgggcgcgcgggacgcggcagccaccgcgccagagagatcgcccggtgcccgcgactccggaccccgcccccgttggcggccgctctgcgtttctccgactcggaaccagacacagtggcagcctccggtgtgctgccgacacaggatctcagacccggcggcccgcgggcatcggtcgtttctggtcccatcttggggaccagaggtgcgcaagagtgttaccattacaggatcctaagcggtgcacggtgagcgctcctcgggtcggggacggtcagctgcagggcccggacgacctctggggtgcccgatggggccttccacggggcgcaggggcgaagttgggaccgcaagcagagagcccgagctactcagcgcgacatgctgcctcctgggcgcaaccgcacggctcaaccggcaaggctgggattacagaggcaactggctcaggtggacgccccagcgggctctgcaaccccactgggacccgcgcaggtggtcaccgcaggcctcctgactctcctaatcgtctggaccttgctcgggaacgtgctagtgtgtgctgccatcgtccgcagccgccatctgcgcgccaagatgaccaacatcttcatcgtatccctagctgtctcagacctcttcgtggcattgctggtcatgccctggaaggctgtggctgaggtggctgggtactggccctttgggacattctgcgacatctgggtggcctttgacatcatgtgctccactgcctccatcctgaatctgtgtatcatcagcgtggaccgttactgggctatttccagacccttccgctacgagcgcaagatgacccagcgagtagccctggtcatggtgggcctggcctggaccttgtccatcctcatctccttcatcccggtccaactcaattggcacagagacaaggcaggctcccagggccaagagggcctgctgtccaatgggacaccctgggaggaaggctgggagctagaagggaggacggagaactgtgactccagcctgaaccgaacctatgccatctcctcgtcactcatcagcttctacatcccggtggccatcatgatcgtgacctatacgcgtatctaccgcattgcgcaggtgcagatccggcggatctcctccctagagagggcagctgagcatgctcagagttgccggagtcgtggagcctatgaacctgaccccagcctgcgagcgtccatcaagaaggagaccaaggtcttcaaaaccctgtcaatgatcatgggggtcttcgtgtgttgctggttgcctttcttcatcctgaactgtatggttcctttctgcagtagtggggatgccgagggcccaaagactggcttcccttgtgtcagcgagaccaccttcgacatattcgtctggtttggctgggccaactcctctctcaatcccatcatctatgcctttaatgcagacttccggaaggtgtttgcccagctgctggggtgcagccacttctgcttccggaccccagtgcagacggtaaacatcagtaatgagctcatctcctacaaccaagacacggtcttccacaaggagatcgctactgcctatgtccacatgataccgaatgcagtatcctccggagacagggaggtgggagaggaggaggaggaggggcctttcgatcacatgtctcaaatctctccaacgacgccagacggtgacctggctgctgagtctgtctgggagcttgactgtgaggaagaggtttccttaggcaaaatctcacctctcacccccaattgtttcgataaaactgcttagaaacattctcatgggcatatacaatggtggccatatttccaagcatgcacaaatacccacgtgcgtacacacacacacacacacacacacacacacacacacactccagtgtgcatatgctttctgtagtctgctgcatagaaacaaacgattcttagctgagaaatgacgaggctgttggataact

SEQ ID NO: 2124 - DNA, 2449 bp, Rattus norvegicus
ctcggttgctacaagtccacatccagagacttggcaagaaacttgctgtgcggctccagcctggagacacatcgctggacaccatgtatggattcatcaacacctgcctgcagtctcywgtgrcwgagwratywrstakaswcgatgkakmwkcyarggcttctgcagaagtgcaagatgycttcatgacctacaccgtgtatgatgacatcatcaccattaagctcatccaagaagcctgcaaggttctggatgtgtccatggaagccattctgaagctctttggcgaatacttctttaagttctgtaagatgtctggctatgacaggatgctgcggacacttggaggaaatctcaccgagtttattgaaaacctagatgcactccacagttacctggcactgtcctatcaggaaatgaacgcaccatcctttcgagtggaggaaggagctgacggggcgatgcttctccactactactcagacagacatggtctgtgtcacattgtaccaggtatcattgaagctgtggccaaggacttctttgacactgatgtggccatgagtatcctggatatgaacgaagaggtggaaaggacagggaagaaagaacatgttgtgtttctggtcgtgcagaaggctcacagacagataagaggagcaaaggcaagccggccacaaggcagtgaggacagccaggcagaccaggaggctctccagggaacactccttcggatgaaggagagatatttaaacatccctgtttgccctggggagaaatctcactcaactgctgtgagggcatcggtcctttttggaaaagggcccctcagggacaccttccagcccgtctatcctgagagactatgggtcgaagaggaggtgttctgtgatgcttttcctttccacattgtctttgatgaagcactaagggtcaagcaagctggagtgaatattcagaagtatgtccctggaatcttaacccagaagtttgcactagatgagtatttttccatcatccaccctcaagttactttcaacatctccagcatctgcaagttcattaacagtcagtttgtcttgaagacaagaaaagaaatgatgcccaaagcaaggaagagccagccgatgctcaaactccggggtcagatgatctggatggagtctctgaggtgcatgatcttcatgtgttccccaaacgtccgcagcctgcaagagctggaagagagcaagatgcatctttctgatatcgctccgcacgacacgaccagggatctcatcctcctcaaccagcagaggctggcagagatggagctgtcctgccaactggaaaagaagaaggaggagttgcgtgtcctttccaatcacctggccatcgagaagaagaagacagagaccttgctgtatgccatgctgcctgaacatgtggccaaccaactcaaggagggcagaaaggtggctgcaggagaatttgaaacatgtacaatccttttcagcgatgttgtgacatttaccaacatctgtgcagcctgtgaacctatccaaatcgtgaacatgctgaattcaatgtactccaagtttgacaggttaaccagtgtccatgatgtctacaaagtagaaacaataggggatgcttacatggtggtgggtggagtaccagtacccgttgaaagccatgctcaaagagtcgccaattttgctctggggatgagaatttctgcaaaagaagtgatgaatcctgtcactggggaacctatccagatcagagtgggaatccacactggaccagtcttagcaggtgttgtgggagacaagatgcctcggtactgcttgtttggtgacactgtaaacacagcctctaggatggaaagtcacgggcttcccagcaaagtgcatctgagccccacagcccacagagccctgaaaaacaaagggtttgaaattgtcaggagaggcgagatcgaagtgaaggggaaaggaaagatgaccacatactttctgatccagaacctgaatgccaccgaggatgagataatggggcgaccttcagcccccgctgatgggaaggaagtatgtactcccggaaaccaagtcaggaagtcccctgctgtcccgaggaacacagaccatcagcaacaagtctacaaaggagacccagcagacgcttctaatgaagtcacacttgctgggagcccagtggcagggcgaaactccacagatgcagtcaataaccagccatcaccagatgagaccaagacaagtgtcgttgctagtggccctgtgctgtctgctttctgtgttgtgctgtgatcacgagaaaaagtgatcctatgggatccatttcctgtattccatggcagcaaagggaattaatttataaaaatgcttaagttcaaaatgtttttgtttccatatctcccttggggcccctttgagaataaaaaaattag

SEQ ID NO: 2125 - DNA, 9748 bp, Rattus norvegicus
  misc_feature (620)..(620): n is a, c, g, or t
cttctatttaattttttgagaaatacagcactggaaggaaacccagccataataagaaaagctcaacaaatttaacagatcaaaagctgttggcatttatagtatgattggactatttttgtgccactatgaagctatgcataagagacaaaacagagactcagtttttttccacaaggaaagattggggacagaacatgtgtcttgactctcacccacatacagtgtgccacgaataccctcttaactactggtaatatcttaaaaacaaacaaaccctacctgccataaaaattctatcagggctaagtggtggtggcacaggcctttaatcccagcactagggagtcagaggcagcagatctctgtgagttggtgcctagcctgttctacatctagttccaggatagccagtgctgttccacagaggaaaccaaacaaaccaaaaacctccattagagcagaagtaaaacgacaaaagagaagcctgagagcaagtacaggctcagcaacccacacccaagcactccagggacacggtacctgtcacccgcctccgtgtgctaaggacagtcctttctaacagaaggatggaaatttcttctgagggggggaaacanccaaacagagcttgggacgagactggggggagcactgtcttggtaagagggggcttccaacaacactgaggttcattctcggcagaatcccaccttgggggggggtttgggaggaattcaatcttcctttctcttaaagaaattactagcagtatataaaggtgtggtctagattctgtgcacttactggtggcctgaagggaacggaggcatccaacacggaagaacgggggagggggagggtgggggggtggcattgaaccttagacctggtattgaatatttcaaggaagttatattttgggaaattcctccttcactgaaagagtattcaaaaccaaaataagagaagtaagaactggaaagatggctcagtggttaaaaacatgtataatcacatgtatgaccccacacagacatgcacacattcatattaaaaacagagcaaatctcaactcaactttctcacttcttttctaagtaaacatttagaaaggaagatcagagacagtgttttttaccaagctaatccaccccaggattatctctcccattatcactgtctgggtaccctgtcactgggtccacaggacggctcagcagataaaaggttcttgtctctaagtctgatagcctgagttcacttcccaggacccacaaagaagagaacccattcccatcagttgtcttttaacttccattatgtacacagtacccacccaaaataattaaaggtaaaatgagaaaagaaaaagttttagcggtcctgtacttatatatgctaaagtacattgtaaaaactaccaaaaagacaagatatatattaaaagatttgatcattcaagaaactctaatacaacataacctttaatcagaaaattattgtagcaactctttggttgtttaaattttctaaaacgttaaatcatttagttgtgtgtacatgtgtgagtggagcgtgtgctgcggtgctcacgtggaacccagagacgacctttgggaattgtttctctccactaccaagagacttcaggggaactgcgctctggcagggctggcaatagatgcctttacccacgacaccgccttgcaccccttgttttcattttacgttttagttattatcttttgttttcttccaaacagtgtctctatggagcccagggctggtcccaaacagcgactcaggtgctgagagttggacaagtgaacccctcttgctcatttctcaagaaaatccctaaggaaggactggccttcttaacttttagaaattattatctaggggtgaaaagatggagccgagtctgggtccccaggacccacaggacaacaagacaaggtagaagacgttcataaccccagcactggggagatggacacgcggtccctggggctctggcctgccagtctagcttgagtcagcaagttccaagttcactgacacactctgtcccagaaagtaaggtagagtgactaaggaagctgctcatgcactagtaccacatataacatgtatacacactcatatatgtacacatccacgtgaattatctaaataccatactctctgagaaaaaatacagctgcttcatgttctagacataacctagcctataataccattctttgtgtctaccacttacaactgaagagccatgcaaagtgtccacacgttaatactgtgctacactctaggatacacaaggtgtggtggctggcgcatgcctgtgacagctggaggcaccaggatctgtggaagttagaacagcttacaagaacaggctctttccttctgctgtgtggggtgcacgcgcgcacacgcgcacacacgcgcacacacgcacacacacacacacacacacacagcctgtaaacggaaagcatcctagtcctagccggtcagccacggactgcggggagcctcacgcttactccactgcacatctcctccttacagactcaggcttggaagccaccgttcccaggatggctgccactacgtaacataacgggagaggtcccagaactcattagctcctacagggataccttcctcaacttttaccacatttacctttcctggtcctaatcccgccccggtgcctcgtgccgaattcggacgagggattccatctgatacgcagacctgcaggctgtcctttctcattttggttcttcttttattaaatagatcaaaagcatttgagagggaagagagagtacaagaagagttgagaccattgtcagaggtctcctgtgcaacttgagggcttttcacaagtcccccgccctataggaagacctagggtcagagacaaaagcttcgtccttgctttcacactgggtgatgtttttaattcccccctcccctcctttttttttcttttttgatggcagtagaagggagatcattagacctgagacacttgtattcctgtctacatcattggttttcaatcaacagaaccatttcctggataccaggctggggcagattatgctttgcgtcccagatgtagttaattgtggcatttcctaagagtcattcatttaatagcattgtagatgtataaacatagattgcagtgactaatatgtatcaattctttattctccctgcctcccccgccccttctgtatttaggctccataaaaactcttagcagtcctagttgtatccatttcattgttgtcgtagatgcaagaagactgtcctagtgacagggagagccggagggactccgttctcatcgattcgctcttcatcatggaccagtttaaagctgcagagagaatgagcattggaaaatccaacacccaaggacatcacagaagttactgctgtggctgaagccatcctccctaagggcagtgcccgagtcacaactgcggtgaagtttagtgctccatctttgttgtatggtgctctccgagactatcagaagataggccttgactggttggccaaactataccggaagaatctcaatggcatattagctgatgaagcagggcttgggaaaactgtgcagatcattgctttttttgcccaccttgccctgtaatgaaggtaattggggccctcatcttgttgtcatgaggagttgtaacaatactcaagtgggaactcgagttgaaacgctggtgtcctgccctccaaaactctttcttatgttggcacccacagagaactcaaaccaaagagacaggtagtgccaccccactgccactgccctctctctttctttgttttgcattgctggagatgtatccaggttccacatttcctagacgaggcgtgtgccggggaattatgcctttagtcaagtatcttttttatcttttgtcaagtatcttgtaagcatgttgtacaggtgctggagagatggcccagcagattaaaaagcacttgctacataaacctgacaattttgatccctggaagccatgggaaggtacaaaggagagaaccaactccacaaagttgtcttctgatccctataggcatgctgtggtacatacacatctacatagacatatcttacacgtcccttgataatatttgtgtgaaataaagctaaacaccttaatttttcttaacataaaatcttatgtatcccaggtttcaaacatttgatcttcctgcttcggctacattgagacagttacatgctgcttaatgtgtcccattgacacactgacctatactcagtttctagagtttgatcccccatgaaccagagaggacacaagatggactcctagttctctgggaaaaagctgcttcttatgcttgaggccctgtttcccttctgtgctacagatgtaatagagtcctttcttgacatgtatgggccctgagttcagttcccaatactgtaaggaaaatagttcagaatggagtatttgtctggagaaagaatcaatacttcctacctcaagactgtgctaatggagtgtatgagacctccctgtgtgttgtatttcctctggaataaacaggaatatttgtgacaagataccagtttcctttagtccccagtacttaatagttccagtcccaggtggctatgtaaagatcatttctatcatttgaagttttgcctcactgttagacactatgtcaagccaaatttactaagagatcctttaccatctatcgtaatcttttttccctgctgtaaaaaaataaacaacctcgtgccgaattcggcacgagatgtaaaaaatcttcagtgattaccgatagcgttcagaagtttgcagcagatcttgtgggaaaaagttttggcagtgcatttaaagacttacagaaaggagtttcttcatgtaccaatgcactgtgccacctggctgtcaaattgacatcatccatatttcagatggcatttaatgaactaagaaggcagtgtgcattttcattaaaggagcgagccattggtagcctggccagtcttttggtgagcgaagccttatcaaatgccttgaaagacttacagtatgtgaaaagcagatgtttacaaacacagttgctaggtttgctgcagacctggctgaagagcttgtttttgaaggtatcatggaagtgtgtcattttcatgtcctcagacacctgcatcttcacagtgtcagtcatttgactttgaagacaaagtcgtgaagtcatatgcccaaagagttgtctgaatctgtaatacaagaagcattcatagagctgtcacagacggacgtgaccttcacagcaaagacagcagttaatgtttctatgggtagtgtcaagtccgtgaatgcagaaaatgcagtgccacctgcgcagacccttacattcctcctcatcctttagcagtcaagcagttatgatgaccaaaccaatgcaggagcataagaaggaatacacggcacagcaggctttgtttcgtccctcaggaattgtcacttccataccagtgcccttggcaggtagtgcccttctcccatatcacgtgtcatctactttgtaccagtccaagtctctgtcatcgtctgagcataataaagcaaatggcggttctccccaagagcacattgccatggaaagcagtgcagaggaagtggattgttttaaaaacacctgtctaccttcagaactcagtccttgcagccagaatgacttcaaaccaactaatggtgatatcgacatgcagagtccttcaaaattaatgagtggctctatgattattagcaacttttccacagcaatggtacatacaatagtaaatgaaaccttagagtccatgacatccttcaaagccacaaaacctgttgatacaaatgcagattatttaactaaaacaataaagggaaagcctgttctttccctttgcgaccaagcagcaccacaacagaacaaagctagcagtaaggacatgtttgctgagcatttatcaaagtctattattaaacattccctggataaaagcaagtcagtccttccaaatatagataaaaaaccagttagtaaggaacacatgcttgttcttggagaagaatcacagttgaccttgggggaaactcccaaattccttgacttttcagataattcacctcagtattgtgttccagaatgtaaagattctgtgggttttggtttttctttagaggcactgccaccttgttcaatgatgacaagtcagaaatctgacttgaagggagttatgaaggataaagtggtaacaagacacaatctgactaatactgcgtttgagcccttgtcttttggacaggaaagctctttccgtccctcacagactttatcatctgcagtgcttacctgtgtagatagtttgcatgtggaagataagcagaaaatcagagacagaaatgtgatacctgatactcccccatcaacacctttagtaccatcccagactagttctgaatgggacatcaaaaagttaaccaaacaactcaaaggggagttagccaaagaatttgctcccgcaacaccaccttcgacacctcacaactcatccgttggtagtttatctgagaatgaacaaactactatagaaaaggaagagttcatgctgaaactcatgcgctctctttctgaagaagttgagagcagtgaaggtgaggagcacccagaaatggatgtaaagtcagagcattcagggaaaaaaggtcagtttgcagacgcattagctacacacatcatttctcttgcaactgaagtggcagcctcccacttagatcatgaaatcactcaagaattcaaggttcaaaactctcacttaactgtgccaagtcaaagaagcaygskgcctgctctaagtmactyagatgaaagcatacagacgtgcagttttgcaagtgatatggcagctggtgttattgcagaagccgagaaagttgcaaacaytagaagttgtatgcttttcgggcatgagaggaccatttgtcatgttgaaggtgatcgaggtaaagcagaagagaagctggatgtggaggatattgcacatccaagagaagtagaaacgtgtgttctttcattaccaagttgcatgccaggtctgacatacaagtatcccagctgtgaaagtgtgactgatgaatatgctgggcacrttaytcaagtgctgaaacaggaaggtggcaacagtgagctaatcatggatcagtatgccagtagattggcctaccgttctgtcaagtcaggagtacgagaagcagctaagacagtaaaagtgaagtgcagtytgaaactcttccctatgcacacctctcatgtgaaaacaaacaaggaactgttgttctcaagtaaagagcatcaccaagaagtwgwtaaaaaaaramaaaraaaaaamtatggcrgccrtcmwtgcwwatwccmkwcatgtgacaggacacaggatccatgtagaaacgaactttctgaactgtacaggttttcagcctctcttgctagcagcataacaagagatgtaaagaaacagctgacagcacctaaagttgacttgccaaaatcctcaacagactgttgtctttttgaaaaatctgaatgtgttgacaacagagagaatgttactggaccagaattttcaaagtcgtgtcaacctttacaaaaccatggactttgccagaacacaagcagtttaagtgggtatagctgtggagagagtgctcacactgtagaacagtatgctaggaaagtagtgggtgacactttagagctaagcttaggacctgcagttttccttaattcagagaccacaacatcaccagataggattacttatgcagaaaaattgtcaccacttataaatgaagcttgcagatactgtgaccttaaggaatcccatggttgtatcagaaattctgctcagctcttttcaaagcagggtccttgtgctagtgctaagccaagttcacattcaaaacttagtagcatccgccagaaatcaagaatttttcatcttgatgttcctcaaattcatcttaatcttgataagagggcggtgcttgcagagaagatagtcgctgaagctattgaaaaagcagagagagagttgagcaatacgagtttggcagctgatagtggaattggacaagatggcattagctttgctgagagccttaccacagaaatcatgaccacagctatgacaaatgccgggcatgctgttagcagttcaaaagaagtagaagattttcagtccactgagtcacttggcagccaacagatgaatcttagtgttggtgaggacagcacgggtagctggtccaacttaagttttgaggatgaccatcaagatgaaagcagcagtttccatcatctcagtgaaagcagtaatggtaacagcagtagctggagcagtcttggtttagaaggagatttgtatgagaacaatttatcctttccaacatcagacagtgatggaccggatgatagagagagcgaacaggaggatggtgctgagggtttgcagccgagtggaaagactctgctgatcgtgaacattgacgtggagcctggggcggtggaccctcagctcagggtcattcttcagtggctcattcctcggaggcggaagttagagaactttattttcagtactctgcaaagaaggagtttgtcttactttcaaagcagttacaggagagaggatggaaagtgggcgatgtcctgcaggctgtgatgaaatactacgaagtggtggccaaggcctcaagcgaggacacgtgcacgtcgctgtttgattggcttttagaaaatgcctagcacaccgcagggcagtgtactttagtgcttgttttaggaagtaaagaagttgatgatttacatgtaggataaaattcaaatacagaatattaacattttaattgaattgagaggaaagtaagcgtttaagtgctttctgtcattacactgtatatagttcatacttttttgtaatcttgtcaagatatctctttacttattcttctgtatatgtgtatgtgttatgacatgagatatattctgtgaagacctatcctcacccgatgggcattcattgtctgacagcatttgtttggattcacatagtgctgctgctgctgctgctgctgctgctgctgctgctgctgctgctgctgctgctgctgctgctgccaaacagggctgaggcggctggcctggcccacgtgatcacttggttcctttgaaaacaagtggtgtctaatgataagtcatctgacwtggaagaaagaaaactgaggctgatattttkttktttatttatttctgataagtttgtattctttatgkactgttctttaaaatcagttttacttcccagttcagctattggkacttgtagattccccaatctttaagctcgtacatactgcattagtgacttargtttytgtgaacaccgttatgtgttcccctggctttccatcaagtgatgttatttgctaatactgccaattgttwtgaratgagaaggagaagggcgtgtktgcgtgtgcaagaataaacgctaaccttcccactarttcattcgtttactttagagttttcttaaatagaaacccattwttaacactaaataaatgtytaaatattgtscdgtrmvraawwrrrrraaaaaaaaaaaaaa

SEQ ID NO: 2126 - DNA, 2683 bp, Rattus norvegicus
gaattcgggcgggcgacgagcgaggaccgggcggggcggcggcggcgccgaggccgacaagccgcgcgggccgggccgggccgagcgagcgggagcggagcggagcctcgggcggcgggaggaacagcgccgccgccgccaagatggccgacctggaggcggtrctggccgatgtgagctacctgatggccatggagaagagcaaggccacgccsgccgcgcgcgccagcaagaagatcctgctgccagagcccagcatccgcagcgtcatgcagaagwatctagaggatcgaggagaagtgacctttgaaaagatcttctcacagaagttaggatacctgcttttccgggacttctrcctgaaccatctggaagaggccaagcccttggtggagttctatgaagagatcragaaatatgagaagctggagacggaggaggaacgtgtggtccgcagccgggagatctttgactcctacatcatgaaagaactgctggcctgctcacatcccttttcaaagaatgccacggagcatgtccagggccacctggtgaasaagcaggtacctccagatctcttccagccatacattgaggagatttgtcagaacctccgaggggatgtgttccacaarttcattgagagtgacaagttcacacggttctgccagtggaagaatgtagagctcaacatccacctgaccatgaatgacttcagtgtgcatcgaatcatcgggcgtgggggcttcggtgaggtctatgggtgccggaaagcagacacaggcaagatgtacgccatgaagtgtctggacaagaaacgcatcaagatgaagcagggagagaccctggctctgaacgagcggatcatgctttccctcgtcagcactgkggactgccccttcatcgtgtgcatgtcatatgcattccacacaccagacaagctcagtttcakcctggatctcatgaacggtggggacctgcactaccacttgtctcagcatggwgtcttctctgaagccgacatgcgctwctacgcagctgagatcatcctgggccttgaacacatgcacaatcgctttgtagtctacagggacctaaagccagccaacattctcctggatgagcatggccatgtgagaatctcagacctgggcctagcctgtgacttctccaagaagaagcctcatgccagtgtgggcacacacgggtacatggccccggaagtcctacagaagggcgtggcctatgacagcagtgccgactggttctccctgggctgcatgctcttcaagttgttgcggggacacagccccttccggcagcacaagaccaaagacaagcatgagattgaccgcatgacattgacaatggctgttgagctgcctgactccttctcccctgaactccgatccctgctggaaggtttgctgcagagggatgtcaatcggagactaggctgtctgggccgtggggctcaagagrtaaaagaaagccccttcttccgttccctggactggcagatggtcttcttacagaagtaccctcctccactgatccccccacgcggggaggtgaatgcagcggacgcctttgacattggctcctttgatgaggaggacacaaaaggaatcaagttactggacagtgaccaggaactgtaccgcaacttccctctcaccatctctgagcggtggcaacaggaggtggcagagactgtctttgataccatcaatgctgagacagaccggctggaggcacggaagaaagccaaaaacaaacagctgggccacgaggaggactacgccctgggtaaggactgcatcatgcatggcwacatgtccaagatgggcaaccccttcctgacccagtggcagcggcgatacttytacctgttccccaaccggcttgagtggaggggtgaagrcgaggctccgcagagcctcctgaccatggaagagatccagtcggtggaagagacacagatcaaggaacgcaagtgtctcctgcttaagatccgaggtggcaagcagtttgtcctgcagtgtgatagtgaccctgagctggtgcaatggaaaaaagagctrcgmgatgcttaccgtgaggcccagcagctggtgcagcgagtgcccaagatgaagaacaagccacgctcacctgtggtggagctgagcaaggtgccactgattcagcgtggcagtgccaacggcctctgattcacccatctgctgcccgcctgcccacccgccttttataaacctctaatttattttgttgaattttwawwawwwrwwwwmrmaaagcggaaaaggttttattttgtaattattgtgatttcctgtggccccagccaggcccagccccagggaggggcctgcttgcctcagctcctgctgccaccaacccagccactgtctagcacccctgccccgcccccaccgcatgcccctagggtccttgctcccagtatcttcctactgggaagaggagcaaccctcagcagccctcttgcccctccatggggtgaagccacagtcggtgggtgtgtcacttcaggctctgtgggctacactcagcctgaggcccagctgggtggcccagcacccctaccctaggaaggtgcaacacagggatactacttgaactttcctatcatagctcccatgccacagagggacccgaattc

SEQ ID NO: 2127 - DNA, 1076 bp, Rattus norvegicus
ctcgcaggaywckmskgtggaaactgccttcatcgyatctkagaggcctstyctgcagccgccaaccccaagatggcgaccatgctgttgctcctggccacactggcaggtctcttcaccacaaccgaaggacaaagcttccatcttgggaaawgcccatctyctycggtgcaagagaatttcgatgtgaaaaagtatcttggaagawggtacgaaatcgagaagatcccggtgagctttgagaaaggaaactgcattcaagccaactactcgctgatggagaacggaaacatcaaagtgctaaacamggagctgcgtsctgacggaaccctgaaccaagytgagggygaagccaaacagagcaacatgtcagagccagccaagctggaagyccagktcttcycgytgatgccaycggcaccctactggatcctgrccacggattacgagagctatgccctcgtgtattcctgcaccaccttcttctggttcttycacgtggactatgkttggatcctgggaagaaatccttacctccctccagaaacaataacctacctmaaatatatycttacttctaatgacatcgacatcgccaaaataacaacmamagaccaagcaaactgcccggacttyctgtaaargggggtgggcaaccgctccaggttatttcttcgctttggctccctggssccacccccactcctcatmaggaccgagcaaccccgcmrgcactagagggaaagtattgctatagaagccaatggaggggactsatgggaaggtggcccaaacccaagaccccacattgttactcgccagcccaataataaacattttgctgatctgcgcgacacaaaaaacaatcttttcaaacaccacaggaccacagaacaaaaacaaaaactcgagggggggcccggtacccaatttgcccctaagtggagcggtttacaattaactggccgcgttttacaacggcgggatggggaaaccctggcgttccccaactaaaaccttgcagaaaacacccttttgccgctggcggataaacaaaaggccgccccaccgccctt

SEQ ID NO: 2128 - DNA, 2548 bp, Rattus norvegicus
cggcacgagggcggtagcggtggcagcggtaaggtgccgattctgtagagttctttcccctcccccagctcggtggcggctgcccctcccactgagggtggcgcagcgacggtgccayctcgaccatggcggcgactacagctaacccagaaatgacatcagatgtgccatcactgggtcccaccattgcttctggaaatcccggacctgggattcaaggtggaggagctgttgtccagagggctattaagcgacggtcagggctggattttgatgatgaaggagaagtgaacagtaaatttttgagatgtgaygatgagcagatgtgtaacgacaaagagcggtttgccaggtcggatgatgagcagagctctgcsgataaagagagacttgccagggaaaatcatagtgaaatagagcggcsgcgacggaacaagatgacagcttacatcacagaactgtcagacatggtacctacctgtagtgccctggctcgaaaaccagacaagctaaccatcttacgcatggctgtttctcacatgaagtccttgaggggaacgggcaatacatccactgacggctcctacaagccgtccttcctcactgatcaggaactgaaacatttgattttggaggcagcagatggttttctgtttattgtctcttgtgagactggccgagtggtgtatgtctctgactcggtgactcccgttttgaaccagccacagtctgaatggtttgggagcacactgtatgaccaagtgcacccagatgatgtggataaacttcgagagcagctttctacttcagaaaatgccctaacagggcggatcctggatctgaagactggaacagtgaaaaaggaaggtcagcagtcttccatgaggatgtgcatgggctcaagaagatcgttcatctgccggatgaggtgtggcaccagctctgtggaccctgtttccatgaatagactgagctttttgaggaacagatgcaggaatggacttggctctgtgaaggaaggagagcctcactttgtggtagtccactgcacaggttacatcaaggcctggccaccagcaggtgtctccctcccagatgatgatccagaggctggccaggggagcaaattctgcctagtggccattggcaggctgcaggtaaccagttctcctaactgtacagatatgagtaacatctgtcagccaacagagttcatctccagacataacattgaagggatattcacttttgtagatcatcgttgtgtggctactgttggctaccagccacaggagctcttaggaaagaatattgtagaattttgtcatcctgaagaccaacaacttctaagagacagctttcagcaggtggtgaaattaaaaggccaagtgctgtctgtcatgttccgattccgagctaagaaccgagaatggctgtggatgagaacaagctcctttactttccaaaacccgtattcagatgaaatgagtatatttatctgcaccaacaccaacgtgaagaactctagccaggaaccacggcctacattgtctaacacaatccagaggtcacagctaggtccgacaactaatttatccctagagatgggtacaggtgtcctggcatccaggcagcagcagcagcagcagcagcagcagcagcagcagcagcagcagcagacagaattggatatggtaccaggaagagatgggctggccagctatagtcattcccaggtttctgtccagcccgtggcaactgcaggatcagaacacagcaagccccttgagaagtcagaaggtctctttgtgcaggacagagatccgaggttttcagaaatctatcccaacatcagtgcagatcagagtaaaggcctctcctccagcactgtccctgccacccaacagctgttctcccagggcagctcattccctcctaacccccggccggcagaaaatttcaggaatagtggtcttacccctcccgtaaccattgtccagccgtcatcttctgcagggcagatattggcccagatttctcgtcactccaaccttacccagggatcagcaccaacttggacctctagcactcgcccaggtttctctgcccagctgcctactcaggctacagccaagactcgttcttcacaatttggtgtgaacaactttcagacttcgtcctccttcagtgccatgtctcttccgggtgctcccactgcctcacccagtactgctgcctaccctactcttcctaaccgtggatccaactttcctcctgagactggacagacaacaggacagttccagacccggacagcagagggtgtgggtgtctggccacagtggcaaggccagcagccccatcaccggtctagttccaatgagcaacatgttcagccaacatcagcacaaccaagtagccagcctgaggtctttcaagaaatgctgtccatgctgggggaccagagcaacacctacaacaatgaagagtttcctgatctaactatgtttccccctttttctgaatagaactattggggtgaggataa

SEQ ID NO: 2129 - DNA, 5489 bp, Rattus norvegicus
ttaggtcgttaggagaacttactgtgaacaggctcttttatttcttcaaaagatgtctcccatttcaagcaaggagcacccatggctgagggttccctcccggcatctctttctcagtcaccttgagtctggcctaatcaaagactgaggttatgaagtcgatcctagatggccttgcagacaccaccttccgtaccatcaccacagacctcctctacgtgggctcgaatgacattcagtatgaagatatcaaaggagacatggcatccaaattaggatacttcccacagaaattccctctaacttccttcaggggtagtcccttccaagaaaagatgaccgcaggagacaactccccgttggtcccagcaggagacacaacaaacattacagagttctataacaagtctctctcgtcgttcaaggagaatgaggagaacatccagtgtggggagaactttatggacatggagtgctttatgattctgaatcccagccagcagctggccatcgctgtactgtccctcacactgggcaccttcacggttctggagaacctactggtgctgtgtgtcatcctgcactcccgcagtctccgatgcaggccttcctaccacttcatcggcagcctggcagtggccgacctcctgggaagtgtcatttttgtgtacagctttgttgacttccatgtattccaccgtaaagacagccccaatgtgtttctgttcaaactgggtggggttacagcctccttcacagcttctgtgggcagcctgttcctcacagccatcgacaggtacatatccattcacaggcctctggcctataagaggatcgtcaccaggcccaaggccgttgtggccttttgcctgatgtggactatcgcaatagtaatcgctgtgttgcctctcctgggctggaactgcaagaagctgcaatctgtttgctcggacattttcccactcattgacgagacctacctgatgttctggattggggtgaccagtgtgctgctgctgttcattgtgtacgcgtacatgtacattctctggaaggctcacagccaygcggtccgcatgattcagcgtgggacccagaagagcatcatcatccacacgtcagaagacggcaaggtgcaggtgacccggcctgaccaagcccgcatggacattaggctggccaaaaccctggttctgatcctggtggtgttgatcatctgctggggccctctgcttgcgatcatggtgtatgacgtcttcgggaagatgaacaagcttatcaagacggtgtttgccttctgcagtatgctctgcctgctgaactccaccgtgaaccccatcatctatgctctgaggagcaaggacctgagacatgctttccgaagcatgttcccttcgtgcgaaggcaccgcacagcctctagacaacagcatgggggactcagactgcctgcacaagcacgccaacaacacagccagcatgcacagggccgcggagagctgcatcaagagcaccgttaagatcgcgaaggtgaccatgtctgtgtccacagacacgtccgccgaggctctgtgagcctgctgcttttgtggctgcacaraaaaaraaaaaaagtttttctttagcttaaaacttagaagtctgttgtctcatcggttacatatatatttttaagtttaccgtgtttagtaaaatagtgactgtcaccgtgcttactgagtttgctgacatctcaatagcttaggtacttaaactccatttcccaggggtttacagtgtagaaagcctattgcttcagttactcggtggtccttcaaagtctctgaaatagaagggaaaactttggcttccaaatccgaagcctaactatccatagaaaatcaccatgaaatgagtaataacctttgtaaccacaactttcatgatgctgtgtctgtccacagtattaaagaggtacatttttaccataagtatagtgctaaagtagagaaactttgtaacctgttttctgtcccctgttagttgtgtgttgtgtcagtgtttaatatgtcagtttatttatttatttatttttgtctagcttagcaaaaccagaatgtagccctcataagagcgatggcatacaagagtgattgtgtagcagggcgacccctgtttagatagtattactgtccatgatacgattttagaaaccttagtatttcttccaatatccgtatctaaagttaatattgacataagcataaaggtttatttttctgttaaaacaacaagaagaatttgaagactgttcaaagtattgagcagaattcatggacacttaaaactgtgttaggcctgcattttcgtaggaggacatttcaatatcttctggaccacagctgttcagttgggtaatggattgtgatcagaatggaaaagagaaagtaacactgactttcaaagctgacgccctgactttctgcagtcgttagctataactggacctcttaagacagcatgtgtcaaccttagtgtatactgttatcactgtggagttgctgttcacctgccgtgtatcgcatcgttatgttctggatttaaatagatttcaggcccggatggccaaaagacagtttgtcttctccttaattgagaagagacattgtctggcttagtaaaattgtgagtgtgattgtaaatgtgtatgtgtgtgtatgtgtgtgtatgtgtgtgtgtgcatgtgtgtgtattctatcttgcaactgttacagccatgtccccacaggagaaaaaccgaccaagtgtgagacgtaccccttgctgcacccttgcacatggatttagttgctgcaattgagctctttgtgaaatcctgtttataaaaattctgactgaaacttctcaggagtcttcccacctaggagattgggttgagaattctcgtgacgtttaggtgttctgtaaggccagcagcgttcagcaagaagtaatcagtaagaggtgctggaaagtagaggagtctcccagggagaggagagtgtgggggatggtgggcgcctactattaatcaaagtccttgcaaatggaaatcagtaaagggggatggttctacggccttcttmaacmccacccccacccccacagtagcaagtttcaatggtgcacatcagcagtgcaatctcaggttaaggakcaccatgccagttaccagggccaggccatttcatgacagaggatgagtaggacagaggatatatataacaaatgggcagtgaaaacctggtgacggcccagtacctggctctgtttagatgtttgggcaaagcaaaaggcagtgcctctgcmtgctggtaccaagatgtgccaaaacataaggacsrksktrrytagckkcsgttcgacatctctgccatggtgctcaaaatttgggccctttttccgataaagagaagtattgcttttaagaagccactcactcctgataaattctatgtagagtctctcctcatacaggttctcccccgtcctgaggactgcatagcatgaagtggagagctagtatatgcctgtgatttctagtgtttggggttcccagtctgatggggcagtgccccttcttgcaatcaatgtgacctgagggccaagctaggatatatctagattttttttccagctgagtctcttgcttttcttctctgtgcacagaggaggactcaagatgctggaggattagtaactccatagagaagggtattgatagaataccaccaggggctaggaattgccagcctcatcctacatccacctgaatatcaatcatgtctctagctaccaggctgtaccacctcttctcacagctacaaagacctggtaggacattctaggtatagttattaaaaaaaaaatccaagattcacttttagaactgtatttgtgtaaatgccattttagtgataagattttatagtgtattgaactttcaagacctaactcatatttaataagctaagggccaatggggctgatagcactaaacttggtgcttattgatactctaaggaatatctgtgaaatatcatcatgtgtgcgttaagctaccttcatttaaagggacttaaaattaggtggatccactttggcttttcccatatcatttcctaaccatattgaccaaaaccttttccccagtgagtattagtcattagaattacattcattagtatcattcattaaccagccccttaattagattcattaatttaaatgattttaatttaatcacttatacactctggcatcagggttatctacttccctctgacgtttgtccttaacatgcattcttcggccattgctcatctttaaagggggctaattcccaaactacttaactttgtccaaataaagactgagtcctagactatcagtatcatttaaacaaagaaagcagtctctaagagctcctagatttacccctatgtattaaatatatgtaaaaataaatgtgcatctgggcagcttagacataagtctgtgccagatgtctccaaagctgtctgatacttaactttcaggcttagctggtatcaaatgccaaggaatttttgctacctaaacccatctgcaggaaataggcccaactaccagatgagaactaggtctctagttaccattcatttcattmatttctgccattccatatccataaacagcaccactaacatcatgcacaagattagattcctaatattcttgactgtatatttgtatgatattttaaaacctcctaaatggccattcacagttgctttgcactggccttctgataaaatgttaacacacctattgtaatatacaaaaaacattctatctactgatttggactgaatgtatgtacataggctttacaaaaaagtcagacgtcgaagcagtggtttacagatcagtgattttcagatagagtttctttcagttgccgtggaatctttcaaaagcactcttagtgtgaacttamtgaactctaggggtcctggtgatcagagtcgcctagagaggaaacctttccttktattaatatgaagcaagataccagactatcttgattctcacttccagtgtttcaagtggaaaacgtatttccttgttgtctctgtaaatggaacatccttaattttcctcttaaagaatattgtaytgttagatgtttgttgaactggtagcatcattgagactgctgtgawgtctttgtcagtaatctgtataatattttgtatacaagtactggtaagattgttattaagtgtagctccagtcattaaattactatagcaaagtagtacttctgtaatatttacaatgtattaagcctacagtatattttatttcattgatgtaattttattgttatttattcaagagaaagcagttcatcatgtctattgtctaaaattacctggaatcaaataaaagttctagattatcacgaaaaaccaaaaaaaaaaaaaaaaa

SEQ ID NO: 2130 - DNA, 4852 bp, Rattus norvegicus
gagcagaggcgcaggacgtccgtctccgcgcgcgtgacttctgcctgcgctcaagcttcasrgttcagtttcaaggagccgcccaaccatgaagacaccgtggaaggttcttctgggactgcttggtgtcgctgcgcttgtcaccatcatcaccgtgccagtggttctgctgaacaaagatgaagcggccgctgatagcgcgagaacttacacactakctgactatttaaagaatacctttcgggtcaagtcctactccttgcggtgggtttcagattctgaatacctctacaagcaagaaaacaatatcttgctattcaatgctgaacacgggaacagctccattttcttggagaacagtacctttgagatctttggagattctataagtgattattcagtgtcaccsgacagactgttcgttctcttagaatacaattatgtgaagcaatggagacactcctacacggcttcatacagtwtttatgacttgaataaaagacagctgatcacagaagagaagattccaaataatacacagtggatcacatggtcacaagaaggtcacamattggcatatgtctggaagaatgatatttatgttaaaattgaaccacatttgcctagtcawaggaycacatcaacakgaaaagaaaatgtwatatttaacggwataaatgactgggtttatgaagaggaaatcttcggtgcctactccgcactgtggtggtctccaaacggcacttttctagcttatgcccagtttaacgacaccggagtgcctctcattgaatactccttctactctgatgagtcactgcagtaccccaagacagtstggattccgtacccaaaggcaggagctgtgaatccaactgtaaagttctttattgtaaatacagactctctcagctcaactactactacgattcccatgcaaatcaccgctcstgcatctgtgacaacaggggatcactacttgtgtgacgtggcctgggtttcagaagacagaatctcgttgcagtggctcaggaggattcagaactattccgtgatggcgatctgcgactatgataagaccamcctagtatggaactgtccaacgacgcaggagcatattgaaacgagtgccacaggctggkkcggaagatttaggcctgcagaaccccacttcacctccgacggaagcagcttctataaaatcgtcagtgacaaagatggctacaaacacatctgccagttccagaaagataggaaacccgaacaggwctgtacatttattacaaaaggagcctgggaagtcattagtatcgaagctctgaccagcgattatctgtactacattagtaatgaatataaagaaatgccaggaggaagaaatctttataaaattcagcttactgaccacacaaataagaagtgccttagttgtgacctgaatccagaaagatgccagtattactcggtgtcacttagtaaagaggcaaagtactatcagctgggatgccggggccctggtctgcccctctacactctgcatcgcagcactgatcaaaaagagctgagagtcctggaggacaattctgctttggataaaatgctgcaagatgtccaaatgccttcaaaaaaattggacttcattgttctgaatgaaacaagattttggtatcaaatgatcttacctcctcattttgataaatccaagaaataccctctactaatagatgtatatgcaggtccctgtagtcaaaaagcagatgctgccttcagaytcaactgggccacttaccttgcaagcacagaaaacatcatrgtagctagctttgatggcagakgaagtggttaccaaggagataagatcatgcatgcaatcaacaaaagacttggaacactggaagttgaagatcaaattgaagcagccaggcaatttttaaaaatgggatttgtggacagcaagcragttgcaatttggggctggtcatatggagggtacgtaacctcaatggtcctgggatcgggaagtggcgtgttcaartgtggaatakccgtggcgcccgtgtcacggtgggagtactatgactcagtatacacagagcgttacatgggtctcccaactccagaggacaaccttgaccattacaggaactcaacagtcatgagcagagctgaaaattttaagcaagttgagtacctccttattcacggtacagcagatgataatgttcactttcagcagtcagctcagatctccaaagccctggtggatgctggcgtggatttccaagcaatgtggtacacggacgaagaccatgggatcgccagcagcacagctcaccagcacatctattcccacatgagccatttcctccagcagtgcttctccttacgctagcatggcaaggctctccgcagyttactcaagagcacacttgtcctcattatctcaaaactgcactgttaagatgacgattttaataatgtcgcctcgagaaattccagcctacttcccagttttatacctgcaatcctaactaaggatgcctgtcttcagaacagattattaccttacagcaatttggatttccccctctgttttgtttatcatttaaaaccatttccacatcagctgctgaaacaacaaatataaattatttttgcaararmwawrmawarawwtcctgagcagaatttcaatttttttcccccttactaggctggtccaaatcttgttcccttatttaagggggtggcaagacgtgggtaatgatgtcattaggccagcaacaagagaascgggaacagagaatatggctagaaacccaggtccaagcatacaaacccaaccaggctactgtcagctcgcctcrarargagctgctcactgccagactggcacsrkkttytgagaaagactattcaaacagtctcaggaaatcatatatgcaaagcactgacttctaagtaaaaccacagcagttgaatagactccaaagaaatgcaagggacgctgccagcaatgtaagggccccaggtgccagttatggctataggtgctacataaacacagcaagsstgatgggaaagcatkktaaatgtgcttttaaaaattaccaagtctcctagtgrgaagaggcagcttggaacatagcgacttgccccgttaaaagttgaaaatatttgtgtcacaaattctaacatgaaggaatacttgcgtcagttcttcctacttcctttctttgagcattttcattaaagcattttaacttcrttatctttctaatggaaaamwrwawraraawrwwwwrwrwtwkkmkkyctattctacacactggaatgttgcctggtcatttagcaagtatgcttccattttttcaaaggtaatgggttatatcttgaatcaaacttaaactgcattgacatatggacmcatttgttcaaaggttcttgtttaacttgtgtgaaatccaagactgtcttgtaaacatggaaagagttcaacttttaaaaaaaaatttagatacataaaactgtttaaagttatatgattcataagagtttatctaatacccccagaaatttctactcacatttatcacatagcttggtcatttacatactatggaactcataatattatttaacttaggggagcacgtgaggttcgtggcacgagatggaatgctatcagcagagtagacatgtttttccagggtcttgttttttgtttttgtttctggtctcttcctgtttgggcggagggtaatataatagataatatacataatagaatacactctgatacctgacttagccgtgttttgacaacttggaaacttgattcaattatttataacacagctgaaaatttaaaatggactccacacatttaaatgcagtttcaggccaattttctaggtacaattaccacagacaggtgagctacagcataaattccaaacatggcagaaatggaaattacctataaatataaatgagtttagatattgatgagcctgatgctatttcccgggcactccactgttcccctcaccttaaggaactctcaagtcctgctcttccactgcaagcacagctggtccttaaatctacaggcctctggctacagtccgaatttgaacacagttctgtcaccgtgtgcagcagcagcagccatgtgcaaagttctagatcaaggaacaaaggtagcacatgttcctgacagtgtggaaacataaacataaatgcgaattaaatagaaattatcccttctgaattctttttgttcctttcatttctaaataggttgttcctggagcctgaattaataaaaagaacacagcacacatttttcaggcgatgagggtttcacatggtgataatgtgaatacattcagtttttatttgattctcataggtcaagttttactgttcggtaagagttgtaaattagattaaaaccctgatgcataagttgtaaacaaaytyrrywyragrgcaagtttgaaaagcacaagagctaataacaccactgaggcatatagacaagtctcttatgggcatatgcagctccctgaagcgcatggatcaagctaccgcctcagagcacaccagcaccaggggcgcatgctaaaggaagagctcccctccccaccccccatgcttcacgatccatgttgacttcagtctgtsccattctgggcatcatagttctccttcagattattagcagttccacctcttggcacgtactacttttgctctaagttggagtgagagtactggtttataagattactggatttgtacaatatttaagattcaataaattctaagtgaaaaaacaaaaaaaaaa

SEQ ID NO: 2131 - DNA, 2840 bp, Rattus norvegicus
agagtctcaagttttcagagtggctttgctcttactgtgctttcattcgcagctgttatagttttgccgctggactcttccctcccttcccccaccccatcaggatgatatsagasktgaaagaagacgatgcatacaggaggagagacttcagcatgcaaaccttcatctgtccggctcgcaccgtcattctcattccatgctgctggccttcagatggctgcacagatgccccattcacatcagtacagtgaccgtcgccagccaaacataagtgaccagcaggtttctgccttatcatattctgaccagattcagcaacctctaactaaccaggtgatgcctgacattgtcatgttacagaggcggatgccccaaaccttccgtgatccagcaactgctcctctgagaaaactctctgtggacttgatcaaaacatacaagcatattaatgaggtttactatgcaaaaaagaagcgaagacaccaacagggccagggggacgattctagtcataagaaggagcggaaggtttacaacgatggttacgatgacgataactatgattacattgtaaaaaamrraraaaarwggatggaccgttatgaaatcgactccttaataggcaaaggttcatttggamargttgtgaaagcatatgacagagtggmacaagaatgggtcgccattaaamtcatcaagaacaagaaggcgtttctgaatcaagcgcagataraagtgcggctgcttgagctcatgaacaaacatgacactgagatgaagtactacatagtgcatttgaaacgccactttatgtttcggaaccatctctgtctagtgtttgaaatgctgtcctataatctctatgatttgttgaggaacaccaacttccgaggggtctctttgaacctgacacgaaagtttgcacaacagatgtgcacagcattgcttttccttgcgactccagaacttagtatcattcactgtgacttaaagccggagaacatccttctgtgtaaccccaaacgaagtgcaatcaagattgttgactttggcagctcttgtcagttggggcagaggatataccagtatattcagagtcgcttctatcggtctccagaggtgctactgggaatgccttatgaccttgctatcgacatgtggtcccttggatgtatcttggttgaaatgcacactggagagcctctgttcagtggtgccaatgaggtggatcagatgaataaaatagtggaagtcttgggcatcccacctgctcatattcttgaccaagcaccgaaagcaagaaagttctttgagaagttgcctgatggcacttggagcttaaagaagaccaaagatggaaaacgggagtacaaaccaccaggaacccgtaaacttcataatattcttggagtggaaacaggaggacctggcgggcggcgtgctggggagtcaggtcacactgtagctgactacttgaagttcaaagacctcattttaaggatgcttgattatgaccccaaaactcggattcaaccttattatgccctgcagcacagttttttcaagaaaacagctgatgaaggtacaaacacaagcaacagtgtgtccaccagccctgccatggagcagtcccagtcttcaggcaccacctccagcacctcctccagctcaggtggatcctcgggaacgagcaacagtgggagagccaggtcggatccgacgcaccagcatcggcacagtggcgggcacttcgctgctgctgtccaggccatggactgtgagacacatagtccccaggtgcgccagcagtttccggctcctctgggctggtcaggcactgaagctcctacacaagtcactgttgaaactcatcctgttcaagaaacaacctttcatgtagcccctcagcagaatgcattgcatcatcaccatggaaacagttcccatcatcaccaccaccaccatcaccaccaccaccaccatggacagcaagccttgggtaaccggaccaggccaagggtctacaattctccaacaaatagctcctctacccaggattctatggaggttggccacagkcaccactccatgacatccctgtcttcctcaacaacttcttcctcgacatcttcctcctctactggtratcaaggcaatcaggcctatcagaaccgcccagtggctgctaacaccttggactttggacagaatggagctatggacgttaatttgaccgtctactccaatccccgccaagagactggcatagctggacatccaacataccaattttctgctaatacaggtcctgcacattacatgactgaaggacatctgacgatgaggcaaggggctgatagagaagagtctcccatgacaggagtttgtgtgcaacagagtcctgtagctagctcgtgaywacattgaaacttgagtyygtttcttgtgtgtttttatagaagtggtgtttttttcccaaaaacaaaagtgcaaagctgcttgaatcagaaggagattaacacastgaaccgsyacgagarskywwwkytkwyttttttttttwwyttgaaaagattgcaaagggmcaatgaagtttttaarasccatgtccacccwtcttcatggagcgctcagagtgtcctctttytgcctcccccatttaasttccatctcccggtcacagtgggtttwgtctttmtatccaacaaaagttaatgttcagctgttggtcytggtcatttgccaactaattttaaaataaaarggcactgcacwtaawwwrmawaaarrrmmmmawarrrtgttttggttttttcatttttattttttcccctttt

SEQ ID NO: 2132 - DNA, 2066 bp, Rattus norvegicus
gaacataaagtcagattgctaaacttctgtgtcgactgaaaaacatggtgaagcgagttgcaattgtgggagctggggtcagtggcctggcctccatcaagtgctgcctggaagaaggactagaacccacctgcttcgagagaagctgtgacttgggaggactttggagattcacggaacatgttgaagaaggaagagccagcctttacaactcagtggtttctaacagcagcaaggagatgtcttgttactccgatttcccttttccagaagactacccaaactttgtgccaaattctctgttcctggaatatctccagctgtatgcaacccagttcaaccttctgagatgcatctatttcaacaccaaagtgtgcagtataacaaaacgcccagatttcgctgtctctggacaatgggaagtggtcactgtctgtcaagggaagcaaagctcagacacctttgctgctgtcatggtctgcactgggtttctaactaacccacatctgcccctggattcctttccaggcatacaaacttttaaggggcagtacttccacagccggcagtataaacatccagacgtatttaaggacaagcgagtccttgtggttggaatgggaaattctggtacagacattgccgtggaggccagtcacttagcgaaaaaggtgtttctcagcaccaccggaggggcatgggtgatcagccgagtctttgattcagggtacccctgggacatgatattcatgacgcgatttcagaacatgctcagaaatcttctcccaactccagttgtgagttggttgatatcaaagaagatgaacagctggttcaaccacgtgaattacggtgtggctccagaagacaggactcagctgagagagcctgtgctgaatgatgagctcccaggccgcatcatcactgggaaagtgttgatcaagcccagcatcaaggaggtgaaagaaaactctgtcgtctttaacaatacaccgaaggaggagcctattgacgtcatcgtctttgccactggatactcctttgcgttccccttcctcgatgaatcaatagtgaaagttgaggatggccaggcatcactgtacaagtacatcttcccggcacatctgccaaaaccaactctggccgtgattggcctcatcaaacccctgggttccatgatacccacaggagagacacaagctcgatgggttgttcaggtcctgaaaggtgcgactacattaccacccccgagtgtcatgatgaaagaagtcaatgaacggaagaagaacaagcatagcggatttggcttgtgctactgcaaggctttgcaatccgattacataacgtacatagatgacctcctgacctcgatcaacgcaaaaccggacctgcgggccatgctcctgactgacccacgcctggctctgagcatcttcttcggcccatgcacaccttaccatttccgcctgactggtccaggaaagtgggaaggagccagaaaggccatcttgacccagtgggaccgaacagtgaacgtcaccaaaactcgarccgtacaaraaaccccatctacctttsamrmkktgcttaaactctttagttttctggctttgcttgtggctgttttctttattttcctgtaagtgaaagrtctaactggcttyccaaatgtgtggagtataaccttccaacttctctaatgtamcaatttcrcsttcgtaaytgtrarccacgtccagagacacccaacccctacctctccccaactcacctcattggcaccttcattgctgggtctcttgctagtccatmaggtttagtgcaagaaaataatgtccagcaattctgttcacttaaaatgttggaaggatccaggccccctttcaggaagaatctgcccccagagaggactctgagcattctytcaatmtaaaaaactgctttccctagatcttaatgaaaagcccaacttcgcggaatattggtctgcactaaaatagttctctgtgtattagttgmctacaaataamatggaagaaactamrwrwaaaaaaaaaaaaaaaaaa

SEQ ID NO: 2133 - DNA, 1415 bp, Rattus norvegicus
gggggaacgcgtcagacttggccaactgaggctgggctggacccctattgtggaatcgcggacacttcctacagttgtcgaacgcaatccgtctacaccaccttgtgtcactacctaccaccatgggtttggagctctacctggacctgctgtcgcagcccagccgcgcggtctacatcttcgccaagaagaatggcattccctttcagttgcgtaccgtggatttactcaaagggcagcacttgagcgagcamkwskcccaggtgaactgcttaaagaaagtgcctgtcctcaaagacggaagcttcgtgttgaccgaaagcactgccatcttgatttacctgagttccaagtaccaggtggcagaccactggtacccggccgacctacaggcccgtgcccaagtccacgaatacctgggttggcatgccgacaacatccgtggcacctttggagtactcctgtggaccaaggtgttggggccactcattggggtccaggttcccgaggaaaaggtggaacggaacagaaatagtatggtcttggctctgcaacgtctggaggacaagttcctmagggacagggccttcattgctggccagcaggtgacgctagcggatctcatgtctctagaggagttgatacagccggtggctcttggstgtaatctgtttgaggggcggcctcaactgacagcgtggcgagagagggtggaggcgttcttgggtgctgagctatgtcaggaggcgcacaaccccatcatgagcgtcctgggacaggcagccaagaaaacattaccagtaccccctccggaggcccatgccagcatgatgcttcgaattgccaggattccctgagtggttttttttccctgagtatttttattgctataaagactcattttgtattttrmmwmwwwrwwwwrwwwtgtttttgtttcttctygkccsarmmwbdhwwwkkwkyywkhwwwwwmwrrmwmmwtttctggctctgggaggagctttgctcaaaagggacaccacytatccttagcatgcttctcttgaggtacagtatgcacaaccamtaggagacccamgtcartaatatataaaaggtgcktaaaaarmammaagcamacagtamcacacacgaagaaatcaaccaaaarttggtgracatctgttttttattataatatagattctgaatattttamggaataaagagttattgttttattacattgccctctaatctgtatggaataaattatgactttgtwaaacaaaaaaaaaaaaaaaaaaaaaaacctytgcsgccgcaagcttattccctttagtgagggttaattttagcttggcactggccgtcgttttacaacgtcgtgactgggaaaaccctggcgttacccaacttattcgccttgcagc

SEQ ID NO: 2134 - DNA, 1146 bp, Rattus norvegicus
  misc_feature (648)..(648): n is a, c, g, or t
  misc_feature (657)..(657): n is a, c, g, or t
cggcacgagctaacaccctgttctcagactcctccgcgcctctccgcctgtcctcaggatcatgaaggtcgccagtagcagtgccgcggccaccgcaggccccagctgttcgctgaaggcaggcaggacggcgggcgaagtggtgcttggtctgtcggagcaaagcgttgccatctcgcgctgcgctgggacgcgcctgcccgccttgctggacgaacagcaggtgaacgttctgctctacgacatgaacggctgctactcacgcctcaaggagctggtgcctaccctgcctcagaaccgcaaagtgagcaaggtggagatactgcagcatgttatcgactacatcagggacctgcagctggagctgaactctgagtctgaagtcgcgaccgccggaggccgggggctgcccgtccgggccccgctcagcaccctgaacggcgagatcagtgccttggcggccgaggtgaggtccgagtcagagtattacattattctcctgtgggaaactaaggccacgggaggggggtgtcccccttacttctcaggagcatagttatttaggggcgaccaataggaaaaagctcgcgctttcatcgtgcctcctggagtagagamskgggrmtgccyskscssbcsvgyhchbynmmsbvvvbnkmrdgmswbrkykygcybwggygkycrcagkcggcatgtgttccagccgacgaccgcatcttgtgtcgctgaggcggcgcactgaggaaccaratggactccagcccttcaggaggcaagagraaaaaaagtgctctcggttccccagagcaacccggggaaagacactaccgcggccacgggactcttgacgratctgtccagggggtagagggttratcaacggagtytsgccctmtccacctttcagcmtccagagactttgaggagggggttattcaaccccgtgtgtttytgtttttttgaraaagcagacattttttttaaatggtcacatttcgtgcttytcagatttctgagaaaatgttttgtattgtrtatyacaatgatcactggytgagaatattgttttacaatagttyttatgggggtgggytttttgttgttattaaacaaacacwwtrgdhrahwawaaaaaaaaaaaaaaaa

SEQ ID NO: 2135 - DNA, 2296 bp, Rattus norvegicus
actgggctctcgagcaagcgagaggtcagtgcggagccggaggcgcttgtccagttccaacgccagctcgcaggcatggccccagcagcagcttcgggtggcagcaccctgcccagtggcttctccgtcttcgtcaccttccctgacttgctcttcatctttgagtttatctttggaggcctggtgtggatcctgatcgcctcctccctggtacccatgcccctggtsyaggrctssgtgatgytystsyctgtgttctgcttcctggccaccacttccctgatggtcatgtacataattggtactcatggtggggagacttcctggatcacactgkatgcagcctaccactgtgtggctgccctgtkttacctcagtgcctcagtcctggaagccctggccaccatcacaatgttcgatggctttacctacaggcattaccatgagaacatcgctgcagtggtgttcgcctatgtggctactctgctctacgtgatccatgctgtgttttccttaatcagatggaagtcttcataggacagcagattgggagctgaaacccagagcaattaactggtcagcctgtcttccccattaacttcctggaacagactgaatggtggagaaaagaaaacaagccaaaagaaaacaaaacagacacaaaaacaaaaggaaammawrwwmrarwmwcttgggygkyacgwkkaccttytgwtagggtttagggcttgctgaatttaacttccagccaaaggargaaagagttgtcttggcgggccctttctgcccttgaccargacagtgggtgggagcttggaaccttgatctgaagaaatkacaatttcyccttgacccttggagcargtcmtaacaattgcctttcggaattttccacamgctctttgcascactcatcccctggsatatcttagattttgtggatagtctaggtgtcacaggcactgaaattcacccaacagaggtctcyagatagatgttcatggtggaagatgaacccctttgaaatacttcattaaatacctttatgtytcadrmwdmdddhdrrvaahkgggmygwwkytyattcycwkkartcagggactgacacctttctactcaactttcttcctgccagagtcctttgatgtaacctgaacctcaagggacaattcasatgtgtgtgctgggccagtctttcccacaatgactcactgaggatgccaccctcacaacagtgtccaccaggacagtgtctcccttgtaggtgcatcccagggagctcaaggaacaacagtttgctaaattagaatcttttcaagctcagaaaactaggtgtgggcattccttctcttcttagggctgatctaaaatgctctagtctgtgtttgggcatgttctcagatcatttctttcggggagaagagggacctgactccagagcaaagggagagacaatggctatttctggctgccacattccaggtgagggacatctgacctgaaagaagaaagtataattwggaargacatggagagcctgcaaagtcagacatctgctaggagatctcacctggaccccacagtttaaaggattgacaaactagagttggaaccccagatgcagggacgtcctgccagccaccaggactgccaggattctagcctcggtcagcttccactagctgatgttttattctccaacaaagtgggagattgagacctacaaccaaattagatttggggagttttctaccttggttctgaggatggaacmcagggggtacacatgctgggtaagcactcttytcctggatcccatcttcagccccaaattgagtcccagtggcacatccaggaggcctttggttatcccagccatacwsgwrsccaaatctgccatttgccccacttaacacagtcmmaatttcatactaaaacgcaascamaagattagggggatttwtttttwwaaattaaawtataaactaagagwttatatgwagttcattataatggttaacaaagtctgtwactgaacgctgactggggtccgtcttatattttcaacmaaactgaaccataacattacactaaccagcagytcaacatgagcgagggttggkttttwykgtdtwtgyytttttttytgwtaagaagaaaagrgagwtgaaggaaggaagaaaggamcaaaggaagggtgaytaagatgaatttyccaagggtttctcaatgtttcagatttttaatcattaaaagaaactytcmtmcwraaraawrrrwaaaaaaaaaaaaaaaa

SEQ ID NO: 2136 - DNA, 1584 bp, Rattus norvegicus
ggtggctcagttccaggagccacaaacttgccaggatcagagacaatcaactaaacccaggtcgtactcaccgcactttcgagacgcgcgagtgcaggaaaactcccgcgaatcccctgggaaaggacaccatgccccccaggtctctccccaacctctccttgcccaccgaggcgagcgagagcgagttggaacccgaggtgtgggaaaatgatttcctgcctgactcagacgggaccaccgcggagttggtaatccgctgtgtgataccatccctctacctaatcatcatctcgktgggcttgctgggcaacatcatgctggtgaagatattcctcaccaacagcaccatgcggagtgtccccaacatcttcatctctaacctggctgcgggagacctgctgctgctgctgacctgcgtcccagtggatgcctcccgatacttctttgatgaatgggtgttcggcaagctgggctgcaaactcatcccagccatccagctcacctcggtgggggtttccgtgttcactctcacggccctcagcgctgacaggtamararmwawmrwraamcccatggacatgcagacgtctggtgtggtgctgtggaccagtttgaaggccgtgggcatctgggtggtctctgtgctgttggctgtccctgaggctgtgttttcggaagtagcacgcatcggtagctcggataacagcagtttcacagcatgcataccctacccacaaacagatgagttacatccaaagatccactcagtgctcatttttcttgtctatttcctcataccccttgttatcatcagcatttattattatcacattgcgaagactttaattagaagtgcacacaatcttcctggagaatacaatgaacataccaaaaagcagatggagacacggaaacgcctggccaagatcgttctggtgtttgtgggctgctttgtcttctgctggtttcccaaccacatcctctacttgtataggtctttcaactacaaggagatcgatccttctcttggacacatgattgtcaccttagtggcccgggttctgagtttcagcaactcctgtgtcaacccgtttgctctttacctgctcagtgaaagcttcaggaagcatttcaacagccagctctgttgtgggcagaagtcctatcctgagaggtctaccagctacctcctcagctcttcagcagtaagaatgacttctctgaaaagcaacgcgaagaatgtggtgaccaattctgtcctgctcaacggacatagcacaaagcaagaaatagcactgtgatcggagaccatccaattcatcctcgggaaataccattttcacaacttttccattattattgagcgaagcagagctaaataatcaccacatttacactgctccccagctaattcatgattgactcaagcgcaaggcacgcacttttgtctgaatagaaagaattttaccttacaccaccacacatctaactcacacgtaattcacatatatctcctgctaacatcggtttacacattcccttgggatttaagacattccaacaagcaaatgtggcatattg

SEQ ID NO: 2137 - DNA, 1553 bp, Rattus norvegicus
cgaaattgcagtttctccttggcccacccctgtgtcagcagctccaggatgtggcagttcagaatcttcctgctgttcgcgtccacctgggggatttctggcgtatcagcccatcccgacccagtgttctccagcagcgagggtgcccaccaggtgcttcgggtcagacgagccaacagcttcctggaggaggtgcgggcaggcagcctggagcgggagtgtatggaggagatctgtgacttcgaggaggcccaggagattttccagaatgtggaagacacactggccttttggatcaagtacttcgatggtgaccagtgctcaactccgcccttggaccaccaatgcgacagcccatgctgcggccatggcacatgcatcgacggcctgggcggcttcagctgcagctgcgataagggctgggagggcaggttctgtcagcaggagatgggcttccaggactgtcgggtgaaaaatggcggctgctaccactactgcctggaggagaccagagggcggcgctgccgttgcgccccgggctatgagctggcagatgaccacatgcactgcaggcccaccgtgaattttccgtgtgggaaactgtggaagcggactgacaagaaacgcaagaacttcaaacgggacatagacccagaagacgaagaactagaactaggtccaaggatagtcaatggaacactaacaaagcagggtgacagtccctggcaggcgatccttctggactccaagaagaagctagcctgtggaggggtgctcatccacacctcctgggtgctgacggcagcccactgtctggagagcagcaagaagcttaccgtgaggcttggtgagtatgatctgagacgcagggacccctgggagttggacctggacatcaaggaggtcctcgtccaccctaactacacccggagcaacagcgacaacgacatcgccctgctccgcctgtcccagccagccacactctctaaaaccatagtgcccatctgtctgccgaacagcggcctggcgcaggagctcagtcaggctggccaggagacggtggtgacaggctggggctatcaaagcgacaaagtcaaggatggcagaaggaaccgcacctttattctcaccttcatccgcatccctttggccgctcgaaatgactgcatgcaggtcatgaacaacgtggtctcggagaacatgctctgcgccggcatcattggagacacgagagacgcctgcgacggcgacagtgggggacctatggtggtcttctttcggggtacctggtttctggtgggcctggtgagctggggtgagggctgtgggcacctcaacaactatggcgtctacaccaaagtgggtagctacctcaaatggatccacagctacataggggaaagggatgtttccctgaagagcccgaagctgtagcatccctccmtgctcatctctggggcccagaggtcactcttagaataaggctgggctagtgagtaccaagacaggggacattaaaggggcaagcaacacctgaaaaaaaaaaaaaaaaa

SEQ ID NO: 2138 - DNA, 2130 bp, Rattus norvegicus
gaattccgagtagggaccaagagagctggaactgatagaactaattttattttccagggtgacagcttgatttccaagttcacttcagaggcagctgcagtaaagcgcgtaaaatgacaattaaaagaagttacattagtccggctgggcatgagttagtagcagacatggacaccaaacatttcctgccgctcgacttctctacccaggtgaactcttcatccctgagctctccaacgggtcgaggctccatggctgccccctcgctgcacccttccctgggtccaggactcggctctcctctgggctcccctgggcagctgcactcgcctatcagcaccctgagttctcccatcaatggcatgggcccacccttctcggtcatcagctccccgatgggcccgcactccatgtcggtacccaccacacccacactgggcttcgagactggcagcsmssagctcaactcacccatgaaccccgtgagcagcagtgaggatatcaaaccccctctaggcctcaatggcgtcctcaaggttcctgcccacccctcaggaaatatgtcatccttcaccaagcacatctgcgctatctgtggggaccgctcctcaggcaaacactatggggtctacagctgtgagggctgcaagggcttcttcaagaggacagtacgcaaagacctgacctacacctgccgtgacaacaaggactgcctgatcgacaagagacagcggaaccggtgtcagtactgccgataccagaagtgcctggccatgggcatgaagcgggaagccgtgcakgaggagcggcagcgaggcawggaccggaacgagaatgaggtggagtccaccagcagtgccaacgaggacatgcctgtagagaagattctggaagctgagctcgctgttgagcccaakactgagacatacgtggaggcaaacatggggcygaaccscagctsmcsmamtgmysctsykaccrmcrkctgkcawgcagyagacaagcagctcttcactcttgtggagtgggccaagaggatcccacacttttctgagctgcccctggacgaccaggtcatcctgctccgggcaggctggaacgagctgctgattgcctccttctcccaccgctccatagctgtgaaagacggcatcctcctggccaccggcctgcacgtacacaggaacagcgctcacagtgctggggtgggcgccatctttgacagggtgctaacggagctggtgtcgaagatgcgtgacatgcagatggacaagacggagctgggctgcttgcgcgccattgtcctcttcaaccctgactctaaggggctctcaaaccctgctgaggtggaggcgctgagggagaaggtgtatgcatcactagaagcgtactgcaaacacaagtaccctgagcagccgggcaggtttgccaagctgctgctccggctgcctgcactgcgatccattgggctcaagtgcctggagcacctgttcttcttcaagctcatcggggatacrcccatcgacactttyctcatggagatgctggaggccccacatcaaaccacctaggcccgtcacccatgtgccggtcccttgccccgcctggacacagctgctcagctccagccctgtccctgccctttctggatggcctgtgtggatctttggggtgcagcgtccccatggtcccaaaagatgcatcaccatcctcgccatcatcattaatgcttgcctttgcccagggccgtggcagagctggcgtgacacctacccagccccctgccctacaccaggctctaaggctggtcaccctgagggtcttggggtacttcgtggggtcttcagcacctggagctgcaggagctgggagaggggcttgttctggktgstggtkgctgtcgctggttctcgacatgcccgcgtggcacctctgtttggagtaccccatctttgcccgtgcagagtcctggtacccagctaagggtgggaaagggagcaggtggggcaggtcatatcctcctggatcatagctaacctttaagcctgtttccaaagataccctgggctatcaccccgagcaggattctgggaccacctcaaggccgcgtgggctggaggtccggaattc

SEQ ID NO: 2139 - DNA, 2572 bp, Rattus norvegicus
atggctgctggccgccccgtgcgtgggcccgagctggcgccccggaggctgctgcagttgctgctgctggtactgcttgggggccggggccggggggcggccttgagcgggaacgtgaccgggcctgggcctcgcagtgccggcgggagcgcgaggaggaacgcgccggtgaccagccctccgccgccgctgctgagccactgcggccgggccgcccactgcgagcctttgcgctacaacgtgtgcctgggctccgcgctgccctacggagccaccaccacgctgctggctggggactcggactcgcaggaggaagcgcacagcaagctcgtgctctggtccggcctccggaatgctccccgatgctgggcagtgatccagcccctgctgtgtgctgtctacatgcccaagtgtgaaaatgaccgagtggagttgcccagccgtaccctctgccaggccacccgaggcccctgtgccattgtggagcgggaacgagggtggcctgactttctgcgttgcacgccggaccacttccctgaaggctgtccaaacgaggtacaaaacatcaagttcaacagttcaggccaatgtgaagcacccttggtgaggacagacaaccccaagagctggtacgaggacgtggagggctgtgggatccagtgccagaacccgctgttcaccgaggctgagcaccaggacatgcacagttacatcgcagccttcggggcggtcaccggcctctgtacactcttcaccctggccacctttgtggctgactggcggaactccaatcgctaccctgcggttattctcttctatgtcaatgcgtgtttctttgtgggcagcattggctggctggcccagttcatggatggtgcccgccgggagattgtttgccgagcagatggcaccatgagatttggggagcccacctccagcgagaccctatcctgtgtcatcatctttgtcatcgtgtactatgccttgatggctggagtagtgtggttcgtggtcctcacctatgcctggcacacctccttcaaagccctgggcaccacttaccagcctctctcgggcaagacatcctatttccacctgctcacgtggtcactccccttcgtcctcactgtggcaatccttgctgtggctcaggtagatggggactccgtgagtggcatctgctttgtaggctacaagaactatcggtaccgtgctggctttgtacttgccccaattggcctggtgcttattgtgggaggctacttcctcatccgaggggtcatgactctgttctccatcaagagcaaccaccctgggcttctgagtgagaaggcagccagcaagatcaatgagaccatgctgcgcctgggcatttttggcttcctcgcctttggcttcgtgctcatcaccttcagctgccacttctatgacttcttcaaccaggctgagtgggagcgtagcttccgggactatgtgctatgccaagccaatgtgaccattgggctgcctaccaagaagcccattcctgattgtgagatcaagaatcggcccagcctcctggtggagaagatcaatctgtttgccatgtttggcactggcattgccatgagcacctgggtctggaccaaggccaccctgctcatctggaggcgcacctggtgcaggttgactgggcacagtgatgatgaacccaagagaatcaagaaaagcaagatgattgccaaggccttctctaagcggcgtgaactgctgcagaacccgggccaggagctctccttcagcatgcacactgtctcccatgatggacctgttgccggtttggcttttgaactcaatgaaccctcagctgatgtctcctctgcctgggcccagcacgtcaccaagatggtggctcgaagaggagccatattaccccaggatgtgtctgtcacccctgtggcaactccagtgccaccagaagaacaagccaacctgtggctggttgaggcagagatctccccagagttagagaagcgtttaggccggaagaagaagcggaggaagaggaagaaggaggtgtgccccttggggccagcccctgaacttcaccactctgcccctgttcctgccaccagtgcagttcctcggctgcctcagctgcctcggcagaagtgcctagtagctgcaaatgcctggggaacaggagagccctgccgacagggagcctggactgtagtctccaaccccttctgcccagagcctagtccccatcaagatccatttctccctggtgcctcagcccccagggtctgggctcagggccgcctccaggggctgggatccattcattcccgcactaacctaatggaggctgagctcttggatgcagactcggacttctgagcttgcagggcaggtcctaggatggggaagacaagtgcacgccttcctatagctcttcctgagagcacacctctggggtctcatctgacagtctatgggccatgtatctgcctacaagagctgtgtacgactggctagaagcagccagaccatagaaacaagctgaacacagccactgatagacctcact

SEQ ID NO: 2140 - DNA, 1223 bp, Rattus norvegicus
ccggcgttgtgctgaggctgccaccactgaccctgggacaccgaggctgcgatgagcccctgsgggcgggccctacatacatccagaggggccatggccatgctggcgcggaaattcccgcgtacccggctacccgtgggagccagtgccctctgtgtggtggtcctctgttggctctatgtcttccctgtctaccggctgcccaacgaraaggagatcgtgcaaggagtgctggcgcagcgcacagcttggaggaggaaccagacgtcagccaggctcttcaggaracaaatggaagactgctgcaaccccgcccatctctttgcaatgacgaaggtgaactcccccatggggaagagcctgtggtatgacggggagtttytatactcgctcaccatcgacamytccacgtactccctyttcccccaggcaacccccttccagctgccattgaagaaatgtgcggtggtgggaaacggtgggattctgaagatgagtggctgtggccgtcaaatagatgaagcaaattttgtcatgcggtgtaaccttcctcccttgtcaagtgaatacaccagagatgtgggttccaagactcagttggtgacagctaaccccagcataattcgccagagatttgaaaacctgctgtggtccagaaagaagtttgtggacaacatgaagatctataaccacagttacatatacatgcctgccttttctatgaagacgggaacagagccgtctctccgtgtgtactacaccctgaaagacgctggagccaatcaaacagtgctttttgctaaccccaactttcttcgaaacattggaaagttctggaagggtagggggatccatgccaagcgcctgtctacaggactctttttggtgagtgcagccttgggcctttgtgaggaggtgtccatctacggcttctggcccttctccgtgaacatgcaaggggaacctatcagccaccattactatgacaacgtcttgcccttctcaggcttccatgccatgccygaggagtttcttcaactctggtatcttcataaaatgggtgcactgaggatgcaactggacccatgtgagrasccgycgycrccacagcccacttcctagggactgcagaagaggaaaakactggatgggggtatttttttgctagatttttttttatgtgactttcaaaaggagctgccaaagtgtgtcatggattggcg

SEQ ID NO: 2141 - DNA, 2553 bp, Rattus norvegicus
ctcttgagtgacagagtcaagaatctggtaaactgccacctgaacttcccgggctcctgcgcccacgcagcagcgctcacttcccagagccatgccttcctacactgtcaccgtagccaccggtagccagtggttcgcgggcaccgacgactacatttacctcagcctcattggctctgcaggctgcagtgagaagcatcttcttgacaaagctttctacaatgacttcgagcgcggcggtcgcgactcctatgacgtcactgtggatgaagaactgggtgagatctacctagtcaaaatcgagaagcgcaaatacaggctccatgatgactggtacttgaaatacatcacactgaagacaccccacgactacatagagttcccttgttatcgttggatcacaggcgagggcgagattgtcctgagggatggatgtgcaaaattggcccgagatgaccaaatccacatcctcaagcagcacaggcggaaagaactggaaacacgtcagaaacagtatcgatggatggagtggaaccccggcttccctttgagtattgatgctaaatgccacaaggatctgccccgagatatccagtttgatagtgaaaagggagtggactttgttctgaactactcaaaagcgatggagaacctgttcatcaatcgcttcatgcacatgttccagtcttcctggcatgactttgctgactttgagaaaatcttcgtcaaaatcagcaacactatttctgagagagtcaagaaccactggcaagaggacctcatgtttggctaccagttcctgaatggctgcaacccagtactcatcaagcgctgcacagagttgcctaagaagctcccagtgaccacagaaatggtggagtgcagcctagagcggcagctcagtttagaacaggaagtacaggaagggaacattttcatcgttgattacgaactactggatggcattgatgctaacaaaactgacccctgtacacaccagttcctggccgcccccatctgcctgctgtataagaacctagccaacaagattgttcccatcgccatccagctcaaccaaacccctggagagaagaacccaattttcctccctacggactcaaaatacgactggcttttggccaaaatctgggtgcgttcaagtgacttccatatccatcaaacaatcacccatcttctccgcacacatctggtgtctgaggtgttcggtattgccatgtaccgccagctgcctgctgtgcacccccttttcaagctgctggtagcccatgtgaggttcaccattgccatcaacactaaggcccgggaacagcttaactgtgagtacggcctttttgacaaggccaatgccaccggaggtggtgggcacgtgcagatggtgcagagagctgtccaggacctgacctattcctccctgtgcttcccggaggccatcaaggcccggggcatggacaacaccgaggacatcccctactacttctatcgtgatgatggactgctcgtgtgggaagctatccagtcgttcacaactgaggtggtaagcatctactatgaggatgaccaggtggtggaggaggaccaggaactgcaggacttcgtgaaggatgtttacgtttatggcatgcggggcagaaaggcctcaggtttccccaagtccatcaagagcagggagaaattgtctgagtacctgacggtggtgatcttcacagcctcggcccagcatgcagctgtaaactttggccagtatgactggtgctcctggatccccaacgctcctccaactatgcgggccccaccacccacggccaagggtgtggtcaccatcgagcagattgtggatactctaccagaccgtggccgctcatgttggcatctaggtgcagtgtgggccttgagccagtttcaagagaatgagctgtttctgggcatgtacccagaggagcatttcatcgagaagccagtgaaagaagccatgattcgattccgcaagaacctggaggccatcgtcagcgtgattgccgagcgcaataagaacaaaaagctcccctactactacctgtcaccagacagattccaaacagtgtagccatctaaggctttgccgtccctgtcccagcagctctctgggcaggccagtggcttgcctggcaggctgtagatcttccagcagctggtgcctctcccaagctagcagtgccgctcttgggcccaggtgtggttgtaaactaaaggctgttctaggtgggaaattcacagagcttcagcacatgctacttcttcctgtcttcagtgacatagttcaggggcctcccatccagagcaggggtgtgcggctgtgtcccccagtccagcttagtaacctcttcactcagtagcaacagagtaagtgataatgttccactgggtcaggggtccatcattctacttatgcttcctccaactgcctgcatacagtaggtgcttagagaaacttcttagattaagagtttgttataaaataaagttcatttaaaacaggaaaaaaaaaaaaaaaaa

SEQ ID NO: 2142 - DNA, 1900 bp, Rattus norvegicus
gagagggtggtgctggagggtgggaaggcggcacgagcgaggcctggcccggaagctaggtgagttcggcatccgagctgagggaccctagtctaagactccgctgctacccagtctgagtatctggtctccgtccctaatgggattctcgtccaaaccgtctggagcctgcagcgatccagtctctggccctcgaccaggttcactgcagctgtctagaggtccccaggagcagctgctggcgagcccgcttctgcaggaacctatggagccattccgtagtgccattccgagcgacgcactgccgcagcttctctgagcctttccagcaagtttgttcaagattggctcccaagaatcatggactgttattatatgccttgttttctgtcaagacaccatgattcctggtaaccgaatgctgatggtcgttttattatgccaagtcctgctaggaggcgcgacagatgctagtttgatacctgagaccgggaagaaaaaagtcgccgagattcagggccacgcgggaggacgccgctcagggcagagccatgagctcctgcgggacttcgaggcgacacttctgcagatgtttgggctgcgccgccgtccgcagccgagcaagagcgccgtcatcccggattacatgagggatctttaccggctccagtctggggaggaggaggaagaagagcagagccagggaaccgggcttgagtaccctgagsgtcctgccagcagagccaacactgtgaggagtttccatcacgaagaacatctggagaacatcccagggaccagtgagagctctgcttttcgtttcttctttaacctcagcagcatcccagagaatgaggtgatctcctctgcagagctccggctatttcgggagcaggtggaccagggccctgactgggaacagggcttccaccgtataaacatttatgaggtyatgaagcccccagcagaaatggtgcctggacacctcatcacacgactactggacaccagactagtccrtcacaatgtgacacggtgggaaactttcgatgtgagccctgcagtccttcgatggacccgggaaaagcaacccaactatgggctggccattgaggtgactcacctccaccagacacggacccaccagggccaacatgtcaggattagccgatcgttacctcaagggagtggaaattgggcccaactccggcccctcctggtcayttttggccacgatggccggggtcataccttgacccgccgragggccaagcgtagtcccaagcatcacccrcagcgctccaggaagaagaataagaactgccgtcgccattcgctctacgtggacttcagtgacgtgggctggaatgattggatcgtggccccwccaggctaccaggccttctactgccacggggactgtccctttccactggcggrccacctcaactcaaccaatcatgccattgtgcagaccctggtcaactccgttaattctagcatccctaaggcctgctgtgtccccaccgaactgagcgccatttccatgttgtatctggacgagtacgacaaggtggtgttgaaaaattatcaggagatggtggtggaggggtgcggatgccgctgaaatcaggcagtccggaggacggwtgcacacacacacacacacacaaagcccatccgaccacccacacataccacacaaastgcttccctatagctggacttttacttaaaaaaaraaaaaaaraamwmraraaaraaaraaaaagaaagacagaaaaggaaaaaaaaaccaaccctaaacacccaccttgaccttatttatgactttacgtgcaaatgttttgaccatattgatcatatattttgacaaatatatttataactacgtattaaa

SEQ ID NO: 2143 - DNA, 2531 bp, Rattus norvegicus
cgggggcggcgcggctcggtggcatctcgggcgcggcccgccgtcctcgcccccggcgccgctcgctccccccaccccaccccggactcccccatgtatgacgactcctacgtgcccgggtttgaggactcggaggcgggttcagccgactcctacaccagccgcccctctctggactcagacgtttccctggaggaggaccgggagagtgcccggcgagaagtggagagtcaggctcagcagcagctggaaagagccaagcacaaacctgtggcatttgctgtgaggaccaatgtcagctactgtggagttctggatgaggaatgcccagtccagggctctggagtcaacttcgaggccaaagattttctgcacattaaagagaagtacagcaatgactggtggatcgggaggctagtgaaagaaggtggcgatattgccttcatccccagcccccaacgcctggagagcatccggctcaaacaggaacagaaggccaggagatccgggaacccttccagcctgagtgacattggcaaccgacgttcccctcctccatctctagccaagcagaagcaaaagcaggcggaacatgtccccccgtatgatgtggtgccctccatgcggcctgtggtgctggtgggaccctctctgaaaggttatgaggtcacagacatgatgcagaaggctctcttcgacttccttaaacacaggtttgatggcaggatctccatcacccgcgtcacggctgacctctcactggccaagcgctctgtgctcaacaatcctggcaagaggaccatcatcgagcgctcttctgcccgctccagcattgctgaggtgcagagtgagattgagcgcatattcgagctggccaaatccctgcagctagtggtgttggatgctgacaccatcaaccacccagcacagctagccaagacctcactggcccccatcatcgtcttcgtcaaagtgtcctcgccaaaggtactgcagcgactgatccgctccagggggaagtcccagatgaagcacctcactgtacagatgatggcatatgataagctggttcagtgcccacctgagtcatttgatgtgattctggatgagaaccagctggacgacgcctgtgagcacctagctgaatacctagaggtttactggcgcgctacccaccacccagcaccgggccccgggatgctgggtccgcccagtgccatccctggacttcagaaccagcagctgctgggggagcgaggtgaggagcattcacccctggagcgggacagtttgatgccctcggatgaggccagtgagagctcccgccaggcctggaccggatcttcacagcgcagctcccgccatctggaggaggactatgcagatgcctaccaggacctgtaccagcctcaccgtcaacacacctcggggctacccagtgctaacgggcatgacccccaagaccggctcctagcccaggactcggagcatgaccacaatgaccggaactggcagcgtaaccggccttggcctaaggacagctactgaccacctcctgccctaccctggcaggcacagacacagcggctggggtgtccacctcasgcaggttggagttagattggcgttaggctgcctctaggttcagctcacacaaccctctgcccagccctakgtccagggctgactgtggtcccaaggttctgggagaagcaaggggccccctcacctcctgggcacagtgaccccgtaggttctcatccaggtactagctgtgttctgcatccttggcaccttcmcctgcataagaagctgccccggtgagcaatgatctcaggccgggatcacttagcaggggtcttccagccagaatggatacccctctaaacagcasgagggtgtgagtgcabgmrrtgtagcatgaggaagagacatggttcctgagcaggcgtaaaccctaagcaaaggaactccgttcacgtcactgccgcacattagaaatgaagcaatcagagctcaacatggcggcayttstatcccatcagstggggtgggcacttacacytaagacaggagcagtgcaggtgaggcaggacagacagytcatggytgtagctctgttagagaacggccytcctcaccaaaccaggaagcttagcatytggcaagactagggaactggggcacagtcaagcccaaagccggcytggactgcggggaagggggagcagyttccagcccccccaccccccttgctttcctcattctttgcccttgcgtctgtcatttctgttccttccctccatgcctcctgcaagataggggctccctggytcgtagctgccacttgttaagttagggttagatgagaggaacagacacaatgaacagccccagaggctgtcacctggctacccttgccttatggctctagcgtttgacctacagagcatgctccattaagaacccgccccacctcattgtcatctccaataaaacataacgcmcmrwmmmwwrrrwrwmwmaaaaaa

SEQ ID NO: 2144 - DNA, 1183 bp, Rattus norvegicus
ggccaaggaggaagacagaacagaaggtgagggaacacagccctggcagaaagaagaactcagagccaccactgggaaaagaatgtaaagatgagatgtaaattcctagggagtttctttctgctcttcagcctgtccagcaaaggagcagactgcagagacagtgggaccgtctggggtgccctgggtcatggcatcaacctgaacatccctaactttcaaatgactgatgatattgatgaggtgcgatgggagagggggagcaccctggttgccgagtttaaaaggaagatgaagccttttttgaaatcgggagcatttgagatcttagcaaatggagacttgaagataaagaatctgacaagagatgacagtggcacctataatgtaacggtatacagcacaaatgggacacgtatcctggacaaggcactggacttgaggattctagagatggtctcaaagccgatgatctactgggagtgcagcaacgcaaccctgacctgtgaggtcttggaaggaacagatgttgaactaaagctgtaccaaggaaaggagcatctcaggagcctccgtcagaagaccatgagttaccagtggaccaacctgagagcaccgtttaagtgcaaggcggtaaacagggtcagccaggagtctgagatggaagttgtcaactgtccagagaaaggtctgcccctctatctcatagtgggggtcagtgcaggaggactcctcttggtgttcttyggsrcgskgtttattttctgtatctgcarraggaaaaaacggaacaggwggakawaaggtgaasasctggagatawaagcttccasaatgagcactgtggaaaggggacccaagycacactcaryccaggcctcagcaccakcatcacagaatccagtggcttcccaagctcctcctccacctggccatcatckccagacacstggccatcgtcccctgcctccaagccaycgtaaycgtgagcaccakccgragaasagacctcckccatcaggcacacaggttcaccascagaaakgscctcctttgcccagaccccgagttcakmcaaagcckccctgtgggagtggagatgtttcgttgccaccccctaattaaaaaggcagaatctgccatttccaataaaaagctgtgtggatataaaaaaaaaaaaaaa

SEQ ID NO: 2145 - DNA, 4954 bp, Rattus norvegicus
tgcactttaacatctgctttcccagaggaaaaagtaaaggagaaacagtacaatcatagaagagtcttcgtaacagaagcgcgaggagagcattatggacaagttctgcaactctactttttgggatctctcattactggaaagtccagaggctgacctgcctctttgttttgagcaaactgttctggtgtggattcccttgggctttctttggctcctggctccttggcaactttacagcgtgtacagatccaggaccaagagatcttctataaccaaattctaccttgccaagcaggtgttcgtcgtgtttcttcttattttagcagccatagacctgtctcttgcgctcacagaagatactggacaagccacagttcctcctgtcagatatacgaatccaatcctctacctgtgcacatggctcctggttttggcagtccagcacagcaggcaatggtgtgtacgaaagaactcttggttcctgtctctgttctggatcctctcggtcttatgcggcgtattccagtttcagactctgatacgagcactcctgaaggacagcaagtccaacatggcctactcctacctgttcttcgtctcctacggtttccagattgtcctcctgattcttacagccttttcaggaccaagtgactcaacacaaactccatcagtcacggcttcctttctgagtagcattacatttagttggtatgacaggactgttctgaaaggttacaagcatccactgacactagaagatgtctgggatatcgatgaagggtttaaaacaaggtcagtcaccagcaagtttgaggcggccatgacaaaggacctgcagaaagccaggcaggcttttcagaggcggctgcagaagtcccagcggaaacctgaggccacactacacggactgaacaagaagcagagtcagagccaagacgttctcgtcctggaagaagcgaaaaagaagtctgagaagaccaccaaagactatcccaaatcgtggttgatcaagtctctcttcaaaaccttccacgtagtgatcctgaaatcatttatactgaaattaatacatgaccttttggtgtttctgaatcctcagctgctgaagttgctgatcggtttcgtgaagagctctaactcatacgtgtggtttggctatatctgtgcaatcctaatgtttgctgtgactctcatccaatctttctgccttcagtcttactttcaacattgttttgtgttgggaatgtgcgtacggacaaccgtcatgtcttcgatatataagaaggcattgaccctatctaacttggctaggaagcagtacaccattggagagacggtgaacttgrtgtctgtagattcccagaagctaatggatgcgaccaactacatgcagttggtgtggtcaagtgttatacagattactttgtccatcttcttcctgtggagagagttgggaccgtccatcttagcaggtgttggggttatggttctcctaatcccagttaatggagttctggctaccaagatcagaaatattcaggtccaaaatatgaagaataaagacaaacgtttaaaaatcatgaatgagattctcagtggaatcaagatcctgaaatactttgcctgggaaccttcatttcaagagcaagtccagggcattcggaagaaagaactcaagaacttgctgcggttcggccagctgcagagtctgctgatcttcattttacagataactccaatcctggtgtctgtggtcacattttctgtctatgtcctggtggatagcgccaatgttttgaatgcggagaaggcatttacctccatcaccctcttcaatatcctacgcttccctctgtccatgcttcccatggtgacctcatcgatcctccaggccagtgtttctgtggaccggctggagaggtatttgggaggagacgatttagacacatctgccattcgccgcgtcagcaattttgataaagctgtgaagttttcagaggcctcttttacttgggacccggacttggaagccacaatccaagatgtgaacctggacataaagccaggccaactggtggctgtggtgggcactgtaggctctgggaaatcctctttggtatcagccatgctgggagaaatggaaaacgttcacgggcacatcaccatccagggatccacagcctatgtccctcagcagtcctggattcagaatggaaccatcaaagacaacatcctgtttgggtccgaatacaatgaaaagaagtaccagcaagttctcaaagcatgcgctctcctcccagacttggaaatattgcctggaggagacatggctgagatcggagagaaggggataaatctcagtggtggtcagaagcagcgagtcagcctggccagagctgcctatcaagatgctgacatctatattctggacgatcccctgtcggctgtggatgctcatgtgggaaaacacattttcaacaaggttgtgggccccaacggcctgttggctggcaagacgagaatctttgttactcatggtattcacttccttccccaagtggatgagattgtagttctggggaaaggcaccatcttagagaaaggatcctatcgtgacctgttggacaagaagggagtgtttgctaggaactggaagaccttcatgaagcattcagggcctgaaggagaggccacagtcaataatgacagtgaggcggaagacgacgatgatgggctgattcccaccatggaggaaatccctgaggatgcagcttccttggccatgagaagagaaaatagtcttcgccgtacactgagccgcagctctaggtccagcagccgacgtgggaagtccctcaaaaactccttgaagattaaaaatgtgaatgtcttgaaggagaaggaaaaagaagtggaaggacaaaaactaattaagaaagaatttgtggaaaccgggaaggtcaagttctccatctacctgaagtatctacaggcagtagggtggtggtccatacttttcatcatccttttctacggattgaataatgttgcttttatcggctctaacctctggctgagtgcttggaccagtgactctgacaacttgaatgggaccaacaattcgtcttctcatagggacatgagaattggggtctttggagctctgggattagcacaaggtatatgtttgcttatttcaactctgtggagcatatatgcttgcagaaatgcatcaaaagctttgcacgggcagctgttaaccaacatcctccgggcacccatgaggttttttgacacaactcccacaggccggattgtgaacagattttctggtgatatttctactgtggacgacttgctcccccagacacttcgaagctggatgatgtgtttctttggcatcgctggcactcttgtcatgatctgcatggccaccccagtcttcgctatcatcatcattcctctcagcattctttatatttcggtgcaggttttttatgtggctacttcccgccagctgagacggttggattctgtcaccaaatctccgatctattctcacttcagtgagactgtcacaggtttgcccattatccgtgcctttgagcaccagcagcgatttctagcttggaatgagaagcagattgacatcaaccagaaatgtgtcttttcctggattacctccaacaggtggcttgcaattcggctggagctggttggaaacttggtcgtcttctgttccgccttgctgctggttatttatagaaaaaccttaaccggggacgttgtgggctttgttctgtccaacgccctcaatatcacacaaaccttgaactggctagtgaggatgacgtcagaagcagagaccaacattgtggcagttgagcgaataagtgaatacataaatgtagagaatgaggcgccctgggtgactgacaagaggcctccggcagactggcccagacatggtgagatccagtttaacaactatcaagtgcggtatcggccggagctggatctggtactgaaagggatcacttgtaacatcaagagcggagagaaggtcggcrtrgtgggsmggactggggctgggaaatcatccctcacrarstgcctcttcagaatcttagagtctgcggggggccagatcatcattgatgggatagatgttgcctccattggactgcacgaccttcgagagaggctgaccatcattccccaggaccccattttgttctcggggagtctgaggatgaayctcgaccctttcaacaaatattcagatgaggaggtttggagggccctggagttggctcacctcagatcctttgtgtctggcctacagcttgggttgttatccgaagtgacagagggtggtgacaacctgagcatagggcagaggcagctcctatgcctgggcagggctgtgcttcgaaaatccaaaatcctggtcctggatgaagccacggctgcagtggatctcgagacggatagcctcattcagacgaccatccgaaaggagttctcccagtgcacggkcatcaccatcgctcacaggctgcacaccatcatggacagtgacaagataatggtcctagacaacgggaagattgtcgagtatggcagtcctgaagaactgctgtccaacagaggttccttctatctgatggccaaggaagccggcattgaaaatgtgaatcacacagagctctagcagctggttccgtggctggcggactataagaacagtttctattatttgctttggtttctgtgactgtgctctaggtgcaaagacacatattttgttcccgttgctcaggctggcctcaaactctaaggctccagcaatctctggtctcagccagagacctgtaaaaatagacacttcaaagattatcatgaataaatatttaaataaawarwaaaaaaaaaaaaaaaaaaaaaa

SEQ ID NO: 2146 - DNA, 2421 bp, Rattus norvegicus
gtcgacatgagccccactgcctgcgttctagtgctcgccctggctgccttgcgggctaccggccagggccagatcccgctgggtggagacctagccccacagatgcttcgagaactccaggagactaatgcggcgctgcaagacgtgagagagctcttgcgacacagggtcaaggagatcaccttcctgaagaatacggtgatggaatgtgacgcttgcggaatgcagcccgcacgcacccccggtctgagcgtgcggccagtcgcgctctgcgcacccggctcctgcttccctggcgtagtctgcacggagacagctaccggcgcgcgctgcggcccctgccctccgggctacaccggcaacggctcgcactgcaccgacgttaatgagtgcaacgctcacccctgtttcccgcgcgtgcggtgcatcaataccagccctggctttcactgcgaagcctgtccccctgggttcagcgggcccacccacgagggtgtggggctgaccttcgccaagaccaacaaacaagtttgcacagatattaatgagtgtgagaccgggcagcacaattgcgttcccaactccgtgtgcgtcaacacccggggctccttccagtgcggtccctgccagcccggcttcgtgggcgaccagaggtcaggctgccagcggcgtgggcaacacttctgccccgacgggtcacccagcccgtgccatgagaaagcagactgtattttggagcgcgacggctcaaggtcctgcgtgtgtgcggtcggctgggccggcaacgggctcctgtgcggacgcgacacagacctggacggtttcccggacgagaagcttcgctgctcagagcgccagtgccgcaaggacaactgcgtgacggtgcccaattcagggcaggaggatgtggaccgggaccgcattggagatgcttgtgacccggatgcggacggggatggagtccctaatgagcaagacaattgcccgctggttcgaaacccagaccagcgcaactccgataaagacaagtggggagatgcctgcgacaactgccggtcccagaagaatgatgaccagaaagatacagaccgggatggccagggcgatgcctgcgacgacgacatagatggcgatcgaatccgaaatgtagctgacaactgtccccgggtgcccaactttgaccagagtgacagcgatggtgatggtgttggggatgcctgtgacaattgtccccagaaagacaacccggaccagagggacgtggaccacgactttgtgggtgatgcctgtgacagtgaccaagaccaggacggggatggacaccaagactcccgggacaactgccccacagtgcccaacagtgcccagcaggactcagaccatgatggcaagggtgatgcctgtgatgatgacgacgacaatgacggagtccctgacagccgggacaattgccgcttggtgcccaacccgggccaagaggacaatgaccgggatggcgtgggtgacgcttgtcagggtgacttcgatgctgacaaggttatagacaagatcgatgtgtgccccgagaacgccgaggtcactctcaccgacttcagggccttccaaacagttgtgctggaccccgagggtgatgcgcagatcgaccccaactgggtggtgctcaatcagggaatggagatcgttcagaccatgaacagtgaccctggcctggctgtgggttacacggcattcaacggtgtagattttgagggaacgttccatgtaaacaccgccaccgatgatgactacgctggcttcatcttcggctatcaagacagctcaagtttctatgtggtcatgtggaaacagatggagcagacgtactggcaggccaatcctttccgggcagtggctgaaccagggattcagctcaaggctgtcaagtcctctacaggtcccggggaacagctccgaaatgcgttgtggcacacgggggacacagcatcccaggtgcggctgctgtggaaggatcctcgaaatgtgggctggaaggataagacatcctaccgctggttcctgcagcaccggcctcaagtcggctacatcagggtgcggttctatgagggtcctgagctagtagctgacagcaacgtggtgctggacacagctatgcgtggtggccgcctgggtgtcttctgcttctcccaagagaatatcatctgggctaacctgcgctaccgttgcaatgatacaatccctgaggactatgagcgtcaccggctgcggagggcctagggaccctaagaggggccccgctgaccgatggactgcggtagcatcggccacaggtgtctgggggggggggtctggcatctttctgaagggatgtctggcctggggaggaaaggcaaataaagaatgtatgtgggggaaaaaaaaaaa

SEQ ID NO: 2147 - DNA, 1216 bp, Rattus norvegicus
gcccagggtgggaggaagggcggtaatctctaggaagcagaaggcaggtttgcagaggacgctggataggagatgaggtgggggaaaccaaggcctgggcttcccgcagctgcagcaaggttttggtgcttaccacagcagcaggaatgcattgagggatgtgacagtggaacgcaggtggcagtgatactcactgctgctgaaggagcccaaagaaccagcatctgacctgtcttgaacgcaccatcgacagttgctgctgagtcatggccgaaggggagatcacaacctttgcagccctgaccgagaggttcaatctgcctctagggaactacaaaaaacccaaactgctctactgcagcaacgggggccacttcttgaggattcttcccgatggcaccgtggatgggaccagggacaggagykmccagcammtkcarmtgsrgctcagtgcggaaagcgcgggcgaagtgtatataaagggtacagagactggccagtacttgsccatggacaccgaagggcttttatacggctcgcagacaccaaatgaagaatgcctattcctggaaaggctagaagaaaaccattataacacttacacatccaagaagcacgcggagaagaactggtttgtgggcctcaagaagaacgggagttgtaagcgcggtcctcggactcactacggccagaaagccatcttgtttctccccctcccggtatcttctgactaaggagtctgttctgggtgctccctatttttggttgaccctaaaatgttcccttgaccattggctgcgctaaccctcagcccacagagcctgaatttgtwwgcagtrmwwmwaaawarmmagttcacttttccgctgagcccttccccaccaccccagcacagtttggaacacggggaccaaattacttstaggggacaactggctggccagtctaggtctgggtttggatatccagatgcttcagggtacctgmtacaagttggacytcgtgatacaaagaggggagccatgtgtagcatctggaggggtctaagaagtgggttcttttagtagctgcatgctctttccccttctgagtaatccstggttttgmgtacccccaggcacttagcatgaytacccttccccctaccagcacctcataaatatcagtaaagaaactgrtagtaaaaaaaaaaaaaaaaaaaaaaaaaaaaaaaaaa

SEQ ID NO: 2148 - DNA, 1629 bp, Rattus norvegicus
aaacagcggactacaggcaccactgccatggacagcctgttgtgggctacctgggtcctctgcttgctgaacctgtggggagttgcactgggtcacctccacctagaatgtgacttcatcactcagctgagagacgatgagcttgcatgccttcaggcggcagaggggaccaacaactcgtccatgggatgccctgggacctgggatgggctgctgtgctggcccccaactggctctggccagtgggtctccctcccctgccctgaattcttctctcattttggctcagacccaggggctgtgaaaagggactgcaccatcacgggttggtctgatcccttcccaccatatcccgtggcctgtcctgtgcccttggaactgctaacagaggagaagtcttacttctccacggtgaagatcatctacaccacaggccacagcatctccattgtagccctctgcgtggctattgccatcctggttgctctcaggaggctccactgccccaggaactacatccacacgcagctgtttgctactttcatcctcaaggccagtgctgtgttcctgaaggatgctgctgtcttccagggtgatagcacggaccactgcagcatgtccactattctgtgcaaggtctctgtggccgtctcacattttgccaccatgaccaacttcagctggctgctggcagaagccgtctacctgagctgtctgttggcctccacatctcctaggtccaaaccagctttctggtggctggttctcgctggctggggactccctgtgctatgcactggtacgtgggtgggctgcaaactggcttttgaggacactgcgtgctgggacctagacgacagctccccctactggtggatcatcaaagggcccatagtcctctctgttggggtgaactttgggctgtttctcaatataatttgcatcctgctgaggaagctggggcctgcacaaggcggcttacacacacgggctcagtactggcggctttccaaatcaacacttctccttatcccgctgtttggaattcattacatcatcttcaacttcctgcctgacagtgctggccttggcatccgtctacccctggagctgggactggggtccttccagggttttgttgttgctgtcctctactgcttcctcaatcaagaggtgaggacggagatttcacgcaaatggtatggccatgaccctgaacttctgccagctcggcggacctgcactgagtggaccacacctccccgatcgagagtgaaggtgctcacctstgagtrcyarsccmgmcwtcwcarwkscygagccccamawcystkcwytcwwmctrycwwgccaccaagggcaacaaggtcctcccttccgttctcattctctgcatctgctttctctaggtccctgtataccaacctccgactttctcagttcctgtatgcccccatctgttctttcttcctatctaggctattgcccaaggcccagggaaaccaataaacttgtacatgagtgatctgcagttgagtcaatgtggctctgaaggggagctcttgtcagcagccattatttgcacttccggtgcattcctcatcccttggctgcagctgcctcattgcc

SEQ ID NO: 2149 - DNA, 1260 bp, Rattus norvegicus
actcatgcccatttcctgtaatggacagacttgatgctaatgtgagttccaacgagggtttcgggtctgtggagaaggtcgtactgctcacgttcttcgcaatggttatcctgatggccatcctgggcaacctgctggtgatggttgctgtgtgcagggacaggcagctcaggaaaataaaaaccaattatttcattgtgtctcttgcctttgctgatctgctggtttcggtgctggtgaatgccttcggtgccattgagttggtccaagacatctggttttatggggagatgttttgcctggtccggacctctctggatgtcctactcaccacagcatcaatttttcacctctgctgcatttccctggataggtattatgccatctgctgtcaacctttggtttatagaaacaagatgacccctctacgcatcgcattaatgctgggaggctgctgggtcattcccatgtttatatcttttctccccataatgcaaggctggaacaacatcggcatagttgatgtgatagagaaaaggaaattcaaccacaactctaactctacattctgtgtcttcatggtcaacaagccctatgccatcacctgctctgtggtggccttctacatcccgtttctcctcatggtgctggcctattaccgtatctatgtcactgctaaggagcatgcccagcagatccagatgttacaacgggcaggagccacctctgaaagcaggccccagacagctgaccagcacagcacacatcgcatgcggacagagaccaaagcagccaagactttatgtgtcatcatgggctgcttctgtttctgctgggcccccttctttgtcaccaatattgtggaccctttcatagactacactgtgcccgagaaggtgtggactgctttcctctggcttggctatatcaattcagggttgaacccttttctctatgccttcttgaataagtctttcagacgtgccttccttatcatcctctgctgtgatgatgagcgctacaaaagaccccccattctgggccagactgtcccctgttcaaccacaaccattaatggatccactcatgtgctaagggatacagtggaatgtggtggccaatgggagagtcggtgtcacctcacagcaacttctcctttggtggctgctcagccagtgatacgtaggccccaggacaatgacctagaagacagctgtagcttgaaaagaagccagtcctaagctgctacttcggtgtatg

SEQ ID NO: 2150 - DNA, 1307 bp, Rattus norvegicus
gcacgagagccacaacgcagccttgcagaaaacagagcttcagcatgcytggctcagcactgctatgttgcctgctcttactggctggagtgaagaccagcaaaggccattccatccggggtgacaataactgcacccacttcccagtcagccagacccacatgctccgagagctgagggctgccttcagtcaagtgaagactttctttcaaaagaaggaccagctggacaacatastgctgacagattccttactgcaggactttaagggttacttgggttgccaagccttgtcagaaatgatcaagttttacctggtagaagtgatgccccaggcagagaaccatggcccagaaatcaaggagcatttgaattccctgggagagaagctgaagaccctctggatacagctgcgacgctgtcatcgatttctcccctgtgagaataaaagcaaggcagtggagcaggtgaagaatgattttaataagctccaagacaaaggtgtctacaaggccatgaatgagtttgacatcttcatcaactgcatagaagcctacgtgacactcaaaatgaaaaattgaaccacccggcrtctactggactgcaggacataaatagagcttctaaatctgatccagagatcttagctaacgggagcaactccttggaaaacctcgtttgtacctctctccaaaatatttattacctctgatacctcagttcccattctatttattcactgagcttctctgtgaactatttagaaagaagcccaatattataattgtacaatatttattattttttaatctgtgttgtttaagctgtttccataggggacattttatagtatttgagtgttcaaagggaaattatattatataatgggaggggagcttccttgggaagcaactgaaacttcgatcctaaggctggccacacttaagagctgcagagctgtttaccaatggtgtcctttcacttgccctcatccctgaattcaggactcctgggagagttgtgaagactctcatgggtcttgggaagagaaaccaggttgctccttccatgattatccttgcaacagctcagcgcatctccctgccatcactctgcaaccacttccagtctcgaaagctgtgaccagtttgttatttataaccacctagaattagttctaatagaactcatttttaactagaagtaaatcaattcctcttgggaatggcgtattgtttgtctgcttttgtagcagatcctcgttttgaataaatggatcgtactcaaatcaaaaaaaaaaaaaaaaa

SEQ ID NO: 2151 - DNA, 3807 bp, Rattus norvegicus
gccttgaacttctaatcttccgcctccatctctggmgkyttckgstracargctatactcatggcacctccaagcgaggagacgcctctcatctctcagcgctcttgtagcctctcatcctcagaagcaggagccctgcatgtgctccttcctccccggggacctgggcctccccagcgactgtcattctcttttggggactacttggctgaggatctgtgtgtgcgggctgccaaggcctgtggcatcctgcccgtttatcattcgctcttcgctctggccaccgaggacttgtcttgctggttccccccaagccacatcttctcsatagakgacgtggacactcaagtcttggtctacaggctacgcttttattttcctggttggtttggactggagacctgtcaccgctttgggttacacaaagatttgaccagtgccatccttgacgtacatgttttagaacacctctttgcccagcaccgcagtgacctggtgagtgggcgtctcccagtaggccttagcctgaaggaccagggagagttcctgagcctagctgtgctggacctggcccagatggctcgtaagcaggcccagcggccaggagagctgctgaagtctgtcagttacaaagcctgtctgccgcccagcctgcgcgacctgatccagggccagagcttcgtgacgcgcaggcgcatccgcaggaccgtggtccaggcgctggcgccgtgtagtagcctgccaagccgaccctacgcactcatggccaagtacatcctagaccttgagcggctgcatccagcggccaccactgagtccttcctcgtgggactcccgggcgcccaggaggagccgggttgcctgcgtgtgacaggggataatggcatcgcctggagctccaaggaccaggagcttttccagaccttctgtgactttcccgaaatcgtggatgtcagcatcaagcaggctccacgcgtgggtccggcaggggagcaccggctagtcaccatcaccaggatggacggtcacatcctggaagcggagttcccggggctgcctgaggcgctgtctttcgtggcgctcgtggatgggtactttcgcctgatctgcgactccaggcatttcttctgcaaggaggtggcaccgccacggctgctggaggaggaggcggagctgtgccatggacccatcacgttagactttgccatccacaagctgaaggctgctggctccctcccgggctcctacattctccgacgcagcccgcaggactatgacagctttcttcttactgcctgtgtccagactcctcttggccccgactacaagggctgcctcatccgccaagaccccagtggggctttctccctggttggtctcagccagctgcacagaagcctacaggagctgctcacagcctgctggcattctggactgcaagtagacggcactgccctgaacctcacatcttgctgcgtccccagacccaaggaaaagtccaatttgatcgtggtgcgtaggggccgcaaccccacgcctgcccccgggcactccccatcctgctgtgcgctgactaagttgagcttccacacaatcccagcagacagcctggagtggcacgagaatcttggtcacggctcttttaccaagatcttccatggccataggcgggaggttgtggatggtgagacacatgacacagaagtcctcctgaaggttatggactccagacaccagaactgcatggagtcctttctggaagccgcaagcttgatgagccaagtatcctacccgcacctggtgttgctgcatggagtctgcatggctggagacagcatcatggtgcaggaatttgtgtaccttggagcaattgacacgtacctgcgcaagcgtggtcacctggtgccggccagctggaaactgcaggtgaccaagcagctggcctatgcccttaactacttggaggacaaaggcctccctcatggcaacgtctcagcgaggaaggtgctgctagctcgtgagggggttgatgggaatccacctttcatcaagctgagtgatcctggtgtcagcccaactgttttgagcctggaaatgctcactgacaggattccctgggtggccccggagtgtctccaggaagctggaacgctcaacttggaggctgacaagtggggctttggcgccaccacgtgggaggtgttcagcggggcacccatgcacattacctcgctggagcccgccaagaagctgaagttctatgaggaccggggacagctgccggccctcaaatggacagagctggaggggctcatcgcacagtgcatggcgtatgatcctggccggcgcccctccttccgagccatcctcagagacctcaacggcctcattacatcagattacgagctcctctcagaccccacacctggcatcccgaatccccgagatgagctgtgtggtggtgcccagctctatgcctgccaggaccccgccatcttcgaggagagacaccttaagtacatctccctgctgggcaaggggaacttcggcagcgtggagctgtgccgctacgaccctctgggagacaatacgggacccctggtagcagtgaagcagttacagcacagcgggccagaacagcagagggacttccagcgagagattcagatcctcaaggctctacactgtgacttcatcgtcaagtaccggggagtcagctatgggcctggtcgccaggagctgcggttagtgatggagtacctgcccagcggctgcctgcgggacttcctgcagcgccaccgcgcgcgcctgcacaacgaccgcctactgctgttcgcctggcagatctgcaagggcatggagtacctgggcgcacgccgctgcgtgcatcgtgacctggctgcgcgcaacatcctggtggagagtgaggcgcatgtgaagattgctgacttcggcctcgctaagctgctgcctcttggaaaagactactacgtggtccgcgtgccgggccaaagtcccakmkkctggtacgcccctgagtccctatctgacaacatcttctcccgccaatctgacgtgtggagcttcggcgtggtgctgtatgagctcttcacctacagcgacaagagctgcagcccatccactragttcctgcgyatgatkgggcctgagcgtgagggatccccgctctgccacctcttggagctgctggcagagggccgccgtctcccaccaccctccacctgccctactgaggttcaagagctcatgcagctgtgytggtcgcccaacccacaagaccggccagcgtttgacaccytgagcccccagctggatgcgctgtggcgcggaagccccggatagcaagcagccagggatgagcgtgagyttggttcctatgatctggstgtgtgacttccargcgggaagctgtccctctctgggccccagcacccccaatcccctctggscacctcttcccatcattcttccctcccagaatggggatgttaaataagtgaccccaggctckgcacgrktgtcattacctctggaaatgctttactagcaagtctgccttmtgcagaactcacaaccccaggtcccaagagcaccctagacttggccagaaacccacccagacccccagaccctctcttgaccctaggtctgtgcccagtcccktgctctcctgtccatgggtttcttgggggctgtgaaacctcagcatggtctcctgaaagattgggttctgggagtgtttgttgaatgaataaatgaattcmwtdgaaaaaaaaaaaaaaaaaa

SEQ ID NO: 2152 - DNA, 4019 bp, Rattus norvegicus
gaacgagcaagcgagcaggcagcggagcagcagcccggaggcagcagcggcggcggtggtggcggcagtggccgctccgcgcctcgcctccctggcctcgccagcctcgttgcgccgcgcccggacctgccacccccgcctaccgggcccgacctcggcagcgcccctcgcatcggctgccagcgccacccgccctcccagagcagtgagcggagtgcggggcgcagaaacaccggagccagtgcccgccagccccgccaagcaaaacgggctgagagaacctacgctcggcccagcgcggctccacagccgtccgggagctgtcccttcagcaccgccgcggaagcctgagtcccagcgcagcccagcggaacccctgacccagcccgagcgcaccaggcgctgcgcttagcggcagccccgcggggagcacccttgtgcccctacccaggggacctgccatctcctccgggaggcggggagaaggaacgaggagggaggtcgggcagcttcacccgccaccgaggggagtaggcagacaagcaaggagatccgaaggggatcggtcacgcagggaggagagcaagccgcatccgtccccaccgcaccgggagcgcgctgcggcgaccaccgcagagccaagcgcggatttctcgtaaccccctctttcctagcaggggctggtctatcggtccggcccccgaaacggagcagctgaccttcccctaaaaagctttgtgtcgatttctccatttttcccgctgagatggtaccgggagcccggcccccccatcatctctcccctcctcccgggcctcgccgctgagcgccgccccactcccttcctccctccctctttacctccctcctctcttccactgcctcctccgcagccaggccagctccctctcacactaggcgccttaaagaccctaaggagcccgcgcacacacccctggacccgcacctgactgacagctccccctgagggggcttggctcgttggttggggtgggtggccagagccgcggtcctctgtgccccccgacggctggggggaggggggaagaggccctgcgcccccctccccgtcgccaactccccctggcggcagctcccatgggtgtcgctgggccgcgccatgcctaagggggcgccgcgatgggccaaggggacgagagcgagcgcatcgtgatcaacgtgggcggcacgcgccaccagacgtaccgctcgacgctgcgcacgctgcccggcacgcggcttgcctggctggcggagccggacgcccacagccacttcgactatgacccgcgcgctgacgagttcttcttcgaccgccacccgggcgtcttcgctcacatcctgaactattaccgcaccggcaagctacactgcccggccgacgtgtgcgggccgctctacgaggaggagctggccttctggggcatcgacgagacggacgtggagccctgctgctggatgacgtatcgccagcaccgcgacgctgaggaggcgctggacagctttggtggcgcgcccttggacaacagcgccgacgacgcggacgccgacggccccggcgactcgggcgacggcgaggacgagctggagatgaccaagagattggcgctcagtgactccccagatggccggcctggcggcttctggcgccgctggcagccacgcatctgggcactgttcgaggacccctactcatcccgctatgcgcggtacgtggcctttgcctccctcttcttcatcctggtctccatcacaaccttctgtctggagacccacgagcgcttcaaccccatcgtgaacaagacagaaattgagaacgttcgaaatggcacacaagtgcggtactaccgggaagcggagacggaggccttcctcacctacatcgagggtgtctgcgtggtctggttcaccttcgagttcctcatgcgtgttgtcttctgtcccaacaaggtggagttcatcaagaactccctcaatatcattgacttcgtggccatcctccccttctacctggaggtgggcctaagtggcctgtcctccaaagctgccaaggacgtgctaggcttcctgcgcgtcgtgcgcttcgtgcgcatcctccgtatcttcaagctgacccgccattttgtgggcctgcgggtcctgggccacacgctccgtgccagcaccaacgagttcctgctgcttatcatcttcctggccctgggtgtgctcatctttgccaccatgatctactatgctgagaggataggggcacagcccaatgaccccagcgccagcgaacacacacactttaaaaatatccccatcggcttctggtgggctgtggtcaccatgacgacactgggctatggagacatgtatcctcagacgtggtctgggatgttggtgggagcactgtgcgccctggctggtgtgctgaccattgccatgccggtgcccgtcatcgtgaacaattttgggatgtactactctttagccatggctaagcagaaamwammaaaraaaaaaaaraarmatattccgcggccaccacagctgggatctcccaattattgtaaatctgtcgtaaactctccacaccacagtactcagagtgacacatgtccgctggcccaggaagaaattttagaaattaacagagcagattccaaactgaatggggaggtggcgaaggccgcgctggcgaacgaagactgcccccacatagaccaggccctcactcccgatgagggcctgccctttacccgctcgggcacccgcgagagatacggaccctgcttcctcttatcaaccggggagtacgcgtgcccgcctggtggaggaatgagaaaggatctttgcaaagaaagccctgtcattgctaagtatatgccgacagaggctgtgagagtgacttgaccaggcggcttggccgaggacactggtggctattaagcatctgggtggacctgcagcccctcctcaccctcggacagagtaaattcacgccatgcaggtttgccggacgagtccgagtggccccgggcattgtactaagacggacgtagctttttctacggcccacggtaactgaccgtagaggattcgcccttctttcttttgattttctttttctttcttttttttttttttagaagttaccttttatttggggagggggggtcaaggggagccttagcatgacttgcatgaagttaaacagaaaacccagctaaaccaaccccaccagcccctgctgtgactgtatgctcactctaaccaccaccgagaaccagagaaargcaagagtctcttatttcttccagcattctttgacacgtagtgtcggagtcaaactgtgacggcgcttggtagaaccctgtacatttccgggagtgggtgcgggggggggggggaggtcagggactaaggatggggccaggggagtggattgcttttttgtacacgagacccagaggaaaggtcccaaaaaggcagtcagtcatcgktmacattgacctcaccttcatagctcacctctcgctcggaaaaccaagaactatgctccgaataggattgtggaaattcacactgccaccctcttccacctccgtttggcatgcttgcgacccaatggacctytccccaagaccccgacagcggctagtttagstcaattctctcatcttggtgtgtarctccagtgtgaccaagtttcataacaaattstttcmtagttacmccacatggattttccaatgtcattttaaagccaggwtgtagartcccdccagttcaggaccrcccagaggggcgcctcccctccacctttactaaggcgaaaaccgacactgtatgcaatttagtacttcagagctcaaagaaaaaaaaaaaaaraaaaaaaaagaaaaaagaaaaactgcatgcccaatgttatgcaaagagattcgagcatgaaataaattttgtaacatggwwwmaaaaaaaaaaaaaaaaaaaaaaaaaaaaaaaaaaaaaaa

SEQ ID NO: 2153 - DNA, 7020 bp, Rattus norvegicus
  misc_feature (71)..(71): n is a, c, g, or t
gaaaccgtccctctttttcatacttcccatagggcatttgtagaattagtgacctactgcatgtctgtccncaggacggggaaagacaggcagctccwcagcctcctcccacccctcagcytgaaaactcaggtgcaaccaagtgttcggctctgtgcgcctcgcttcagagcatcccgcttgagaggagccaccttctagtaagagtgggcagacacgggtacgtgcrtcaaacatacatctcaatatttctcaagcagcaaacgggggtcgcagtcttggctcttaggaaactacttaacttccacagacgttcttaagatgtgtcgacagtattgcgtcacccgctgctgtcccgggcttgaacagacgktgtttgktttgcctgcataggcaaagctggktcttggtgactggacttktgcatgtgcccactgtttcgtcccgtccacggccaggratctgggcagggcagtcacacccatagcccggcacctacgaggttgtacttaacacaatcagatggggttcacggcaatataacagttawtgaacttggagtttaaattgtsyacatttttaaattgtargatttttactgtatmttgamgcttagtgtgattcaataaattgcttgtaatttaaaaactawwwaawawwmaammwammtmtagttatwtatttdwwwwaawmwmmrwwrmwawrwttattccttgttttttccatgtgtgggtttggcccactgatgtagatctctgagctccccacagtcctaagggcatgggatggttctcaggggaccatagagtctgcctgtgtggctgtgggttctgtaatccaagcctttctacttactgaggagttctagtgagatctggcatgtaaggatttggccttggcccaggccccaaatgctactcccagagattacggctggcctttccggctgggaaatggcttatttgctgagacgacccatgttcagtttctaaaacccatgatgtttgaaaatgaaaaggtcaggtagagtggagcctgtgtgcatcgtccagttcgggggaagcagaggcagcagacccttggggctcactggcccgcctagcagactaagccagatccaggccagtgagagatcctgcctcaaaaccaacaaagtggtgcacctgagaacaactgatgttgaacactttgctggttcacatccgttggcacacaacatgcgcgtgcacacacacacacacacacacacacacacacacacacacacacaccaaagcctttcactgggtttggtatggtacattcctttaataccagcacctgggatgctaaggcaggaggattgctgtgtgttcaaaaccagcccaagatatggtacaaatgaggtcctgtctcaaaaaacagttgtatgcagtatgggggcatctcagctctgacccctctctccagttctttcactgaagtccaagtgacatgagggaggtgacagctttctaccagaaccactaaccacatggctgtgtcaccagcctgagacccaagcctgctgaacagagaactcacccagagttatgcagagtcctggctgcgttttgacttgtcctattagcccatggcgggaaaaactactattcgttgagcagagtgacccttaattcccagagtaagaggctgaggcttggctgtgaagtttctgtctcttaaaaaaacaaaaaaacaaaagccagggatgtagttagcacacatgaagcgctgggtttggtccctggacaccacactgcaccactgtaccgactgcatctgtaactacagcactcactggattaaagaatgttttctacacacgtcagctgagtgtgtgcggtgacccacttgcagttctagcccttgcgaggcagaggagaggctggaggatcaggtggtgctcaagggcagcctgcgtgttacagctggcaaggtggctcacccgttgccaaacctaatgacttgagttcaaccccagcacaaggtggtggaagtagagaagagactcctgcaagttgtcctctgacctatgagcttgcacatacaccaaaaatagacagaaaagggctagcaagaaaacctgttttctgtgagcagcatgacacgtagagaggtcagaggacaacttggaggagtgggttctctccttccattatgtgggccccagactcatcagatctagtgtcaggtccctctacccacgggcatcttactgtcccataaccttttatattgtaatccccgtgtaacctcgggaaaccgaggcaggagctagcaacggataggcagccatgtggttggtgggttagttggttttcccaattgtcagactcttgataactgtgacaccctgccactaggagctctggtgattgagtggcatccccgatacaccccatttcagtgaggggagacaaaaaaggaagcagccgtgttcttgagcccttaggactcgcagagtccgctggaaaaatcagcacgccctagggcaggggaagaggtcttgccagctttgctcagggaggtggctgcggttcctgtaagactgcgcagggtggcttatcctagactctgttctgagtcgtgaccccaaggccaggtgtcctggccaggtgcgatccggagttcccctcccccaaccccgctccggtaagtccccgggaggccgcgggctctcagacccagagggaggaaaggggaggcgggtccgcaccggtcctcagagcgaggggcgtggccgcaggtgccgccctggccccgcccagcgagctcatttacatgcttcccgcagccccgcctgtggtggctaaagcgacgtgtccttgtcccccgtgggcagcctctgcgcgtacggcctcggatccccaggtaaaccaaggggtttggggaactggatgggactgctgggaagggacccagaagcgggaccagaggacctgcagcggtagggggaaaacagatagatggtggcttccactcagactggctggtgccgtccacgtggtagatctgggggctgctgcagggccttggccaccgtcagtctgacctgtcagctgtccgtgtgtgcatgcactgcggttctggttctgataatgtctggacttgtgtcatgtccaggagagctgtaaatatagtggtctaaggggtgctgcttgtctcgggtgacagtgtcgggtggaacccttaagccagggttgggatctggttcctgagtggtttaaacaaattgtcaagtgcctaggctcaggaggttacttgcaacagtaaggagtaaggggacctgaaaagggttcccagatcagtggggagagagggacggtaggttagagaaaagtgggtcagtgtgagttctgccagggctttgggaacacaggtgagacaactctgggttcagtgtgaatggggagcacctaggtgtccaccgtgcaccagtggtcagctgcactggcmtgwgrtsgctaragckrcrtgyccwtgtsccmcgmkgrmwgmctcwgmgsgkmygksytckgawyyycagtcggaagggcctctcccagccaccacctcctgggaaaaacagcctagagctatgaagaccaagaaccggccccctcggcgccggacacccatgcaggacgcagaagccaccccaggagagcagacgcctgacagatcccagtcaggctcaggggcatcagaagtgaccaagggtcttcggagcaggacagcccgtgcgagcggaactcgggcagaggtcagccgccggcgacaggggtccagcagccgcagggagaacagcgttcagaggcggctggagagcaatgagcgagaaagacaacggatgcacaaactgaacaatgctttccaggcgctgcgggaggtcatcccgcatgtgcgggctgacaagaagctctccaagatcgagaccctcacactggccaagaactatatcaagtcgctgacagccaccatacttactatgtccagcagccgcctcccggggctggaggcgccaggtcctgcgccaggccctaaattgtaccagcattaccatcaccagcagcagcaacagcagcagcagcagcaggtggctggggccgtgctcggtgtcaccgaggaccagcctcaaggccacctgcaacgatactctacacagatccacagcttcagagaggggagctagcacgtgcttcgggcttccggtgtgccttggcagtggtgacccggcctgctcatctcagctgtggtccctctaggccacaagccccagactggtaatgacactactgagatcgtggaggggattttgttgttgatgaaagctcttgagaggccccagccgctttgaactcctaatcctcctcacctccatcttctctagggctgggactacatcattatatggtgccacgctggggactaaactaagggctgtctgtgggctaagcaggcaccctaccaactgagctgcattcccagcccaaggctgacttcggtgactccattttcctccaaagtcagctcagacacgaacatgtggcagttttttcctagccacccaaaggacaagggagtgatctgggccttcgaggtatatcaaggcccaaagctccagagaaagcctacctgtccttactgccttttgacaaagggtgggcagggtgggagagttcttgccttccttatgattcatgtgtggccggtgagggatgattccagggaaaaccttacttacaaatgtccctgctactgctgagcctaaggtccgtcccatattgtggggctacgggaaattggacccaaagtgccactcaatcccctcagggaatatatggcaaaaccaagtggtgtctcattttataggattgccctgggcccaatttaacaactgaagtcagaaaggcctagccaatcccataggactttaataaggtcggtctctctctctctctctctctctctctctctctctctctctccctccctccctctctctccctcccttcctccctccccccaccccaaaatggaggtcacatgtggatgacctcatacagtgcctggagacttctggaaaagctgcagtgtcctaggctgtggctgaccacgacctaaccctaagatatgagggccctgtgcggagatcaggcagacccttgaggctctgtacaaagagagacttctcgctgtgtcccctctccattacaggggaacccccattcttggtatttcacgttcttcttggttagcccgatgtatggctgccatgtgttccctcacgagccgcttggacttagctcttggtacctttggtgttttctctgaggcagaagctggagtgacaggcatgtccctcccccgaccggctcataaataaggagggctgagtggttggcagcctggctgctcgagcttccgtccccgggcgttcctgccccactggctctgacaggcttcactactttgctgtcagttgttccttggcctcttccttcctcccttgtctctctgcccagaactaacctggagttccttcaggggctcatacctccacccccacctttagaatgacaggagtctcgctatgtagctcaggctggcccgaaactgattttttgaacttgtgcttggtccatcctcctgctccagcccctccctctgcccccaagtgttgtgaacgcaggatagggagagagccctggcacccgaagaaatagataaaggctagattaggcctgggcgcgttggtcccctcatccagtgagacttgatctgtagcactctccagtcctggagagctggtctggacccttcacggatcacactcaggccaggtggcgactaagggcctgtgtgttcctcagggacggctactgggaaaggtcaatagtcagggaattcaccagtgtgagcagaagccaggcacaactccaagttggaaaggcagagacccagatatctaccttgctaggggggacctgcccagtggaacacagaggcctctgccgacagacagtggctggcttccacatgagaccgaggccagagctgggctccttttgtccgaccttgcaggaagcacaggggaaggaagctgtccgcccaaacttctgccctaatgcctggctacagcccagggcctgtccaggttcactgtttggtagggccacaacctcgtggctctttgtcccccgttagctgtccagttctttaactggtgacacaggacctagatgtccctgggccatatcaaagggtctttagggactccagtcccactaggaggctaggacaagtctgtgataccaggaagtcctgttgctctgtctccctgttccaaccagggtgatccttttttggaactggagcataggttgacctctaacttactacgtgggggaggacgatgaacttctgcctttatctgttgtgctggggctgattagaggtaggcattccacatccagtttagacagggctggggcttgaagccagggctcggagcatcctcagtaactactctacacccctagtgtggtctcttctgtcctgctgggtaayggggctgggtttattcaagcccctgggaagggctggagccgcccctccacctgtgcacctaggattgaggcccagtgtggagaaccagcagggcctttatgaagaagaccctggagagactttgtcctaagcctccagatctcaccgacttcacatgggcwcaagcagagaaacctgaagtgcaacctgtcagggaaaagccatgatgaacagcagggcctgcgtcttgcctgtcaccgcggtgaagacgttccttaaattacctggtttttctccccctagtcccctcagagcactaatgaaattgtcagctgtatatcttaaagtgaaaagatttcacggccactgtgctctggtctgaggaacaggtgcctggagacctgcgccttttttaacataaatgactaataaaaatccgccagtcawaaaaaaaaaaaaaaaaaaaaaaaa

SEQ ID NO: 2154 - DNA, 1057 bp, Rattus norvegicus
cggcaacagacgattgttctcagagsswctttgatggcagctatgaggctcaccctgttccgcattgtgtgtctgctgccaggctgcctggccctgccactgtcccaggaagccggagaagtgaccgcacttywgtrskmwcwgkcgcagaattatcttaggaaattttaccttcacgactctaaaacaaagaaggccaccagtgcagtggacaaactgagggaaatgcagaagttcttcggtttgccggagactggaaagctgtccccccgtgtcatggagataatgcagaagcccaggtgtggagtgccagatgttgcagaattctcactaatgccaaacagtcctaagtggcattccwgaactktcrcctwcagrwkmgkstcctwtactacagacttgcctcggttcttagtagatcaaatcgtgaaaagagctctcagaatgtggagtatgcaaatcccactgaacttcaagagggttagttgggggactgcagacatyakaawtsrcttygcwwkkgsagrtmacgsagrcwamttcccatktgatgggccaggaaacactctaggccatgcctttgcaccggggccaggcctcggcggagatgctcactttgacaaggatgagtactgkayrkatksyswggactyaggagtgaacttcctgtttgttgccactcatgaacttggccactctctgggtctgggtcactcttctgttcccagttctgtgatgtaccctacctatcaaggagatcattcagaagacttcagtcttacaaaggacgacattgcaggcatccagaagttatatggwaakarkmacragctktsmyagatgcagacagtttctggaatgagcaaacgcccttcctgagccacacttactcctttcttccttgtactgtggatgggttttgcacatccctctgagggtcattttgatggaatgagtctgacaaatctcaggtaacacgacagacaccagcaataaatgtcatgtgacatcagcaataaatgtcatgtgtgcaaataaaaaaaaaaaaaaaaaaccg

SEQ ID NO: 2155 - DNA, 2010 bp, Rattus norvegicus
cgggccggtgcgagggcgagcgcttgctggcaacaggatgcggtccctgctgctgttcactttctcggcgtgcgtgctgctggcccgggcgctgctggctggcggtgcgagtagtggcggtggggacaccgggccaggcaacaggcgccgggagagagaggcgctggcggctcaaaagatcgaggtgcttgtgctattgccccgggacgattcgtacttgttctcgctggcccgggtgmggccggccatcgagtacgcgctgcgtagcgtggagggcaatggcaccggcaggaagctgctgccgcccggcactcgcttccaggtggcctatgaagactctgactgtggcaaccgtgcgctcttcagtttggtkgaccgcgtggcggcggcgcgssgcgccaagccssacctcatcctgggtccggtgtgcgagtacgctgcggcgcsggtggcccggctggcgtctcactgggacctgccgatgctgtccgcaggagcgctggccgcgggtttccagcacaaggacacggagtactcgcacctcacgcgygtggcgcctgcctacgccaagatgggagagatgatgctcgctctgttccgccaccaccactggagccgcgctgccctgctctacagcgacgacaaactcgagagaaactgctacttcactctcgagggggtccacgaggttttccaggaggagggcttgcacacgtctgcctacaatttcgacgagaccaaagacttggacctssacgacatagygcgctacatccagggcagtgagcgagtggtgatcatgtgtgccagtggtgacaccattcggagaatcatgttggyggygcacagacacggcatgaccagtggagactatgctttcttcaacattgaactcttcaacagttcttcytaysgagatggctcgtggwmkagagrggacaaacacgactttgaagctaagcaagcttactcatccctccaaacagtcaccctgctgaggaccgcgaagcctgagtttgagaagttttccatggaggtgaaaagttctgttgagaaacaagggctcaatgaggaggattacgtgaacatgttcgttgaaggcttccatgatgccatcctcctcyacgttctggctttgcatgaagtgctcagagctggctacagcaagaaggatggggggaaaatcatccagcagacttggaacaggacatttgaaggtatcgccgrgsaggtgtccatagatgctaatggggatcggtatggagacttctctgtggttgccatgactgatacagaagcaggtacccaggaggtcattggtgattactttggaaaagaaggccggttcaaaatgcgatccaatgtcaaatatccttggggctctttgaaattgagaatagatgaaaccagaattgtggagcacaccaacagctctccttgcaaatcatgtggcctakaagaatcagcaktkacaggaattgttgtgggggccctactaggtgcwggtttgctaatggccwkstactttttcaggaagaaatacagaataaccattgagaggcgaaatcaccaagaagaaagcaacattgggaaacatcgagagctgcgggaagattccatcagatcacatttttcggtggcttaaaagaaatgccccccttgctttgtctgcttgagattccttaaagagatagttgaaggmcagacatcaatggaacagaaagggtgttcttggagaattcattcttttaagcagtagtcatttcattttaaattttctttagaagctcaggaatgattattaatcactatctgccttctggtctttcatctcatggcaaacagatataattatataacgtaatcctgttaagtgttctggctgttggaggggcatcggagtagatttatgtctcgaaagtctggagtctccatatcttgattgctttgggggtatttcacacaaggttataaaaatgtggtttttccaaaatgaaatgttttgtagct

SEQ ID NO: 2156 - DNA, 1167 bp, Rattus norvegicus
atggagggcacgccagcagccaactggagtgtcgagttggacctcgggagtggagtgccaccaggggaggagggcaaccgcacggccgggccaccacaacgcaacgaggccctggcgcgcgtggaggtggcggtcctgtgcctcattctgttcctggctctgagtggcaacgcgtgtgtgctgctggcgctgcgcaccacgcgccacaagcactcgcgcctcttctttttcatgaagcacctgagcatcgctgacctggtggtggctgtgtttcaggtgcttccgcagctgctgtgggacatcaccttccgcttctatgggcccgacctgctgtgtcgtctggtcaaatacttgcaggtggtgggcatgttcgcctccacctacctgctgctgctgatgtcgctcgaccgctgtctggccatctgccagccgctgcgctccctgcgccgccgaaccgaccgcctggcggtgctggggacgtggcttggctgcctggtggccagtgctccgcaggtgcacattttctcgctgcgcgaagtggcggacggagyyttcgattgctgggcggtcttcatccaaccctggggacccaaggcctacgtcacatggatcacgctcgccgtctacattgtaccggtcatcgtgctggccgcctgctacggcctcatcagcttcaagatctggcagaatctgagactcaagacggcagcggcggcggcggctgccgaggggaatgacgcggcgggtggagctgggcgtgcggcgttggcacgggtcagtagtgtcaagcttatctccaaggccaaaatccgcacggtgaagatgaccttcatcatcgtactggccttcatcgtgtgctggacacctttcttcttcgtgcagatgtggagcgtttgggacgtcaatgcgcccaaggaagcttctgccttcatcattgccatgctcttggccagcctcaacagctgctgcaacccgtggatctacatgctcttcacaggtcacctcttccacgaactcgtgcagcgcttcttctgctgctctgctcgttacctgaagggcagccggcccggcgagacgagtgtcagcaagaagagcaactcatccacctttgtcctgagccgtcgcagctcaagccagaggagctgctctcagccatcttcagcatga

SEQ ID NO: 2157 - DNA, 7902 bp, Rattus norvegicus
catagctcagccaacctcaaagaagtgcggtggctggccgacctgagtgttctgcgtcaggactgtgtggactggctcgctggaaagcaatctaagttcctactgcttattttgcatgtggagagctcttccacgatctagcctttagccagggaacgtctttcattatgggagtaaaaggaagctaaactataaaatagtcttgctgcgatgttctgggctatctgagatccaaaggtctaaaccggtttcaataagagagtacgatattctaacatcgcaaaagaaaacagataacccaccaagctcacttgcaaccgaagtatgaagcctaaagaattgttaaagcaacatggagacatgaggacgccagccgtgtaggaagctggccttcctgagggatgaagaggatccgctggctcaccccaaaacctgcgacctttgtggtccttgggtgcgtatggatttccgtggcgcagggtaccattctgagcagctgcctaacgtcctgtgtaactaacttgggcaggcagcttgacagcggcacccggtacaatctgagtgaggcatgcatccaaggatgtcagttttggaactctatagatcaggagaagtgtgctttgaagtgtaatgatacatatgtcaccatttgtgagagggagtcctgtgaggtcggctgcagcaacgcggagggtagctacgaagaggaagtgctggacaacacagagcttcctacagcacccttcgcatcttccattggaagtaacggggtgacattacgatggaaccctgccaacatctctggagtaaaatacatcattcagtggaaatatgcccaacttccgggaagctgggcttacacagaaactgtgtctaagctctcatacatggtggaacccctgcatccatttactgaatatatttttcgagtggtttggattttcacagcccagctgcacctttattccccgccaagtcccagttacaggactcatccttatggagttccagaaactgcgcctttcatcacgaacatcgaaagctcgagccctgacactgtggaggtcagctgggctccaccctatttcccaggtggacctattttgggttataatttaaggctgatcagtaaaactcaaaaattagattcagggacacagagaaccagtttccagttttattctactcttccaaacaccacttacaggttttctatcgcagcagtcaatgaagtcggtgaggggccagaagcagaatctatgattaccactccatccccagcagttcaagaagaagaacaatggctctttttatccagaaaaacttctctaagaaagaggtctttgaagtacttagtagacgaagcacattgcctttggtcagatgctatacgtcataatattacaggaatatcagtcaacactcagcaggaagtggtttatttctcagaaggaaccatcatatggatgaagggggctgctaacatgtctgatgtgtctgacctgaggatcttttatcgaggctcagctctagtctcttctatctctgtagactggctttaccaaaggatgtatttcatcatggataatcgggtgcatgtctgtgacttaaagcattgctcaaatcttgaggaaatcactccattctctattgttgcacctcaaaaagttgtggttgattcctacaatgggtatgtcttttatctcctaagagacggcatttatagagtccatcttcctttgccgtctgtcagggacaccaaagctgtgcgtattgtggagagtggcacattaaaggacttcgcagtaaagccgcagtccaagcgaatcatttacttcaatggcaccatgcaagtcttcatgtcgacatttctggatggctcggcattccacagggttctgccgtgggtcccccttgcggatgtgaagagctttgcttgtgaaaacaatgacttcctcatcacagatggcaaggccattttccaacaggactctctgtctttcaatgagttcatcgtgggatgtgacctgagtcacatagaagaatttgggtttggtaacttggtcatctttggctcctccgtccagtcgtaccctctgccaggccatccacaggaggtctcggtgctgtttggttctcgagaggcccttattcagtggaagcctccgattctcgccataggagccagtccttccgcctggcagaactggacttatgaggtcaaagtttcctcccaggacattctggaaaccactcaagttttcttgaacataagcaggactgtgctgaatgtacccaagctgcaaagttctacaaagtacatggtgtctgtgcgagcaagttctcctaaaggcccaggcccatggtcagaaccctcagtgggtactaccttggtaccagccactgagccaccgttcatcatggctgtgaaagaagatgggctttggagcaaaccactcagtagttttggcccaggagagttcctatcctctgacgtaggaaacgtgtcagatatggattggtataacaacagcctctactacagtgacacaaaaggcaatgtgtatgtgcggcctctgaatgggatggatatctcggagaattaccacatatccagcattgcaggagcttgtgccttggcctttgaatggctgggtcactttctctactgggctgggaagacatatgtgattcaaaggcagtctgtgttaacgggacacacagacattgtgactcacgtgaagctgttggtgaatgacatggccgtggatccagttggtggctatctgtactggacgacgctctactcggttgaaagcaccagactcaatggagaaagttctcttgtactacaggctcagccctggctctctggaaaaaaggttattgctctaacattagacctcagcgatgggctcctgtactggctggtgcaggacaatcagtgtattcacctgtacacggctgttctccggggatggagtggtgcggatgctaccatcaccgagtttgcagcctggagtacttctgaaatttcccagaatgcactgatgtactacagcggtagactcttctggatcaatggctttaggatcatcacagcacaggaaataggtcagagaaccagcgtgtctgtttctgagccagggaaattcaatcagtttacgatcatacagacatccctcaagcctctgccagggaacttttcctctactcccacggttatcccagattctgttcaggagtcctcatttcgaattgaaggacacacttcaagtttccgaatcctgtggaatgagccccctgcggtggactggggcatagttttctacagtgtggaatttagtgctcattctaagttcctggctattgaacaacagtctttacctgtttttactgtggaaggactggagccctatgccttatttaatctttctgtcactccttatacctattggggaaaaggtcaaaaaacatctctatcatttcgagcgcctgaatcagttccgtcagcaccagagaaccccagaatatttatattgtcacttggaagatacaccaggaagaatgaagtcgtggtagagtttaggtggaataaacctaagcatgaaaatggagtgctaaccaaatctgaaatcttctaccacatatctaaacaaagtggcacaaataaatcaacggaagactgggtatctgtcagcgttacaccgccggtgatgtcttttcaacttgaagccatgagtcctgggtatattgtttccttccaggttcgagtcttcacctccaaagggccaggaccattttctgatatagtgatgtctaaaacatcagaaatcaagccatgtccatatctcatatctcttcttggcaataagattgagttcttagacatggaccaaaatcaagttgtgtggacattttccctggagggagccgtcagcacagtggggtacacagcggatgatgaaatggggtatttcgctcaaggagatgcactcttccttctgaatttgcacaatcattccagctccaagcttttccaggacgtgctggcttctgacattgcggttattgctgttgactggatcgcaaggcacctctactttgctctgaaagcatcgcaagatggaacacagatattcgatgttgaccttgaacacaaggtgaaatcccccagggaggtgaagatttgcaaaagccatacagcaataatttctttctctatgtatcccctcttaagtcgcctgtattggacagaagtttcagatctgggctaccagatgttctactgcaatattagcagtcacaccttgcatcacgttctacaacccaaggcctcaaaccagcatggaaggagacagtgttcttgtaatgtgacagaatccgagttaagtggggcaatgactgtggacacgtctgatccagacagaccttggatatactttaccaaacagcaagagatctgggccatggatctggaaggatgtcagtgttggaaagtcatcatggtacctgctacccctggaaaaagaatcattagtttaacagtggatggggagtttatatattggatcacaacaatgaaggacgacacagaaatttatcaagcaaagaagggaagtggggccatcctctcccaggtgaaggcccccaggagtaagcatatcttggcttacagttcagctctgcaaccttttccagataaagcatatctgtctgtagcttccaatatggtagaagcaagtatattgaatgccaccaacaccagcctcattctcaagttacctccagtcaagacaaacctcacgtggcatggaattaccactcccacgtcaacatacctggtttactatatggaggctaatagggcaaacagctctgacaggaaacacaacatgttggaatcacaggagaatgtagcccggattgaaggtctgcagccattttcaacatacgtgattcagatagctgtgaagaactattattctgatcctttagaacatctctctctgggaaaagagattcaaggaaaaactaaaagtggagtgcccggggcagtttgtcatatcaatgcaactgtgctgtcggacaccagtcttcttgtattctggacagaatcgcataaaccaaacggacccaaagagttagtccgctatcagttggttatgtcatacctggctccgattcctgagactcctctaagacaggacgaatttccaagcgccaggctttctctacttgtcactaaactctctggtggacaacaatatgtgctgaagatccttgcctgccactcagaggaaatgtggtgtactgagagtcatcctgtcagtgtcaacatgtttgacacaccggagaaaccttctgccttggttccagagaacactagtctgctgttggattggaaggctccgtctaacgctaacctcaccagattttggtttgaactccagaagtggaagtatagtgagttttaccatgtcaaggcttcatgcagccaaggtccagtttatgtctgtaacatcgcaaatctgcagccttacactccttataacatccgagtggtggtggtctatacgacaggagaaaatagctcctcgattcccgagagcttcaagacaaaagctggagtcccaagcaaaccagggattcctaagttactagaagggagtaaaaattcaatccagtgggaaaaagccgaagataacgggaacagattgatgtactacaccctggaggtcagaaaaagcatttcaaatgactcacgggaccagagtttaaggtggacggcggtgtttaatgggtcctgcagtagcatttgcacatggaggtcaaaaaacctaaaaggaactttccagttcagagcagtagcgtcaaatgctattggatttggagaatacagtgaaatcagtgaagatattacattagtggaagatggtttttggataacagaaacaagttttatacttactatcatagttgggatatttctggttgccacagtcccactgacctttgtctggcatagaagcttgaaaaaccacaaagctaccaaggaaggcctctcagttctcaacgacaatgaccaagagttggctgagcttcgaggactggcggctggagtgggcctggccaatgcctgctatgcagtacatactcttccaacccaagaggagattgaaagtcttcccgccttccctcgggagaagctgagcctgcgccttctgttgggaagtggagcttttggagaagtgtacgagggcacagctgtagacatcctaggacggggaagtggagaaatcaaggtggccgtgaagaccctgaagaaaggttcgacagaccaggagaagatcgagttcctgaaggaggcacacctgatgagcaagtttaatcaccccaacattctgaagcagctgggagtctgtctgctgagtgaaccccagtacattatcctggaactgatggaagggggagaccttctaagctatctgcgcaaagcccgagggacaacgttgtctggccctttactcacattggctgacctggtagagctgtgtgtagatatttcaaaaggctgcgtctacttggagcagatgcacttcattcacagggatctggcagctcggaattgccttgtgtctgtgaaagactataccagtcctcgggtagtcaagatcggtgactttggtttggcaagggaaatctataagcatgattattatagaaagagaggggaaggcctgcttcctgtccggtggatggctcctgaaaacttgatggatggaatcttcacttcccagtctgatgtatggtcttttggaattttggtttgggagattttaactcttggtcatcaaccttatccagcgcattccaaccttgatgttttaaactatgtgcaagcaggagggagactggagccaccgagaaactgtcctgatgatctgtggaatttaatgttccgatgttgggcccaagaacctgaccaaagacccactttctataacattcaagaccagcttcagttattcagaaatgtttccttaaacaatgtttctcactgtggacaagcagctcctgctggtggagtcatcaacaaaggctttgaaggtgaagacaatgaaatggccactttgaattcagatgacacgatgccagttgccttgatggaaaccaggaaccaagaaggattaaattatatggtacttgccacaaagtgtagccaaagtgaggatcgttatgagggtcctctaggctctaaggaatctgggttgcatgatctgaagaaagacgagaggcaaccagcagacaaagatttctgccagcaaccacaggtggcttatggctctcctggccactctgaaggcctgaactatgcctgtcttgctcacagtggacatggagatgtgtctgaataatagtatctcataggaaacatagcactgagatgaacactgtattaagttaaaaagaagaaaggtggggtggcagtctagactctgaactgacacagccaagttccaaagttctgatcttggttccaagagccattatgtttcattcagcattctctttaccagtgacgtaaccttcagtggattatcagaggaacctgtgtgtgtgcggaaatcccaggacaaatcctaagtctgggaagaaaacatcactgtctctctcctytraagccctttamttcagagcattgcctgccmtggcaatcttamtaggttcatgcaaggatgtgagtgrgggaggggccggagtctgstgaggaccacctgaactacagattaccttaagaggatgcaggaawcaattactcacacaggaggaagcagcctgtggaccatgaggaatcatctggcacgctattattccaataaaatattccctttaatcatc

SEQ ID NO: 2158 - DNA, 1015 bp, Rattus norvegicus
cttaagaagaagatggaaataaaagcttccttaatgttgcaatatgtcttttgaagtacatccctgcattttcttttttagcatctaaccattcctcccttgtggtccttggtccctcaatcaccctttcccacagcccacccgcctaacatcacagtctctgaaaatgcacagggatgcctggctacctcgccctgccttcagcctcacggggctcagtctgtttttctctttggtgccctcggggcggagcatggaagtcacagtccccaccactcttagtgtcctcaacgggtctgatacccgcctgccctgtaccttcaactcctgctataccgtgaaccacaagcagttctctctgaactggacttaccaggagtgtagcaattgctcagaggagatgttcctccagttccgaatgaagatcatcaacctgaagctggagcggtttggagaccgcgtagagttctcggggaaccccagtaagtacgacgtgtcagtgactctaaagaacgtgcagctagaagacgaaggcatttacaactgctacatcaccaaccctccagaccgccaccgtggccatggcaagatctacctgcaggtccttctwgaagtgcccccagagcgrgackccacggtggcagtcatcgtgggtgcctcagtggggggtttcctgrctgtggtcatmttrgtgctgatggtggtcaaatgtgtgaggaggaaaaaagagcagaagctgagcacggatgacytgaagaccgaagaggaaggcaagacggatggcgagggcaacgcggaagatggcgccaagtaaccggaagcttgccctgaagccccttcctgtgtcctgtctcctctcactctctgccctgtacagtgtgaccctgcctgctctcacttggtgtgcttctcttgaataggaccccaggatcgacctggggcctcccttccaatgcccccactcccataccaaggacgacctccctccccttcatctgaaaaaaaaaaaaaaaaa

SEQ ID NO: 2159 - DNA, 1384 bp, Rattus norvegicus
ccgacttcgtacagcaatcgagtgagcacactgctctttgagcccgagtgcgctgcctaactgcgaagtaccgccgccgtgcccgccccggcgtgggcaccctgtcctgcacagagacacgcgtggtctggcacccggcctgaagctgacagcatggagcccctctctctggcctccacaccaagctggaatgcctcggctgcttccagtggtaaccataactggtcactggtgggctcagcatcgccaatgggagcccgggcagtattagtgcctgtgctctacctgttggtgtgcaccgtgggactgagtggaaatacactggtcatttatgtggtgctgcggcacgccaagatgaagacagttactaacgtgtacatcctgaacctggccgtggctgacgtattatttatgttgggacttcctttcctggccacgcagaacgccgtcgtctcctactggcccttcggctccttcttgtgccgcctggtcatgacactggatggcatcaaccagttcaccagtatcttctgcctgatggtcatgagtgttgaccgctacctggccgtggtccaccctctccgctcagcccggtggcgtcgcccacgggtagccaagatggccagcgcggccgtctgggtcttttcgctgctcatgtctctgccgctcttggtcttcgcggatgtccaggagggctggggcacctgcaacctgagctggccagagcctgtggggctgtggggtgcagccttcatcacctacacgtctgtgttgggcttctttgggcccctgctggtcatctgcttgtgctacctgctcattgtggtcaaggtgaaggctgcaggcatgcgcgtaggctcctcaaggcggaggcgctcggagccgaaggtgactcgcatggtggtggtcgtggtgctggtgtttgtgggctgctggctgcctttcttcattgtcaacatcgtcaacctggccttcacactgcccgaggaacccacatctgccggcctctatttctttgtggtggtcctatcttatgccaatagctgtgccaaccccctgctctacggctttctctcggacaacttccgccagagcttccggaaggttctgtgcctacgtagaggatacggtatggaggatgcggacgccatagagccacggccagacaagagtgggcggcctcaggccacactgcccacacgcagctgcgaggccaatgggctcatgcagaccagcaggatttgaatgcccctgtaacaccctgggggtcctccaggcctccacggtgttgtcttctgggatctgagagtttgctgagatgcattcacccccaggcctacaagttggactcctctcggtggcagtgtgaagacaggacctgcag

SEQ ID NO: 2160 - DNA, 5110 bp, Rattus norvegicus
gaattcccgcccgctgccgccacgccaggacagccagtggctaaggccggcggggcaagcagccctgaggctggcagcagggtctgctcaccaggcggccgcagcagtgccccagccaacacccttcccgcactctaggtgtgcctgagtctccagttgattctcccggagcggagctgcggctcctctcttttggactctgcctctgcctgaaagacccaccatggggacacacgccaggaaaaaggcaagcttgctgctgctggtgctggccacagtggccctggtctcctctccaggatggagttttgcccagggaaccccagctacctttggacccatcttcgaagagcaacccattggcctgctattcccagaggagtctgcagaggatcaggtgacactggcgtgccgtgcccgtgctagccctccagccacctacaggtggaagatgaatggcacagatatgaacctggaacctggctcccgtcaccagctgatggggggcaacctggtcatcatgagccccaccaagacacaggatgctggtgtctaccagtgcctagcctccaacccagtaggcactgtggtcagcaaggaggctgtcctccgctttggctttctacaggaattctccaaggaggagagagaccctgtgaaaacccatgagggctggggagtgatgctgccctgtaacccgcctgcccattacccaggtttgtcctaccgctggytcctcaacgagttccccaacttcatcccaacggatgggcgacacttygtgtcccagactacaggaaacctgtacatcgcccggaccaatgcctcagacctgggcaactactcttgtttggctaccagccacatggacttttccaccaagagtgtcttcagcaaatttgcgcagctcaacctggctgcggaagatccccgacycttcgykcccagtatcaaagctcggttccccccggagacctacgcactagttgggcagcaagtcaccctggagtgctttgcctttgggaacccggttccccggatcaagtggcgcaaagtggatggttccttgtcccctcagtgggccacagctgagcccaccctgcagatccccagcgtgagctttgaagacgagggtacctatgaatgtgaggcagagaactccaagggtcgtgacaccgtccagggacgcatcatcgtgcaagctcagcctgagtggctaaaggtgatctcagacacagaggccgacattggctccaacttacgttggggctgtgcagcagcaggcaaaccccggcccatggtgcgctggctgagaaacggggaacctctggcctcccagaaccgggtggaggtcttggctggggacctgcgattctctaagctgagcctggaggactctggcatgtaccagtgtgtggctgaaaacaagcatggcaccatctatgccagtgctgagctggctgtacaagctctggccccagacttcaggcagaaccctgtgagacggctgatccctgcagctcgaggcggagagatcagcatcctgtgccagcctcgcgcagccccaaaagctacaatactttggagcaagggtactgagattttggggaacagtaccagagtgactgtcacttccgatggcaccttgatcatcagaaacatcagccgatccgatgaaggcaaatatacctgctttgctgagaacttcatgggcaaagccaacagtaccgggatcctgtccgtgcgcgatgcaaccaagatcaccctggctccctccagtgctgacatcaacgtgggtgacaacctgaccctacaatgtcatgcctcgcacgaccccactatggacctcacgttcacctggaccctggatgatttccctattgactttgataagcctggaggtcactaccggagagccagtgcgaaggagaccattggggacctgactatcctcaacgcccacgtacgccatggagggaagtacacatgcatggcccagactgtggtagatggtacatccaaggaggccacagtcctggtccgaggtcccccaggtcccccagggggtgtggtggtgagagacatcggagacaccaccgttcagcttagctggagtcgtggctttgacaaccacagccccattgccaagtacacgctgcaagctcgtactccaccctcggggaaatggaagcaggttcggaccaatcctgtgaatatcgagggtaatgccgagactgcccaggtgctgggtctcatgccttggatggactatgagtttcgggtttcagctagcaacatcttgggcactggggagcccagcgggccctccagcaaaatccgcactaaggaagcagtcccctcagtggcaccatcgggactcagtggagggggaggagcccctggagagctcatcatcaactggactcccgtgtcacgggagtaccagaacggagacggcttcggctacctgctgtccttccgcaggcaaggcagctccagctggcagactgcccgggtgcctggcgctgatgcgcagtacttcgtctacggcaatgacagcatccagccctacacaccctttgaggtcaagatccgaagctacaatcgccggggggatgggcccgagagcctcactgcgttagtgtactcagcagaggaagagcccagggtggcccctgccaaggtctgggccaaggggtcctcatcttcagagatgaacgtgagctgggagcctgtgctacaagacatgaacggcattctcctgggatatgagattcgctactggaaagccggggacaacgaagcagccgctgaccgagtgaggacagcagggctagacaccagtgcccgagtcactggcctgaaccccaacaccaaataccacgtaactgtgagggcctacaaccgggccggcactggacccgctagcccttcagctgatgccatgaccgtgaagcccccgccacggagacctcctggcaacatctcctggactttctcaagctccagtctcagccttaagtgggaccctgtggttcctctccgaaatgaatctacggtcactggctacaagatgctgtatcagaatgatttgcacccaactcctacgctccacctcaccagcaagaactggatagaaataccagtacccgaagacattggccacsctctggtacagattcgamccacagggcctggaggggatgggatccccgcagaagtccacattgtgagaaatggaggcacaagcatgatggtggagagcgccgccgcccgccctgcccatcccggacctgcgttctcctgcatgrtgatattgatgctcgctggmtaccagaagmtctgatmtcaacactgcccrccacgcccaagctggacacccaccctaacagacacagcggctgaccacagctcccyttcgwccaaggtggtccaacactgtgcctgagcgtggttggcttagacacmtactcccaacagtaccctttatgtaggaggtaggatattcctattmtgccacaggatagaaccatgcgaggaaattttctttaagtcaararrmamwrrrmarwgacttccatgataatagtactaggcctaatgcctggaccccttggggtcttggtcgaaaggaacgggcctttgattaagcagatggtcctttggggccacaagtggcactgccatctgagatcagagtaccaggcccagcaggaacatgggcagcagtggggtattgttttccctctatgaagcagagggacctcttctagtcctcacwggagaagcaccatggttggtcccgacacggtcttccatgactccctggcttcctcggtagccaaggacaaggccctgggttactggggatagaagctcaaaagggttgagaggctaccccacccgatggaaaggggcaccagcctaagcccattggccatcctggtggcactgccctctcagccagcactgccaagccaatcctgtcgtcctccagatggaatggtggagtgacagagccacttcaggtggctatgtgactaaagggcttgcctcgaggagttgccttgcctcatcaagatgcttccttcatggaccctccagggtacgggcaggagatgtccatctgaacgctactctcttcccttcagctctgctgcaaacttgtgcctgcctccacctcccacaactgsaggccccagaaatcagctctcawcacagcatccattctttgtcctgggatagagaggcatccgagaagggccagcatcaaagtggccctgcctgcttccaggaatatcctccatcacctggccacacctgctccccagaactgcctggactactctcttcagtccccacaagaaaaagggttaataaggggggggggggtggcctgccttgagttctgggtagttaccagggatagaccagactacgggagctgaagaagccttataacttgacttatccgtaccctacacttaacagacgaggaaatggaggtgcagaagggttagggacttcttgggggtcacatggtctgtaaggacaaggcatggtcagcacagggtctcctccccacctgtgggaggctytatagagagagggaggatgttgagcagtcacagcctgtcctytaggactctggaggactctggaggaggagccctctgcttcaagaggttctggctggtgagatggacaaatgagctccaaccaaggcataggcagattccaggagtcaatggcctggggcagccttctgctgggaactcggcagggagcactgtctggaagcctctcgggcttgctcatttcaagaagaggccaaagcaaggacagagttccttagacgaggaccytgcagcagcacgaccagaaaaccccagtgtccacgccctcagcccacgggggcagcagagcaggcatttcaagatgcacttgccctgctgctccttagsccatttctgtagtttacagttagagctctattttgttatgggtttttaaacttcaarmmwwrmwmwrwwwwtctgggcgggtttatgttatgtatttacccactacaattttttaaagatgtacactcacaaaaaaaaaaaaaaaa

SEQ ID NO: 2161 - DNA, 5270 bp, Rattus norvegicus
gcggccgcgttgacagcgcgcaacgatgaagtagcactggaggtcccttggaaaatgaggccagggtccctgctccagctcactctgctgctcgccctgcccaggagcctctggggcagagggtgtacttctccaccctgcgaatgccaccaggaggacgacttcagagtcacctgcaaggaactccaccaaatccccagcctaccgcccagcacccagactctgaagctcatcgagactcacctgaagaccattcccagtcttgccttttcgagcctgcccaatatttccaggatctatctatccatagatgccactctgcagcgactggagccacattctttctacaatttgagtaaaatgactcacatagaaatccggaacaccagaagcttgacttacatagaccctgatgccttaacagagctccccttgctcaagtttcttggaattttcaatactggacttagaatattccctgacttgaccaaaatttattccacggatgtgttctttatactagaaatcacagacaacccttacatgacgtcagtccctgaaaacgcattccagggactatgcaatgaaaccttgaccctgaaactatacaacaatggatttacttcaatccaaggacatgctttcaatggaacaaagctggatgctgtttacctaaacaagaataaatatctgacagctatagacaaagatgcctttggaggagtatacagtggacccactttgctagacgtgtcttccaccagcgttactgctcttccttccaaaggcctggagcacctcaaagagctgatcgcgaagaacacctggactctcaaaaagctccccctgtccttgagcttcctccacctcactcgggctgacctctcttacccaagtcactgctgtgcttttaagaaccagaagaaaatcaggggaatcctagagtctttgatgtgtaatgagagtagtatccggaacctgcgtcaaagaaagtcagtgaacgtcatgaggggtcccgtctaccaggaatatgaagaaggtctgggtgacaaccatgttgggtacaaacaaaactccaagttccaggagggcccaagcaactctcactattacgtcttctttgaagaacaagaggacgagatcatcggtttcggccaagagctcaaaaatcctcaggaagagactctccaagccttcgacagccactatgactacactgtgtgtggggacaacgaggacatggtgtgtacccccaagtcagacgagtttaacccctgtgaagatatcatgggctacaagttcctgagaatcgtggtatggtttgtcagtccgatggctctcctgggcaacgtctttgtcctgttcgtcctgcttactagccactacaaactgaccgtgccacgcttcctgatgtgcaacctggcctttgcagatttctgcatgggggtttacctgcttctcattgcctccgtagacctgtacacacacactgagtactacaaccacgccattgactggcagacgggccctggatgcaacacggctggtttcttcactgtttttgccagcgagttatcagtgtacacactgacggtcatcaccctggagcgatggtatgccatcaccttcgccatgcgcctggataggaagatccgcctcaggcacgcttataccatcatggcgggggggtgggtttcctgcttccttctcgccttgctcccaatggtgggaataagcagctacgccaaggtcagcatctgcctgccgatggacacagacacccctcttgccctggcgtacatcgcccttgttctcctgctcaacgttgttgcctttgttattgtctgctcctgctatgtgaagatttacatcaccgtccgaaatccccagtacaaccctcgagataaagacaccaagattgccaagaggatggccgtgttgatcttcactgacttcatgtgcatggcgcccatctccttctatgccctgtcagcgcttatgaacaagcctctgatcactgtcactaactccrrrrtcttgttggttcwckwskacccactcaactcctgtgctaacccatttctctatgccattttcaccaaggccttccagagggatgtgttcatcctactcagcaagtttggcctctgcaaacaccaggcccaagcctatcaggcccagagagtctgtcccaacaacaacactggtattcagatccaaaagatcccccaggacacaaggcagagtctccccaatgtgcaagatacctatgaaccgcttggaagctcccacctgactccgaaactacagggacggatctcagaagagtacacgcaaacagccctgtaaaggaagsstacgctagtcatggtgggacttacaaaaggctggtttctagaacatgcactccagttccaggacacgtgaatgcctaggtccacggggtcagagttcatctctagggagtattgcctccaagaagggagagaagctatcggcgtgactgagtcctaggtgatctaaaagtcgtccaatctctctggaagatttgctcgatgcttgcctgtgatgccgggcaacgcgctccactgataaccagctggactgttcccacagctctctactccattctacggagtgttttatatgaaagattcagcaagtggccagtgttcatttacgcgagcagctccacattagctcccctgaggtaaccaaagaaagtctttgttccttaaaaataaaatgccatacttgggaggtggaggcagggggacccagttcatacttaactacccagaaaatyccaagccaacctatgctccaacaatagcactggtattcagatccaaaagatcccccaggacgcaaggyagagtccttctccatctcaagagaccaaaagaaccctgaaacgccaaacataacttgatgtcacataattgcttttattaaactgaaaaaararaaarwmwagttttgagagttctttttttcctttgactctgaaacagttatctcttcaccgggcttgatgagctcgatgtaacccagctgttacacacattggctagagaaactgctaagatttcagcttttgtggctgagcgaactaagaattatcttctcggacaagacatgagccctgggagagatttctaaggagcatatggtgaggacagggcgcacttagtcacctgttgaataagacaactatccccagttaaccgtcagctttgagcaagtccctggacctctaaattctgtagaaatggggagacttgatgccctctcctacttaaaaaaaaccctcagtatatctctccctcaaaagatagtgtctgtgacaaagagaaaaaagcattacttaagtggaatctaattttttttttctaccttgtgaggctgctggctgcttctttttggaaccgggacatgtcaccgaaaacactttttctttatttcattttgatcatgcgtctgagccaatactattgagtggctatacggagccagatcttaattattcatctaattattatattctgtactgctctcaagtccaaaacataacagaacttagagaatctgttactaatacagcctggcttggtagtgtacgcctttaatctcagcactggggaggcagaggctgaatttgaggccagcctggtccaagacagccaggtctacacagagaaaccctgtttcaaagaaaacaaaacaaaatagactaataatggagttaacacgtgactgtgtaggctcacttcaaaacatctttttcttttacttttttttatagctctctgggctcacaccacactaacactgtcaagagagaagtcgtttcacccgacactgccagttccttctatccctgccagtcacatgagacatgtgtgccctgatagtagccttgcttccaacaggaactgtacctacaggtgttccttctaggttgcctgtctccttagctccttaccatattgttacggtgtccccccaagcagatctgccatttgcttctcagtactcatgaaccaaacaggaaagataagggttttgccaccttaagtctgtgaagtagggtttatgggtcacctgacatggctcctatctgactggcctggaactctgtcacagtcacgtaagtgtaggctttcccaggtgctcgcttgtaactactgaaataaataaatgtggtgccctgaggcatccgtttctctcttacgtcacttttggaatgtcacatctggacagataaaatatttcatctcgagtagccgatctaatgctttgaaaaccaagtcctagaagagtgacttcgacaaaattgctagtaaaattcaacttgacagcatgaagtaaagaaacctcctgtagtaagatatatagtatttttttttaatttgtcaatttcttttgaggttaaccttgtatgtgcatgtgttaaaagcaaaaagggaacatctgctgtggcactcaggagagtagccctgcccctccccttggtcatacggtagatctgaccccggatgtgggagttgcaggtgagctggcccggaggacatgaattcagaagagcgggccctgctttgccttctgtgcatgcagtggcatagactagggaaagatgtccttctaccctctcttattacttgtcacctatggcaggcaggagagctgtgcccaaagacatgagagcaggggtatggccctgtccctcactatctgcaacactctggagagcaggccctacaccttgcctgggcagcagggtagagctggccctggttatgggagtcactggtgagccagttctgaaggcaggagaaccagtggactgaccagctcagataccactcagcccagatccagggctttaaattggctcactctaacatctacccatcagtgaactactggagtacatgaagcaggcagtcctacagatccaaaactacacacaggatctccatgatgcacgacaacaacaggatatccaagaagagccctggtgaggttccagcattgatggtggagcagaaggcagagggcttataccagaacaaggactcgctgcaatgaacatttgcaagcaaaagaagtgtggacaaaagggtatactggacactacagcatctgcagtgaggttttgtccctctgttgggacaggaagcatgcgtggaggatggatatgaggggaaaagatgagtggtttggggtacagggtgtaaagttcacaaagaatcaataaaaaattttcg

SEQ ID NO: 2162 - DNA, 3133 bp, Rattus norvegicus
cttttcccagacactttcacgtggggcacaaagaaggctttgaagcagagayttraaatgcctgkgaagatggtcgcgatcttcggagcctcaacggtactttggatactgtttgcagtctctcaagcttttaaaatcgagatctcccctgaatacaaaacgctcgctcagattggagactccatgctcctgacttgcagcaccacaggctgtgagtcgccatcattctcttggagaacccagatagacagtccactaaatgggaaggtgaagacagagggggccaagtccgttctgaccatggaccctgtcagctttgagaatgaacactcttacctgtgcacagcaacatgtaactctgggaaactggaaagaggaatccaagtggacatctactcattccctaaggatccagagattcawttsagtggccccctggaggttgggaagccggtcatggtcaagtgtttggctcctgatgtttacccaattgacagactggagatagaactgttcaagggtgaccgtctcatgaagaaacaggattttgtaraygagatggcaaagaagtctctggaaaccaagagtttggaagtcatctttactcctgtcattgaggatattgaaaaggctcttgtttgccgagctaaattatacattgaccaaactgattctattcccaaagaaagggagactgtcagagaactacaagtctacacctcccccaagaatacagagatctctgtacatccctccacaaggctacatgagggtgctgctgtgacgatgacatgtgccagcgagggtctaccagctcctgagattttctggagcaagaaattagataatggagttctacagctcctctcgggaaatgccaccctcaccttaattgctatgaggatggaagattctggaatctatgtgtgtgaaggagtgaatctggttgggagagacaaaacagaagtggaattaattgttcaagagaaaccatttactgttgacatctcccctggatctcaggtsgctgcwcagrttggrgaytccrtkstyctgacwtgwgcwscwswtggctgtgastckccmtcmttytcttggagaacccagayagacagtccmctmaatgggraggtgargrmwgarggggcyamrtccrywctgacsmtgrrccctgtsrgykttgagratgarcactcttacctgtgcactgtgacctgtcagcgaaggaaactggagaagacaatccaagtggaggtctactcattccctgaagacccagaaattgaaataagtggaccacttgtacacgggagacctgtcactgtcaactgcacggtccctaatgtgtacccctttgaccatctggagattgaactactgaagggggagacaacactgttgaataaatttttaagggaggaaattggcacaaagtctctagagaccaaaagtttggaaatgaccttcatccccaccgctgaagacaccgggaaagctcttgtttgcctcgctaagttacacagcagtcaaatggagtctgaacccaaacaaaggcagagtacacagactctttatgtcaacgttgctccgaaagaacccaccatctgggttagcccctctcctgtcccagaggagggcagtcctgtgaacctgacctgctcaagtgatggttttccaactcccaaaatcctgtggagcagacagctaaagaacggggaactgcagcctctttctcaaaatacaacactctccttcatggctacaaaaatgsamgakkccggcatttatgtatgtgaagggattaatgaggctggaattagcaaaaaatcagttgaactgattatccaaggctcttcgaaggacatacagcttacagtcttcccatctaagagcgtcaaagagggagacactgtcattatctcctgtacttgtggaagtgtgcccgaaatatggataattctgamawakaaagccaagacaggasacatggkgctaaagtctgttaatggstcrtacaccatccgcaaggcacagctgcaggatgccggagtatacgagtgtgaatcgaaaaccgaagtcggctcgcagttgcgaagtttaacacttgatgtgaaaggaaaagaaaataacaaggactatttttcccctgaactccttgcactctactttgcatcctccttggtaatacccgccattgggatgatcatttactttgcaagaaaagccaacatgaaaggatcrtacagtctggtggargcacagaartcaaaagkgtagctaaygtctgaactgttggagaaaagacattatttataaaccccggacccttcatactctttattgcagcactgttccccctccacaaaccaagctatgcattcagacttctcagaacccttctcggcaaagaaggaaaagaagtggccacttgatcccttgctgagtgcaagaagccaactagaaatcttctgctcggcaagtccccattgctgaagagaccggaacagtcccatgacatgtatataaatagcctcagtgtacatatgtaaaataaaatgatgtcattgcgarrwmrwwwararwarwagcactccagatgtaggtcagaacaaaatcaaaacgtgttscttggactgactgttgtaacttcatgcttcttaggaaagtttaatgttggtgttaatgyksaskaggcagctgaccagtgtcacctttttgtactttattttcttcagcctaattttattcctatgcattttattgacaatgatttcatgtttttttttaaagaagccagggttttatatttttataggcaaatggtaaaaaggtcactgggttgactttcaggtactactttcctaattcatggtatactgattaagtagttttctcaactgtacggtacggggacgtgtttcttcatcaggatcttgtataatgactaacatggtttaaatgcaacttcatttgacttataaatactacagtaaagtgaaagtttctgaamawrraaaaawaaaaaaatctcgcggccgcaagcttattccctttagtgagggttaattttagcttggcactggccgtcgttttacaacgtcgtgactgggaaaaccctggcgttacccaactt

SEQ ID NO: 2163 - DNA, 1562 bp, Rattus norvegicus
cacgmksrgggckgmmtcyskgcskcmksmcamgcamtyytytytgmcctawcyctggcctsyaggtctttctttggagctctgtggaagagtgaagctagccgaatcccgcctgtgaacctgccctctgttgaactggctgtccagagcaaccattactgtcatgcgcagaaggattctggaagtcaccccaactccgagaagcagagggcccgacgcaaactctaygtggcctctgccatctgcctggtgttcatgattggagagattattggtgggtacctggcacagagcttagccatcatgaccgacgcggcccacctgctcactgatttcgccagcatgctcattagtctcttctccctctgggtgtcctcccggccagccaccaagaccatgaacttcggctggcagcgagctgagatccttggagccttgctgtctgtactgtctatctgggtggtgaccggggtgctcgtgtacctggctgtacagcggttgatttctggagattatgagatcaaaggggacaccatgttgatcacttcgggctgcgctgtggctgtgaacatcataatggggctggccctccatcagtctggacatggacacagccatgggcacagccatgaggacagcagccagcagcagcagaaccccagtgtccgagctgccttcattcatgtggttggggaccttctacagagtgtgggcgtcctggtggcagcctatattatatacttcaagcccgagtacaagtacgtggaccccatctgcaccttcctcttctccatcctggtcttggggacaacgttaaccatcctgagagatgtgatcttggttctcatggaagggactcccaaaggtgtggacttcacaactgtgaaaaatcttctgctgtccgtggatggtgtggaagcctwacacagcctgcatatctgggcgctgacagtggcccagcccgtgctgtctgtccacatagccattgcccagaatgttgatgcccaggctgtgctgaaggtggctagggaccgcctccaggggaagttcaatttccacaccatgaccatccaaattgagagctactctgaggacatgaagagctgccaggagtgccagggtccctcggaataactccctggccagacaccatctcattggaagtatggccaagacctgagggcagaatagtccgtgtgcagccgggaccccaggatcaagacatggcctggtccaytacaccatgggactctcctaggatggggacatagcagacgaggccccacttctcttycaggactgtgtttaggctggatcctggactaatgttatgctcacaccacagctggagagacactgaggcgcagaaagggattttggggtgtccttgtatragccagggtctctgtctgaaccaaaagttgaacaagatccacgtgtcacgtgactggatagttggagctccctttaaaagaatcggtcamattgataaaagagtttttgaaccggarwmarrrrraarawmwraggatgttttattagaatttgggagaaaaaaaaaa

SEQ ID NO: 2164 - DNA, 2565 bp, Rattus norvegicus
caggctctcaggataactcccagtgtctggcctgatgcttgcctggcgatctctgccttgaatgccaaggtttaagcagaattcagaggactgagaactcttccctgagatttgatcaacctgaagccagttgcagaactgcacagggtcccgatggacctcaaggagagccccagtgagggcagcctgcaaccttccagtatccagatcttcgccaatacctccactctccatggcatccgccacatcttcgtgtatgggccgctgaccatccggcgtgtgctttgggcagtggccttcgtcggatccctgggcctgctgctggtggagagctcggagagggtgtcctactatttctcttatcagcatgttaccaaggtggatgaagtggtggcccagagcctggtcttcccagctgtgaccctctgcaacctcaatggcttccggttctccaggcttaccaccaacgacttgtaccacgctggggagttgctggccctgctggatgtcaacctacagattcccgacccgcatctggcagaccccacggtgctggaggccctccgacagaaggccaacttcaaacactacaaaccgaagcagttcagcatgctggagttcctgcaccgggtaggccatgacctgaaggatatgatgctctactgcaagttcaaggggcaggagtgtgggcatcaagacttcaccacagtgtttacaaaatacgggaagtgttacatgtttaactcaggcgaggatggcaagccgctgctcaccacggtcaagggggggacgggcaacgggctggagatcatgctggacattcagcaagatgagtacctgcccatctggggagagacagaggaaacaacgtttgaagcaggagtgaaggttcagatccacagtcagtctgagccgcctttcatccaagagctgggctttggggtggctccggggttccagaccttcgtggccacacaagagcagaggctcacatatctgcccccaccatggggggagtgccggtcctcagagatgggactcgacttctttcctgtttacagcatcacagcctgtcggattgactgtgagacccgctacatcgtggagaactgtaactgccgcatggtccacatgccaggggacgcccctttctgcacccctgagcagcacaaggagtgtgcagagcctgccctcggtctactggcagaaaaggacagcaattactgtctctgcaggacaccctgcaacctgacacgctacaacaaagagctctccatggtgaagatccccagcaagacgtcagccaagtacttagagaagaaatttaacaaatcggaaaaatatatctcagagaacattcttgttctggacatattttttgaggcgctcaattacgaaacaattgaacagaagaaggcgtatgaagttgctgccttacttggtgacatcggtggtcagatgggactgttcattggtgctagtctcctcacaatactagagctctttgattatatttatgagctgatcaaagagaagctattagacctgcttggcaaagaagaagaggaagggagccacgatgagaacatgagcacctgtgacacaatgccaaaccactctgaaaccatcagccacactgtgaacgtgcccctgcagacagctttgggcaccctggaggagattgcctgctgacacctctcaggcaacgcagcacctccaaacagaccttaaaggcccaagacctaggacaggagacagcaagcgcaggtgggatcgcccctgacgactgaaagaagcagagccccccatatgcacacattgcgaacttctgccaaacctcacctggccacatctgacatgaaccgtcccgggccctgcgtcatgtccctcgcaggaccgatgagtcgcactccggaactgtccaagaactaacctgccatcacatctcactgccagatgtacaaagcacctgcatgctcagacttcttacagcgccacctccacttccgacttgyacgwgrtattttctccgtgcggtttccagggcccactccgctgcccaggcaatgggaccaggttccagcyccaaagtcaccctgagcccagctccggaatcgaaactgcacagtcaagaaggaamccacagaactctctacgtttgatccttgtgttgtttgtgaccgttcttagccttgtcctccaaactggcccaaggggctactgcactaaaggtgaccagtaccaacctccttcttttcccagcacccgtgaaggaggtacagtggcccgggtgaccccagtatttgtccatggagccacattgttctctccctgtgacacagctgtagagtctgattttgttttgttttgttttgtttagggcggggactgtttttgtttgtctatggaagatttgttttgttccgctttgtcttacggtcttcggttttgatgttctaaggttcgawttgggttttccatttttttttttgagtttatttattcgtgcttcgaaccacagtcatattaaaagctggtcttgtgraaaaaaaaaaaaaaaaaaaa

SEQ ID NO: 2165 - DNA, 1762 bp, Rattus norvegicus
gggattagagysaagatggcagctgcggacgagccgaagcccaagaagctcaaggtggaagcgccagaagcgctgagtgaaaatgtgctgtttggaatggggaatcctcttcttgacatctctgctgtggtagacaaagatttccttgataagtattctctgaaaccaaacgaccagatmttggccgaagacaagcacaaggaattgtttgatgaacttgtaaaaaaattcaaagttgaatatcatgccggtgggtccacgcagaattcaatgaaagtggctcagtggatgattcaggagccacacagagcagcaacgttcttcggatgcattgggatagataagttcggggagatcctgaagagcaaagccgcaratgcacacgtggacgcccattactatgagcagaacgagcagcccacaggaacgtgcgctgcatgcatcwccggtggcaaccggtctcttgttgctaacctysstgccgccaattgttataagaaagaaaagcaccttgatctggagaacaactggatgttggtagagaargccagagtttactacatagctggcttctttctcaccgtctccccagagtcagtgttgaaartggctcgctatgctgccgagaacaacaggaccttcactctkaacctgtccgcaccgttmmttagccagttcttcaaggaagccttgatggmmswcrwgscttatgttgacatcctctttggaaatgagacggaggctgccacttttgctagagagcaaggctttgaractaaagacattaaagaaatagccmgaaagacgcaggctcttccaaaggtgaactcgaagaggcagaggaccgtgatcttcacccaagggagagatgacactatagtrgctacaggaaatgatgtcactgctttycctgtctkggatcaaaaccwggaagagatcgttgacaccaatggagctggagatgcatttgtaggagggtttctgtctcagctggtctccaacaagcctctgactgaakgcatccgggccgggcactatgcagcgagcgtcatcattaggcgaactggctgtacttttyctgagaagccaracttccactgayggaagaaaagcaactcaggcwgtggagtggagactgcagagaccacgtmctgagcgttcctgccttgagaaagaataacattatcttctgtctttgcccaccatgattctcattattaccgtagagggctcagtgctactcctaraacctttagtctytcaaaatytgggsaaaaawgtttatttccatagtctgttagwgcctctwaaatgtcasrcasgrrkccmacatttcagtarrmrsywykargttccttttcaattgttyataaattcatcastrtttagtaagtbsattttkttwwatawttctgsywmtaahgcgggkgcaatktaatatgatagaytttttaaagagattaatgctaacgtcattyttgagcyttttawataaaygtgtttaatttggaagcgtgtgtgcacacatgtcawatwtattcctgataattgtcmaataaggtacagaaacgttgasgcmchccacattgccccgcataagctyttccatgtgmtgcggacacccggtggwcttggggggacarctgaytaatcccagctttgsgctgtgctcagattgtaacctctgcctmctcatggtactctgtwatttkawacaaatdaaaaaytgccmcwtaggrrdwwwmaaaaaaaaaaaaaaaaa

SEQ ID NO: 2166 - DNA, 1818 bp, Rattus norvegicus
gaagccctgtctctgtctgcccagggaagtaagaacagcagcactcttggatttggctgcatagaactgtgtcctccaggttatcaggagggcagggctaagtggctgaggtctacgatcctgtcaaggaccttttctgagaaaagtctctaaaagagcatcacaccagaaggaataagcaagtcatgaattctccggactgttgctaccttctaacttctgggcagatgtctgtcaagagctaggtccactggcccatacacatcctgctgaagaagcaacagaagtttccagctgaagcttctctgagacagcatgaaagccaacaataccacgacgagtgccttgtggttgcaaatcacctacrtcaccatggaggctgccattggtctctgtgctgtagtgggcaacatgctggtcatctgggtggtcaagctgaaccgcactctgaggaccaccaccttctatttcatcgtctccctagcactggcwgacattgctgttggggtgctggtcatacccttggccattgccgtcagcctggaggtccagatgcacttctatgcctgccttttcatgtcctgtgtgcttctggtcttcacccaygcttccatcatgtccttgctggccattgctgtagaccgatacctgcgagtcaagctgacagtcagatatagaacggttaccactcaaagaagaatatggctattcctgggcctctgctggctagtgtcctttctggtgggactgacccccatgtttggctggaatagaaaagtgaccttagagctctctcaaaacagctccaccctctcatgccacttccgttycgtggtcggcttggattacatggtcttcttcagcttcatcacctggatcctcatccccctggttgtcatgtgcatcatctatctggacatcttctacatcatccgaaacaaactcagtcaraatctgactggcttcagagagacgcgtgcattttacggtcgggagttcaagaccgctaagtccctgtttctggttctcttcttgtttgccttgtgctggctgcctttgtccatcatcaattttgtttcctactttaatgtgaagataccagagattgcaatgtgcctgggcatcctgttgtcccatgcgaactccatgatgaaccctattgtctacgcctgcaaaaataaaaaagttcaaagaaaccactttgtgatcctcagagcttgcaggctctgtcagacctcggattctttggactcaaaccttgaacagactactgagtagttaccatgacagataaagagccagctcatttaccttcacagttcgcatcggtaaacactataaggacttaacagccattcttgcttacttccactgcagtgggatcatcgggctggttgccacagagctcccttccctcctccctccgctcctccctccactcctccctccgctcctcccttccctcctccctctgctcctccctccagtcttccctccactcctccctcccgccttcatktattttcttgagcttctctcattcaattctgtggaggtctgacatgaaggcaatgcattcctggttaccacagacttcgcccttccttcccagacacaagaagtaatggagtgaaygttgagggagtctcctctcacyaaagaagactctagtggggctggatgtacagaacctgcgttgaaggatccctaggatgttgggaacacagggagtgaattgaatttaaagagggctaaattcacctgtgtgggtgcatttgagcaaataaaagatggcgcccaaaaaaaaaaccggaattc

SEQ ID NO: 2167 - DNA, 2464 bp, Rattus norvegicus
gccatggcggacctggaggccgtgctggccgacgtcagctacctgatggccatggagaagagcaaggcgacgccggccgcgcgcgccagcaagaaggtcgtcctgccggagcccagtatccggagtgtgatgcagaggtatctggcagaaagaaacgaaataacctttgacaagattttcaatcagaaaatcggcttcctgctatttaaagatttctgcttgaatgaaatcggtgaagcggtgcctcaggtgaaattttatgaagagataaaggaatacgagaaactggacaacgaagaagaccggctgcaccggagtcggcagatgtacgacgcctacatcatgagggagcttctgtccagcacacaccaattctcaaagcaagctgtagaacatgtccagagccatctctccaagaagcaggtgacgcctaccctttttcagccgtacatagaagaaatctgcgaaagccttcgaggcgacatcttccaaaagtttatggaaagcgaaaaattcactagattctgtcagtggaagaatgtggaattgaatattcatctgagcatgaacgacttcagtgtgcacaggatcatcggccgaggagggtttggggaagtttacggctgcaggaaagcagacaccgggaaaatgtatgccatgaagtgcttagacaagaagagagtgaagatgaaacagggagagacactggctttgaacgagaggatcatgttgtctctcgtcagcactggggactgtcccttcattgtctgcatgacctatgccttccacacaccagacaaactctgcttcatcctggacctgatgaacgggggcgacatgcactaccacctctcccagcacggggtgttctctgagaaggagatgcgattttatgccagcgagatcatcctgggcctcgagcacatgcacacctgctttgtagtctacagagacctgaagcctgcgaacatcctcctggatgaatatgggcatgtgaggatatcggatcttggcctggcctgcgatttctctaaaaagaagcctcacgccagtgtgggcacccatgggtacatggctcccgaggtgttgcagaaggggacatgctacgacagcagcgccgactggttctccctgggctgcatgctcttcaagctcctgcggggccacagccctttcaggcagcataaaaccaaagacaagcatgagatagaccgcatgaccctgaccgtgaacgtgcagcttccagatgccttctcccctgagctgaggtccctcttggagggtttgctccagcgggatgtgagccagcgactgggctgctacggaggaggggcacgagagttgaaggagcacatcttcttcaagggcatcgactggcagtatgtgtacttacggaagtacccgccacccctaatccctcctcggggagaggtcaatgccgcagacgcctttgatattggctcgtttgatgaagaagataccaaaggcattaagctgttggactgcgaccaggacctctataagaacttcccgctgatgatttctgagcgctggcagcaggaagtagtggagaccatctacgacgccgtcaatgccgaaactgataaaattgaggccaggaagaaggctaaaaataaacagctttgtcaagaagaagattatgccatggggaaggactgcatcatgcacggatacatgctgaagctggggaacccctttctcacacagtggcaaagacgttatttttacctgtttcccaacagactggagtggagaggagagggcgagtctcggcaaaatctactgaccatggaacagatcatgtctgtggaggagacccaaattaaagacagaaaatgcattttactcagggtaaaaggagggaagcagtttgttttgcaatgtgagagtgaccccgagtttgcacagtggctgaaagagctgacgtgcaccttcaacgaggcccagagactgctgcgccgcgcccccaagttcctcaacaaaccacgtgccgccatcctggagttctccaagccaccgctgtgtcacagaaatagcagcggcctctgaaccacagagcagcagggcctgaaggaggccccccccccccggctcttcagccccagcagtggaatggagccacggggaaccgtgtggggctgagacacagtggctctgagcactgggctgctccaggctgaggaggcccacaacaccgggtggcccttcaggaactaggacatccttggggctggcctatccacactcgaaattactgaagaagcagaggcatttttctgtgcaaccctctcactttggtatccatggacccagaacgtaaaatggttcttacctctcaagcttttatgtctgccacattgttttgtcacaagataacacactgaaaaagtattcttaagcaaatagaaacaataggaaaaagattcgggagtcatccgaattc

SEQ ID NO: 2168 - DNA, 1498 bp, Rattus norvegicus
tctagctctccaagctgattatctgggctgcccctgacatttgtccatctcccagggcctctctggagcagccatgaagtccctggtcctgctcctttgttttgctcagctctggagctgccaatcagctccacaaggtgcagggctgggttttcgagaattggcttgtgatgacccggaaacagagcatgtagctttgatagccgtgsactacctcaataaacatcttcttcagggattcaggcagatcttgaatcagattgacaaagtcaaggtgtggtctcggcggcccttcggasaggtgtatgagttggaaattgacacgctggagacaacctgccacgctctggacccaacccccttagcaaattgttctgtgaggcaacaggccgagcatgcggtgsagrgrgactgtgacttccacatcctgaaacaagatggccagttcagggtgctacacgcccagtgtcattccacaccagactctgcagaggacgttcggaagttttgcccacgatgcccaatcctgatccggttcaatgacaccaacgtggtccacactgtcaaaactgccctggctgccttcaatgcacagaataatggwwyctattttaaactggtggagatttcccgagctcaaaatgtgcctttcccggtgtctactctcgtggagtttgtgatagctgcgactgactgtactggtcaggaggtcacagatccagccaaatgcaacctgctggcagaaaagcaatatggcttctgcaaggcgactctcatccacagacttggtggggaagaggtttcagtggcctgcaagttattccagacacagccccagccagccaatgccaaccctgcakgtyctgcacccacagtgggccaagctgcgcctgtagccccaccagctggcccacctgaatycgtggtggtaggacccgtggcagttcctctakgacttycagaccaccgaacccaccatgacctacggsatgccttctctcctgtggcttytgtggagtcggcctcakgagaagttcttcactcacctaaggtgggccagcctggtgacgctggtgctgctggcccartggcccccctgtgcccagggagagtcagatacttcaagatctaggcttgactcagggaagtaaggttttggcaggcaggacatagccaccactgaagtagagggcttgwccactgaccaagcaagtaccacatcatagcttgaattcaggtstmttsattccccagagaaaaggggcagmgagstgatggwtaaatttgttgaaagccagcagcagcaacabtagcasttgtgggstgacagactactgycatttgtkwmwttgcmttctcactgacctcmtacaaagcagttgcaagcgcgactgtgaaaggtgytytcaccaaacttcaatstacccwtaaataaaagtacccgaaggagctttyttaaacaaraaggtwmwrarmmrarwrwrrwwrwraaaaaaaa

SEQ ID NO: 2169 - DNA, 1623 bp, Rattus norvegicus
tcagagtcctgtccttgacacttcagtctccacaagactgagaggaggaaaccctttcctggggctgggtgccatgcagcagcccgtgaattacccatgtccccagatctactgggtagacagcagtgccacttctccttgggctcctccagggtcagttttttcttgtccatcctctgggcctagagggccaggacaaaggagaccaccgcctccaccaccacctccatcaccactaccaccgccttcccaaccacccccgctgcctccactaagccctctaaagaagaaggacaacatagagctgtggctaccggtgatatttttcatggtgctggtggctctggttggaatggggttaggaatgtatcaactctttcatctacagaaggaactggcagaactccgtgagttcaccaaccacagccttagagtatcatcttttgaaaagcaaatagccaaccccagcacaccctctgaaaccaaaaagccaaggagtgtggcccacttaacagggaacccccgctcaaggtccatccctctggaatgggaagacacatatggaactgctttgatctctggagtgaagtataagaaaggcggccttgtgatcaatgaggctgggttgtacttcgtatattccaaagtatacttccggggtcagtcttgcaacagccagcccctaagccacaaggtctatatgaggaactttaagtatcctggggatctggtgctaatggaggagaagaagttgaattactgcactactggccagatatgggcccacagcagctacctaggggcagtatttaatcttaccgttgctgaccatttatatgtcaacatatctcaactctctctgatcaattttgaggaatctaagaccttttttggcttatataagctttaaaggaaaaagcattttagaatgatctattattctttatcatggatgccaggaatattgtcttcaatgagagtcttcttaagaccaattgagccacaaagaccacaaggtccaacaggtcagctacccttcattttctagaggtccatggagtggtccttaatgcctgcatcatgagccagatgggaagaagactgttcctgaggaacataaagttttgggctgctgtgtggcaatgcagaggcaaagwgaaggaactgtctgatgttaaatggccaagagcattttagccattgaagaaaaaaaaaacctttaaactcaccttccagggtgggtctacttgctacctcacaggaggccgtcttttagacacatggttgtggtatgactatacaagggtgagaaaggatgctaggtttcatggataagctagagactgaaaaaagccagtgtcccattggcatcatctttatttttaactgatgttttctgagcccacctttgatgctaacagagaaataagaggggtgtttgaggcacaagtcattctctacatagcatgtgtacctccagtgcaatgatgtctgtgtgtgtttttatgtatgagagtagagcgattctaaagagtcacatgagtacaacgcgtacattacggagtacatattagaaacgtatgtgttacatttgatgctagaatatctgaatgtttcttgcta

SEQ ID NO: 2170 - DNA, 1860 bp, Rattus norvegicus
tttttttttttttgcctattaaaaggtttatttcttccctatgctcagaaacgaagatatggccttgctggtccctcccctgaaatctcatcttcaaggattgggaggcagaaggggacctggcagcgggtgagaaggctgcgagcgagccgcgaacccggcgggtggagggcggcgacggcgcgcgcaccatgggtsamrarsccgggaccagggtcttcaagaagtcgagccctaactgcaagctcaccgtgtacttgggcaagcgtgactttgtggatcacttggacaaagtggatcctgtcgatggtgtggtgcttgtggatcctgactacttgaaggaccgraaagtgtttgtgaccctcacctgtgccttccgctatggccgagaagacctggatgtactgggcctgtctttccgcaaagatctgttcatcgccacctaccaggccttcccccccatgcccaacccacctcggccccccacccgcctacaggaccgactgctgaagaagttgggccagcatgcccaccccttttttttcacaataccccagaatttgccttgctccgtcacaytgcagccaggaccggaggacacagggaaggcctgtggagtwkactttgagattcgagccttctgtgccaaakstatagaagaaaaaarmmamaaaargaactccgtgcggcttatcatcagaaaggtacagtttgctcctgagacacccggcccccagccatcagctgaaaccacacgccacttcctcatgtctgaccggaggtccctgcacctagaggcttccctggacaaagagctgtactaccatggggaacccctcaatgtcaacgtccacgtcaccaacaattctgccaagaccgtcaagaagatcagagtgtctgtgagacagtatgccgacatttgcctcttcagcaccgcgcagtacaagtgtcctgtggctcagcttgaacaagatgaccaggtgtctcccagttccacattctgcaaggtgtacaccataaccccgctgctcagtgacaaccgagagaagcgtggccttgcccttgatgggcaactcaagcacgaagacaccaacctggcttccagcaccattgtgaaggagggagccaacaargaggtgctgggaatcctagtatcctacagggtcaaggtgaagctggtggtgtctcgaggcggggatgtctmcgtggagctacctttcgtcctaatgcaccccaagccccwsgrccacatcaccyttccccgaccccagtcagccccccgggaaatagacatccctgtggataccaacctcattgaattcgataccaactatgccacagacgacgacatcgtgtttgaggactttgcvmggcttmggctgaaggggatgaaggatgacgactgtgatgaycarttctgytaggaagaggggctgggaraggtaggggtgggcaggactgaggtccamtgcccttgcgggtaggagggtcccagcctytcctccttccccgtycgtccacccgagatacacactggacccatcactcgttgaaagtgggcattaatcttttgacttcagctctgccaccccagccctgctccctagggtggcaagctgtgtacacacctaaagttttgggaagggaagggaacactgaaagcaaggagtgaatgtagagaaaaggagtagaaaggacacccatgtttggcctcataccaacccacccccagtcaccacttctgcctcccccgaatycttgaagatgagatttcaggggagggaccagcaaggccayatcttcgtttytgagcatagggaagaaataaaccttttaataggcaaaaaaaaaaaaaaaaaa

SEQ ID NO: 2171 - DNA, 1893 bp, Rattus norvegicus
tgtctcactcagcgagacgcgcggtgcacggtgcttccccggcggacgaccgaccaacccgcgctccggcagagtccttggcgctcgcctgccggcgggacagacagcccgcctctagccgctctctggaccctggccgccccgagcgaagactggagcaaaatgatgcttcaacatccaggccaggtctctgcctcagaagtcagcgcgaccgccatcgtcccctgcctctcacctcctgggtcactggtgtttgaggattttgctaacctgacaccttttgtcaaggaagagctgagattcgccatccagaacaagcacctttgccatcggatgtcctctgcgctggagtcagtcaccatcaacaacagacctctggagatgtcagtcaccaagtctgaggtggcccctgaagaagatgagagaaaaaggaggcggcgggaaagaaacaaaattgctgctgccaagtgtcgaaacaagaaaaaagagaagacagagtgcctgcagaaggagtcagagaaactggagagtgtgaatgccgaactgaaggcccagatcgaggagctgaagaatgagaagcagcatctgatttacatgctcaacctgcaccggcccacgtgtatcgtccgggctcagaacgggcggacgccggaagacgagaggaacctttttatccaacagataaaagaaggaacattgcagagctaagcagaggtggcatgggggcaattggggagtccttactgaatcctccttttccaccccaaaccctgaagccattggaaaactggcttcctgtgcacttctagaatctcagcagccacgagctgttgggtcaggagggcctgcggtgactactgcgttgtcccactctgtccccgagtgaaccgtggagcaggcaggagcatcctttgtctcaccggctccaggatttaggccttaccatccckkccattctcagatgacctagctggccccaggctggggtcccatgcaaagcaggatcgcactaatgggatgcaggcagaagtgtctaccttgacaggtggggtggaccacgtcctccactgcggctgacaacatccctcctagggaagatggagtgagaacattcatcattgaagttgtccaatggccagggtatgctttctagaaactatgctgttctgtcctagactgactgtgcatagggcattcatttctgagcctggtgttgtgctatttagatgtttgtcttgcacaacattggcgtgatttttttycgggagtttcatcagacctgatttccgagagtttgggggtctgccactgtggacmatatcccccaaaagtgtttgggtggccatgtaaactggctgatgaccagctgtgctactctgtgctgaccgaggactgatgcctycttyccctgtacccactgctgaggaarracccsggcacarcagctgtccttggctacaaactgttacaatgtcacagaacgaaggcacaaagtcccgytttcaaaggscgtaggactccacactcagtgacagggcasgragagccaaggattctccsktttcccttccttcccaccaaaaaccacagcccstggagactggtatttgaagccaggagtggggcaaggrargtgtctgcactgtgggatgttaactgcgcttttgtcttgaagctattttgagatgcggtccagagtatttcagctgggaggtccctcccactggccaccagggctctggctactgttaaaattctgatgtttctgtgaaatcctcagtgttcaatccagactcagtagtatattacagttttctgtaagagagaacgttacttatttatcccagtattcctagcctgtcaacgtaataaaatatcagaatgagacctggt

SEQ ID NO: 2172 - DNA, 930 bp, Rattus norvegicus
  misc_feature (379)..(379): n is a, c, g, or t
  misc_feature (396)..(396): n is a, c, g, or t
  misc_feature (400)..(400): n is a, c, g, or t
  misc_feature (402)..(403): n is a, c, g, or t
gaattccaaaatatgtaaggctttcaatttattacagatcacccaagaacataatgatatacatgtagtcagaaaacacgatgtagaaatcatagtgagttgtccagacatggtcagtagattattctttctggcatgctccagtgtcaacactcaataaagagcactaaaatccttccatacaattaagtatcagcgatgtaccatattgcagaaaggggtggctgagcaacagtttgttgatactataagacttccatgctcaacagtcgtagcgttgcactcagcacagctctggtttccatatacaaattttccatctcgagtggttactacaacccaggcacaaatskcaysagsvbragtctgrcawykcdrnvkwvsmwmvygvsrddndssngnngvdtsgrdksdvgkhsgctcggtgtmtggggkatgaggktcctdcaaacccgaggyttbggctcggactystcggaragcatggaytcggscgytggctycatycsaraagctkgtggggccttcsgsaaacgasagaargctgaarargatckgtacttycgagagaagactagagagcasctkgctrccttgaagaagcaccatkaagatgmgattgaccwccattcsrargagatagagcgtytgcmaaaacagatcgrmcggcatwakaagaagatwawatacctwaagaatagtgagcattgrrtgcmcwcagkcwkwctytcwcadagkggccakkatcattccccmcttmtatagagattgktttgaatgaktkatgtttkacykgtkbgctwctwacagatwataaattatcmcmrgvahwhwmaarwrmawaamcatcrtsaacccttttccctcgggggggggcccggtacccaatttggcctatagggagggggattacaattaactgtgccgggg

SEQ ID NO: 2173 - DNA, 7683 bp, Rattus norvegicus
atggcccgctttggagacgagatgccgggccgctacggcgcaggcggaggaggctcagggccggccgccggggtggtcgtgggcgccgcgggcggccgaggagccgggggcagccggcagggcgggcagcccggagcgcagaggatgtacaagcagtcgatggcgcagagagcgcggaccatggccctctacaaccccatccctgtccgccagaactgcctcacggtcaaccgctccctgttcctcttcagtgaagacaacgtggtgagaaaatacgccaaaaagatcacggaatggcctcccttcgagtacatgatcctggccaccatcattgctaactgcatcgtcctggccctggagcagcacctccctgatgatgacaagacacccatgtccgagcggctggatgacacagaaccctatttcattggcatcttctgttttgaggctggaattaagatcgtggctcttggctttgccttccacaaaggctcctacctgaggaatggctggaacgtcatggactttgtcgtggtgctaacaggcatcttggccactgtcgggacggagtttgatctacggacactgagggcggttcgtgtgctgcggccactcaagctggtgtctggaatcccaagtttacaagtcgtcctgaagtcaatcatgaaggcgatgatccctctgctgcagatcggcctcctcctgttttttgcaatccttatttttgcaatcatagggttagaattttatatgggaaaatttcataccacctgctttgaagaggggacagacgacatccagggtgagtcgccagctccgtgtgggacagaggagcctgcccgcacctgccccaacgggaccaaatgtcagccgtactgggaagggcccaacaacggcatcactcagttcgacaacatcctgtttgctgtgctcactgttttccagtgcatcaccatggaaggctggactgatctcctctacaatagcaacgatgcctcagggaacacttggaactggttgtacttcatccccctcatcatcatcggctccttttttatgctgaaccttgtgctgggtgtgctgtctggggagtttgccaaagaaagggaacgtgtagagaaccgaagggcttttctgaagctcagaagacaacagcagattgaacgtgagctcaatggatacatggagtggatctcgaaagcagaagaggtgatcctcgcggaggacgagacagacgtggagcagaggcacccttttgatggagctcttcggagagctactctgaagaaaagcaagacggacctgctcaaccctgaggaggcggaggaccagcttgctgacatcgcgtctgtggggtctcccttcgccagagccagcatcaaaagtgccaagctggagaattcgacttttttccacaaaaaggagagaagaatgcgtttctacatccgccgcatggtcaaaactcaggccttctactggaccgtgctcagtctggtagccctcaacacgctgtggctcgccattgtccactacaaccagcccgagtggctctccgacttcctctactatgcagaattcattttcttaggactctttatgtccgaaatgtttataaaaatgtatgggctcgggacacggccttacttccactcttccttcaactgctttgactgtggggtcatcatcgggagcatctttgaagtcatctgggccgtcatcaaaccgggtacatcckwkggaatcagcgtgttacgagctctcaggttactgcgtattttcaaagtcacaaagtactgggcatctctcagaaacctggttgtctccctcctcaactccatgaaatccatcataagtctgctgttcctcctcttcctcttcattgtcgtctttgccctcttggggatgcagctgtttggtggccagtttaattttgacgaggggactcctcccaccaacttcgacacttttccagcagcaataatgactgtgtttcagatcctgactggcgaggattggaatgaggtcatgtatgatgrgatcaagtctcaggggggcgtgcagggcggcatggtgttctcmatctacttcatcgtcctcaccctcttcgggaactacaccstgctgaacgtgttcwtrgctatcgcggtggacaacctgkccaacgcccaggaactcrccaaggatgarcaagaagaggaagaggcagccaatcagaaactggctstacagaaagccaaggaggtggcagaagtgagtcccctgtctgcagccaacatgtccatagctgtgarggaacagcagaagaaccagaagcctrccaagtcggtgtgggagcagcrcaccagcgagatgcgcaagcagaacctgctggctakccgcgaggcgctgtmcggrgacgcggctgagcgctgscccaccacttacgcgcgcccgctgcggccggacgtgaagacgcacytggaccggccgctcgtggtggacccgcaggagaaccgtaacaacaacaccaacaagagccgtgcgccagaagcgctgcgccaaaccgcgcggccccgcgagagcgcgcgcgaccccgacgcgcggcgcgcctggcccagcagccctgagcgcgcccctggacgagagggcccgtatggccgcgagagcgagccgcaacagcgcgagcacgcgccaccccgcgagcacgtaccctgggacgcggatcctgagcgcgccaaggccggggacgcgccccgccgccacacgcaccggcctgtggccgagggcgagcctcgtcgccaccgcgcgcgccgccggcccggggacgaaccggacgacagaccggagcgcaggccgcgtccccgcgacgccactaggccggcccgcgctgcagacggcgaaggcgatgatggggagcgcaagcggcgacaccgacacgggccgccggcccacgatgacagggagcgcagacaccggcgcagaaaagagagccagggctctggggtccccatgtctggtcccaacctgtccaccaccaggccaatccagcaggatctgggccgccaggacctgccactggctgaggacctggacaacatgaagaacaacaagttggccaccggggagcctgccagtccccacgacagcctgggccacagtggccttccccctagccctgccaagatcgggaacagcaccaaccctggtcccgccttggccaccaatccccagaatgctgccagccgcaggacgcccaacaacccgggcaacccgtccaaccccggcccccccaagactcccgagaacagccttatcgtcaccaaccccagcagcacccagcccaactcagcaaagactgccaggaaacccgagcacatggcggtggagatccccccggcctgcccgcccctcaaccacactgtggtccaagtaaacaaaaacgccaacccagacccactgccaaagaaagaggaagagaagaaggaggaagaggaggcagaccccggggaggatggcccaaagcccatgccgccctacagctccatgttcatcctctccaccaccaacccccttcgccggctgtgccattacatcctgaacctgcgctacttcgagatgtgcatcctcatggtcattgccatgagtagcatcgcgctggccgccgaggacccggtgcagcccaacgcaccccgcaacaacgtgctgcgatattttgactatgttttcacaggagtgtttacctttgagatggtgatcaagatgatcgacctgggcctcgtcctgcatcagggggcctatttccgtgacctgtggaacattctggacttcatagtggtcagtggggccctggtggcctttgccttcactggcaatagcaaaggaaaggacatcaacaccatcaagtccctccgagtcctccgggtgctacgacctctaaagaccatcaagcggctgcctaagttgaaggccgtatttgactgcgtggtgaactcgctcaagaacgtcttcaacatcctcattgtctacatgctcttcatgttcatcttcgccgtggtggccgtgcagctcttcaagggcaaattcttccactgcacggacgagtccaaggagtttgagagagactgtcgaggcaaatacctcctttacgagaagaacgaggtaaaggcgcgggaccgcgagtggaagaaatacgacttccactacgacaacgtgctctgggccctgctcacgctctttacggtgtccacgggagagggctggccacaggtcctcaagcactcagtggatgccacttttgagaaccagggccccagccccgggtaccgcatggaaatgtccatcttctacgtggtctactttgtggtgtttcccttcttctttgtcaatatctttgtggccttgatcatcatcaccttccaggagcagggagacaagatgatggaagaatacagcctagagaaaaatgagagggcctgcatcgactttgccatcagtgccaagccgctgaccaggcacatgccccagaacaagcagagcttccagtatcgaatgtggcagttcgtggtgtccccaccctttgagtacaccatcatggccatgatcgctctcaacaccatcgtgctaatgatgaagttctatggagcctctgtggcctatgaaaacgcccttcgagtgttcaacattgtcttcacctccctcttctctctcgaatgtgtgctcaaagtcatggcttttgggattctgaattatttccgcgatgcctggaacatcttcgactttgtgactgttctgggcagcatsrcagacatcctsgtcaccgagtttggsaataacttcatcaacctgagctttctccgcctcttccgtgctgcccgactcatcaaactcctccgccagggttacaccatccgcattctcytctgractttcgtgcagwctwtcaarsycctmcsyyakgkctgtvyrcygatcsscatkctcytctksatctwtscswkcatckkgatsmaggtgtttggcaacatmgscattgatggrkaagatgaggacagcgatgaggatgagttccaaatcacggagcacaataacttccggaccttcttccaagctctcatgcttmtcwwcyggagckccacaggrgaagcgtggcacaacatcatgctgtcstgcctcagcgggaagccatgcgacaagaactccgggatccaaaaaccrgagtgtrgcaacgagttcgcctatttttactttgtctcgttcatcttcctttgctcatttvtgatgctgaatctctttgttgctgtcatcatggacaasttcgagtacctcacccgagattcctccatcctgggcccccaccacctggatgagtacgtgcgtgtctsggcagastmtgacchtgctgcctgsgsycgcatkcmytaymmggacatgtacagwtkmttgmgaswmatrtcsccsccyctsggcttrggcaagaartgyccksmyagrgtkgcttrcaagaggctcttgcggatggacctacccgtagcggatgacaacaccgttcacttcaactccaccttgatggctctgatccgaaccgccctggatatcaaaatcgcaaagggtggagctgacaagcagcaaatggacgcagagctccgcaargaaatgatggccatttggcccaacctgtctcagaagaccttggatctgctggtcacacctcacaagtccacggacctgacagtgggtaagatctacgcagccatgatgatcatggagtactaccggcagagcaaggccaagaagctgcaggccatgcgagaggagcagaaccggacaccactcatgttccagcgcatggagcctccatcgccaacacaggagggaggacccagccaaaacgcccttccctccactcagctggaccccggaggaggcctgatggctcaagaaagcagcatgaaggagagcccgtcctgggtgacccagcgggcacaggagatgttccagaagactggtacctggagcccagagcgagggccacccatcgacatgcctaacagccagcccaactcccagtctgtggagatgagagaaatgggaactgatggctactcagacagcgaacactacctccccatggaaggacagaccagggccgcctccatgccccgcctcccagcagagaaccagaggagaaggggccggccacgtggaaataacctcagtaccatctctgataccagccccatgaagcgctcagcctccgtgctgggacccaaagcccggcgactggatgactactcactagagcgggtaccacctgaggagaaccaaaggtaccaccaacgccgccgggaccgtggccaccgcacmtctgagcgytmtctggrccgatwcwcbsmyshvsacwcaggcctggkgacrratctgagcatgaccacccaatcgggtgacmtgcccyccaaaratcgsraccaggaccgggrccggcccaaggaccgraagmatsrgccacaccacmaccaccaccatcatcaccatcatcccccggccccggaccgggagcghtacgcacaggagcggccggacaccgsccgggmgcgggcccgggagcagcgytggtcccgmtcgcccagcgagggtcgggagcacgcgacacacagacagkagcagtagttccgtcagtggaagcccagccccctvtacgtccggcaccagcacgccgcggcgcggccgccgccagctcccccagaccccctgcaccccgcggccgcttgtgtcctactcgcccgctccgcgcaggcctgcggcgcgcaggatggcgggtcccccagcgccccctggcggctcgccgcggggttgccgccgtgcgccgcgctggcctgcgcatgcgcctgagggcccgcggccgcgcggtgccgactacaccgagcccgacaksyygygckagccgccagggggcgcgcatgagcccgcgccgcggtcgcccakgactccgcgcgccgcgggctgcgcgtcaccgcgccacggccgcaggctgcccamtggttactacgcggggcacggygcgccayggscgckcacrgsccgcakgggcgcgcacgacgcgtwcagcgagagcgaggacgactggtgytaakccgccccgccccccgcagcgcccgtacgktgcgggcgccaccgcawatgataaacawtaacgtttttaaawwwgaaaaccggggagaaaaacaaaaatarcttcwattgatgagttttatcatctcgattgaatctttcrttttcccggtgaacgaaaccgaggtggctgcgagccggagggacggytgcacgccccacacacttytcagacccacgggagttcttgcgggccacgccaaacttattactgcctgcagagttcaactacaagaaaataacmctaacagtttttawaaggacaaaaaaaamtgattgagaaaacggtttttttttcccctgacatttggtcctgcttgaaataacaaaagmmwmrwgmsraawwmttaccmccmccaccgaccgattcccttgccccttttttttttttttttttttttttttttttttttttttttcctatcttgtttgaaaaacgtgggcttgggactgtgaaatattgcatgacattaaaaagaacaaaaaataataaaaatgaaaaaacttgaatctaaaaaaaaaaaaaaaaacctcgtg

SEQ ID NO: 2174 - DNA, 1510 bp, Rattus norvegicus
agtcccgagcctaaagcctcgcctgcctgcccagtgccaggatggctaccatcacctgcacccgattcacggaagagtaccagctcttcgaggaactgggaaagggagccttctccgtggtgcgcaggtgtgtgaaggtgctggctggccaggagtatgctgccaagattatcaacaccaagaagctsksakccwgagmtsaccwkamkttgkmacsygagkccyscmtctsyyrcttgytgawgsamssyaatatcgtccgactccatgacagcatctccgaggaggggcaccactaccttatcttcgatctggtcactggtggggagctgttcgaagacattgtggcccgggagtattacagtgaggctgatgccagccactgtatccagcagatcctggaggctgtgctacactgtcaccagatgggggtggtgcatcgcgacctgaagcctgagaatctgttgctggcttcgaagctcaagggtgctgcggtgaagctggcagactttggcctggccatagaggttgagggagagcagcaggcatggtttgggttcgcagggacacctggatacctctccccagaagtgctgcggaaggacccatacgggaagcctgtggacctgtgggcctgtggcgtcatcctgtatatcttgctggttgggtatcccccattctgggatgaggaccagcaccgsctgtaccagcagatcaaagctggtgcctacgatttcccatcaccagaatgggacaccgtcaccccggaagccaaggatctgatcaataagatgctgaccatcaacccgtccaaacgcatcacggccgctgaggctctcaagcacccctggatctcgcaccgctccactgtggcctcctgcatgcacagacaggagaccgtggactgcctgaagaagttcaatgccaggaggaaactgaaggsagccatcctcaccactatgctggccaccaggaacttctccggagggaagagtggaggaaacaagaagaatgatggcgtgaaggaatcctctgagagcaccaacaccaccatcgaggatgaagacaccaaagtgcgcaaacaggaaattatcaaagtgacagagcagctgatcgaagccataagcaatggagactttgaatcctacacgaagatgtgcgaccctggaatgacagcctttgaaccggaggccctggggaacctggtcgagggcctggactttcatcgattctattttgaaaacctgtggtcccggaacagcaagcccgtgcacaccaccatcctgaaccctcacatccacctgatgggtgacgagtcagcctgcatcgcctacatccgcatcactcagtacctggatgcgggtggcatcccccgcacggcccagtcagaggagacccgtgtctggcaccgcagggatggaaaatggcagatcgtccacttccacagatctggggcgccctccgtcctgccccattgaaggaccaggccagggtccctgcgctcttgctt

SEQ ID NO: 2175 - DNA, 1768 bp, Rattus norvegicus
ccgctctgcgttctcaccaggctcctcggcaatgccagtccactgtggaggcgactaggtttctgggtgtccttgtctctcctggcatttgtctgaagtggaccgtctgtctgaactaggccggacgctccctgccctgggtaaggaggaaagatgggggtggggtgggggaggagggggccctggggtgagttagtccctgcctattttcatattcattaggactggaggttgccggaggagcccagctgagtttcaagatataaaagcaacttcgggtgccccttctgcagccgggacgtatyamgagkctgggagctgggcagctcctggcgtcgcggggctcgcttcccctttccctcctctytgaccctcctcctcccgcccactgctccctcctccttmtgcgctmtccagcctcggttcgcccgggagagctccgggacagccttccaggattatggagtttctgagcgagaagtttgcccttaagagcccgccgagtaaaaacagtgacttttacatgggcacaggaggcgcgttggagcacgttatggagacgctggacaatgagtccttttatggcaaagcgacggctggcaaatgcgtgcaggccttcgggccgctgccgcgagctgagcatcacgtgcgcctggacaggacctcgccctgtcaggacagcagcgtgaactatgggatcaccaaagtagaaggacagccccttcacaccgagctcaatcgagcaatggacggctgcaacaatctcaggatgtctcctgtgaaggggatgccagagaagagcgaactggatgaacttggggacaaatgcgacagcaatgtatccagcagcaaaaagaggagacaccgaactacgttcaccagtttgcagctagaggaactagagaaggtcttccaaaaaacgcattacccggatgtatatgtcagagaacagcttgcactgagaacggagctcactgaggccagggtccaggtttggtttcaaaatcgaagggccaagtggagaaaaagagaacgttacggccaaatacagcaagctaaaagccacttcgctgccacctacgacatatcagttttaccaaggactgacagctatccacagattcagaacaatttgtgggcaggaaatacaagcggtggttctgtggttacctcatgcatgctaccccgtgacgcgtcctcctgcatgacaccttattctcactcgcctsggacagattccagttacacggggttttcgaaccaccagaatcagttcggccaygtgcccctcaacaattttttcactgactctcttctcactggaactaccaacggacacgcatttgaaacaaagccagagtttgaaaggaggtcttccagtatcgccgtcctgaggatgaaggccaaggagcacacagccaatatttcatgggccatgtaacatacagtactctttwattttccttttcatagcaaagtaaaacattcttatttctcatwtttaaaggatgccacaataagctgctgtgtgtggaagggctaaaggtcaagatagacggtgagaccagcttacgtgaatagttgttattatttaacatttaaatctaagaatggattccctgaaaggactgaataggtttaccatacaccagcctccacaaactctgttttagtagtaagtgtttttttttcccctattgtacaagtcaatgaaatatgatcatgcaacttcttaaaggaataaatgtattaaamaaaaaaaaaaaaa

SEQ ID NO: 2176 - DNA, 1413 bp, Rattus norvegicus
gggcggtaggctgctgatgcagtgttggtgttggtgggatcaaagcttagtgtcctgaggtgcggacgcttggaacggtacgcgaagaaaagtgaccatggacaacaacgaaacctccgtggattcaaaatccattaataattttgaaacaaagactatccatggaagcaagtcgatggactctggaatatatctggacagcagttacaaaatggattaccctgaaatgggcttgtgtataataattaataataagaacttccataaaagcactggaatgtcagctcgcaatggtaccgatgtcgatgcagctaacctcagagagacattcatggccctgaaatacgaagtcaggaataaaaatgaccttactcgtgaagaaattatggaattgatggatagtgtttctaaggaagatcacagcaaaaggagcagttttgtgtgtgtgattctaagtcatggagatgaaggagtaatttttggaacgaacggacctgtggacctgaaaaaactaactagtttcttcagaggcgactactgccggagtctgactggaaagccgaaactcttcatcattcaggcctgccgaggtacagagctggactscggtattgagacagacagtggarctgacgatgatrtrgcatgccagaagawaccagtggrggcsgacttcctgtatgcttactctwccgcacccggttactattcctggagaaattcaagggrcgggtcatggttcatccagtcactttgcgccatgctgaaactgtacgcgcacaagctggaattcatgcacatcmtcactcgtgttaaccggaaggtggccayggaatttgagtccttctccctggacgccactttccaygcaaagaaacagatcccrtgtattgtgtcaatgctcacaaaagaactgtacttttatcactaaaggaatgactgggagtggggtaggggcatgtttctgttttggttttttttttggtttttgktttktgtttttttttttttatttgaatgccaaatgagaaaactgtcagggagactttttttttcccctctcatttaaatcaaatccgatgttccaggtcgtcattgaacaataccactgcctgcaatgcagccacaatacaatacctcagctttgatatcaggtagttgaaatgaaatttaattaggaacaaataaatgtcaataatggtacaaccatcatagaagaaattggaaagtcacactttggtaattagagagatttggtgccactatgaatttgaaattacgaagcagtgatgatcttatacccccycctstagcrkcyrsaatgtcactttagttttcgttaagcataggaacgataatgtcaagtggtatgtcttagaactgatctgtggaaatgaagagttggagcactgt

SEQ ID NO: 2177 - DNA, 3211 bp, Rattus norvegicus
ccgcacgctgaaccggaggaactgcgcctagtcggggcgctgagggaccctccaccgggacgccggcccctccccgggcctctgctcacttgcccccctgcgagcccgtccccctagtcggcctctcggatcggggacgtggggcgagctgagagcaggcccggggtgggtggtcactgtggagaagacgtggctgtcaagatgatagaagtactgacaactgactctcagaaactgctacaccagctgaacaccctgttggaacaggagtccagatgtcagccaaaggtctgtggcctgaaactgattgagtctgcacatgataatggcctcaggatgactgcaagactccgggactttgaagtcaaagatctactgagtctaactcagttctttggcttcgacacagaaacattttcccttgctgtgaatttactggacagattcttgtctaaaatgaaggtacaggcgaagcatctcggctgtgtcggactgagctgcttttatttggctgtgaaatcgattgaagaggaaaggaacgtcccgctggcaactgatttgatccggataagtcagtataggttcacagtttcagacctgatgagaatggaaaagattgtgttggagaaagtgtgctggaaagtcaaagctactactgccttccaatttctgcagctctattactccctcattcgggagaccttgccatttgaaaggagaaacgatctgaattttgaaagactagaagcccaactgaaggcgtgccactgcaggatywtwttttctaaggcaaagccttctgtgctggcgctggcaatcatcgctttggagatccaagcactgaagtatgtggagttaacagaaggagtagaatgtattcagaaacattccaagataagtggccgagatctgaccttctggcaagagcttgtttccaagtgtttaactgaatattcatcaaacaagtgttccaagccgaacggtcagaagttaaaatggatcgtgtctgggcgcactgcacgacaactgaagcacagttattacaggataacccacctcccaacwattcccgaaaccatgggttagttggcaaatctggttgttatcctctgtgtacagaacatttcccagtgagatcgtttttgtgctataacttaaggattgaaatactaccttcaatataaagaatacaggatgarvrcwgkrrakkwarcgtsagtktgtwggkctwsacmkagaatactgggaggcattcactgtgtaccgcagtctgaagagaaatgagtatcaaacctctakacacatgctcatactgctgtcaaaggactagcgtaraaaagagagtcctccaraccggmagtttaaatgtagttactaaaatagcacttcttataacttacatmkmsscccactgtggcttakttaaagttacagaagtccaagcaraacgacaaaagatgtgacccatatatgaasacattttaatctgttcattgattaggagagtgaatatgaacttgcatgatgcccatgttaggtttctggaaactgccggggtatcttaattctctagtattctccctctgtggcagttgggctaatacaaagtaactatacgcatgagaatataaaatcagtctctgatacatacacatttttaccatcaaaatttcttaatcatagcaaagacttacctttttatgattaggaattttttttttaatgtatggcagcacatgcctttaatcccaacactagggaggcagaggcaggtggatctctttgagttcgaagccaggctggtctttacagtgagttccaggacagctggagagctacagaatggagagacgctgtctcaaaaacactcaaaacaaacaaacaaaccataccagtttgtaggcagacttctgttgggttgggtttgtactgtttgcctatgcagtgggattacagcagcagcaacaaaaactgtccctgaagtctttctctgscactgtgrmctgagtttcctatggtacgcgatttactctargaaacctcagcccctcaccacgttagctgttggcaaatggcctcacagttgcggaaagtcccaattctaggcttgggaaagcaatgcttagatttgaattggcccatgaagcattcaaatcaaggctaaagacataaatgtgaaataaaactgtgaaccttcattttaacattgatctcacttcccagatttaatcaatatatacttaggtggtattaaaaatggtaaactgcctaatttaaatctcaaaatttaaactatgaggtttacatcaaagccaacatttcacaaatgtactttttaaggtattaaaagaggtatttaagcagtaaatggtttcttggcacccataaccaagtaatagttaagttagaggtgggwyttttttwttgctatgagaattacatttaaamwwwwrrgtgttttataaaaagcagatttcacaagttttgaaaattgtgacctttactgaaatttgttacctttaatatttcttcyrgagsawaggtwtttayaaaagwrrarytcswcmgrrtkgckgcctcaawctagtcccmykkgwgaraattygkywckactgtctcaataactggaygarrtatcactctgaaaacttgcctattgcactaaagctagtttaggcttgataaaacactccaggaggtttttaccacagactgtttctattaaaactgctgcttctcatgtacaattttgttttaaaaggaaccgagtacatytgcaaaacytaagtcttaagrgacgtcaggaggtacmttcagaattatagsvhmmccatggtagtggggattctccatsctggccttgaatgtttgatcttcactgctgaaatgtgggtagctcctcagsgccctktrkagcctgagtctacctagaatwkctgtarccattttgrcaagtawtggataagaaaaytwtccaktgagaagbtaaaaacaaarcaaaacaaahccaaagaacgggtgtattttattcttaacctttrtaawccwtcactgagaacacttcagttcttcctaacagctgttatgcttcgayytgaaaaaaatactgagtggataaccaactaccatcatgykttgggtacacctttcawtaaarttactraawtgcaaaaaaaaaaaaaaaaaacctttgcggcgctccaacctcgtg

SEQ ID NO: 2178 - DNA, 3362 bp, Rattus norvegicus
gtacgcgggtagcacggcctctggccgtggagcaccatgaagtacctggtgagtgtgggcgcggggccggccaggcgggcgggcggtctggaggacgtttcctgggggccccgagtgtcccgccggccgcagagttaccgggcagctcggcacgtaaacgagtccctccctcggtccgcctttcgagtccccgcagctcacggagctagcgtgacgccctccgcagcccttgggtccgggttgcctgagactcagcccgaggcggtatgcagagggactgagaaaccgagatttgctgagggctgcaaaccggcggcgagccgcgacaagaacgtgctggccaaagccctctatgacaacgtagctgagtctccggatgaactctccttccgaaagggtgacatcatgacagtgctcgagcgggacactcagggcctggatggctggtggctctgctcactgcatgggcgccagggcattgtgcctggtaaccgcctcaagattctggttggcatgtatgacaagaagccagcagcacctggaccaggcccacctgccaccccaccccagccccagcccagccttccccagggcgtccatactccagtgcctccagcttcccagtacagtcccatgctccccactgcataccaaccccaacctgacaatgtgtacctggtacccactcccagcaagactcagcaaggtctctaccaagcccctgggcccaacccacagttccagtcacccccagccaaacaaacatccacattctcaaagcaaacacctcatcactcatttcccagccctgccacagacctttaccaggtgcctccagggcctggaagtccagcccaggacatttaccaggtgccaccttccgctggcacagggcatgacatctaccaagtccctccatctttggacacccgcagctgggagggaacgaagccaccggcaaaggtggtggtacctactcgagtgggacagggctatgtgtacgaggcctcccaggcagaacaggatgagtacgacaccccgcgccacctgctagctccaggttcccaggacatctatgatgtgccccctgttcgaggactgcttcccaaccagtatggccaggaggtatatgacaccccgcctatggcagtcaaaggccccaatggccgagacccgttgttggatgtgtatgacgtgccccctagtgtggagaaaggcctgccgccgtccaaccatcattcggtgtatgatgttcctccttctgtgagcaaggatgtgcctgatggcccactgctgcgtgaggaaacatatgatgtaccccctgccttcgccaaacccaagccttttgatccgacccgacatccattaatcctcgctgcacctcctccggactccccaccagctgaggatgtgtatgatgtgccaccccctgctcctgacctctatgatgtgccccctggtttgcggcggcctggccctggaacactgtatgacgtgcctcgagagcgggtgctccctcctgaggtggctgatgggagtgtaattgatgatggtgtgtatgctgtgcccccaccagccgagcgagaggcgccaacagatggcaagcgcctgtcggcctctagcacgggcagcacacgcagcagccaatcggcgtcttccttggaggtagtggtgccaggtcgggagcccctggagctggaagttgctgtggagaccctggctcggctacagcagggtgtgagcaccaccgtagcccaccttctggacctggtgggcagtgccagtggccccgggggctggcgtagtacctctgagccccaggagcctcccgtgcaggacctgaaagctgcagtggccgcagttcatggggcagtacatgagctcctggagtttgcccgcagtgcagtgagcagtgccactcacacttctgaccgcactttgcacgccaagcttagccggcagctacagaagatggaggatgtgtaccagacactggtggtccatggtcaggtccttgacagtggccggggaggtccaggattcactctggacgacctggaccgcctggtggcctgctcacgggctgtgcccgaggatgccaagcagctggcctcctttttgcatggtaatgcctcgctgcttttcagacggaccaaagcccctggccccgggcctgagggcagcagctccctgcacctcaaccccaccgataaagccagcagcatccagtcacgccctctaccctcacctccaaagttcacctcccaggactctccggatggccagtatgagaacagtgaagggggttggatggaggactatgactacgttcatctgcaggggaaggaggaatttgagaagacccagaaggaactgctggaaaagggcaacatcgtgcgacagggaaaaggccaactggagctgcagcagctgaaacagtttgagcgactggagcaggaggtgtctcgtcccatagaccatgacctggccaactggacaccagcccagccccttgtgccggggcggacagggggactggggccttcagaccgacagctgctgctcttctacttggagcagtgtgaggccaacctgaccacactgacagatgcggtggacgccttcttcaccgcagtggccaccaaccagccacccaagatctttgtggcacacagcaagtttgtcattcttagtgcacacaagcttgtgttcattggggacacactgtcacggcaggcaaaggcagctgatgtgcgaagcaaagtgacccactacagcaatctgctgtgtgacctcctgcgtggcatcgtggccaccaccaaggccgctgccctgcagtacmcrwssccatctgctgcccaggacatggtagacagggtcaaggagytaggccacagcactcagcagttccsccgtgtcctgggccagctggctgccgcctgaaagcagaagaytggsytgtgagsctggggagtgggtagcggtggtgtgagytacccrgrcgmkbgtcttgaastggakatcctgcaggtttggkgacagstaaccccagctctgctttggrcytrgtgccctmaactgtvcagggatttktacatatttatatcaaggcaggatgcagahtgcctcctcggagaggstgaggagccccstcagagtrgaccatgggctgggatcaccagggttggggcacatrggcymcaktccacagggctccytgggacaggaagtacagtgtggtgtacaccthtgcaccaagaaaacctaaagaactatttttcactrktgattttttyccawtcayttgwmtaatmgtytacatttaataaaattttaaaawtgrraaaaaaaaaaaaaaaaaa

SEQ ID NO: 2179 - DNA, 1841 bp, Rattus norvegicus
gagatcggtctctgagcctgaccatccacttactgcaggagaacgaaattcttgacattttggtttatctggtagcttcaaagactgggcagggcaggtctgggcaccaggaagagctggtgctcctgccctgtgcacaagaagaaagaaaggtggaagggagatcgaagcagagtgagagagaagctgccactcacaccacaatgaaacctctcttcgtgctgctgctgctgctgctgctcctggacctggcacaggcccaaggggtgctgcacagggtgcccctcagaagacatcagtccctccggaagaaactacgggcccaaggccagctctcagacttctggagatctcataacttggacatgatcgaattcagcgagtcctgtaatgtggataagggtatcaatgagcccctcatcaactacctggatatggaatactttggcaccgtctccatcggctccccatcgcagaacttcaccgtcatctttgacacgggctcatccaacctctgggtcccttctgtgtactgcaccagctcagcatgcaaggcacacccggtgttccacccatcgcagtccagcacctacatggaggtagggaatcacttctccatccagtatggtactgggagcctgacaggaatcattggagctgaccaagtctctgtggaagggttgactgtggaaggccagcaatttggagaaagtgtcaaggagcctggtcagacctttgtgaatgcggagtttgacgggattctgggcctgggatacccctcattggctgttggaggagtgaccccagtgtttgataacatgatggcccagaaccttgtggctctgcctatgttttctgtctacttgagcagtgacccacaaggtggctcaggcagtgaactgactttcggaggctatgacccctctcatttctctgggagcctcaattggatcccagtcaccaagcaaggctactggcagattgccctggatggaatccaggtgggagacactgtgatgttctgctctgagggctgccaggccatagtggacacagggacctccctcatcactggcccccccaagaagatcaaacagcttcaagaggccattggggccacacccatggatggagaagacttggtggatggaatgcagttctgcggcagtggctttcaaggacttgacattcaacctccggctggacccctctggatcctgggggatgtcttcatccgaaagttttactcagtctttgatcgtggaaataaccaagtgggattggcccccgcagtcccttaaagagggctgtatgccttcatgtggatgtctgatttaacctttgtaactatcaaaactgtcatttcccatgggatgtagctattccaaacagagtaatcagaccaaacaaagcatgagagcccacccagcctcccagtcgctgtacatggacacacgcaccacctctaccatcaccatgatgaaagttctgtctatagtcttcattgcttattgttgacttcctgttatgaaaatctctaaacatagacactagaaataatggtgtgataaatagccacgcagctatgcctcacgtcacaacccatccatgtgtggctcagcccctctattttccatccgtctggttttatgcctctagatttgtaagcaaattctaagtaccatgccgttctatctaatgtctaatagtcttaaaaatcagaatttaaatatgtctcactctctcataaatgtggacctgtttttacagttggtttatctgtatcaggattcaaaccagatctataactggacaaaaaaatcataaactgaattgatttg

SEQ ID NO: 2180 - DNA, 1539 bp, Rattus norvegicus
  misc_feature (1361)..(1361): n is a, c, g, or t
gcgawktsgrctgcgctgcccctgctgtgcgctggggcctggctgctgagtgctggggccaccgctgagctgaccgtgaatgccatagaaaagtttcactttacgtcatggatgaaacagcatcaaaagacgtacagctcgagggagtacagccacaggctgcaggtgtttgccaacaactggaggaagattcaagcccacaaccagaggaaccacacatttaaaatgggattgaaccagttttcagatatgagctttgccgaaataaaacacaaatacctctggtcagagcctcagaattgctcagccaccaaaagtaactacctccgtggtactggcccctacccatcctccatggactggaggaagaaaggaaatgtcgtttcaccagtgaagaaccagggggcctgtggcagctgctggactttctcaaccactggggccctagagtcagctgtkgctattgccagtgggaaaatgatgaccttggctgagcagcagctsgtggattgtgcccagaacttcaacaatcatggctgccaaggaggtctccccagccaggccttcgagtacatcctgtacaacaagggcatcatgggagaggacagctacccttacataggcaagaatggtcagtgcaaattcaacccagaaaaggccgtcgcgttcgtcaagaatgttgtcaacatcacactcaatgatgaggctgcaatggtagaggctgtgsccctatacaatcctgtgagctttgcctttgaggtgactgaagattttatgatgtataaaagtggtgtctactccagtaactcctgtcataaaactccagataaagtaaaccatgcagtcctggctgttggctatggagamcagaatggaytactctactggattgtgaaaaactcttggggctccaactgggggaacaatgggtacttcctcattgagcgtggaaagaacatgtgtggscwggctkyswgtrcmtcytacmcmakscmtcaggdakaagcyacssytrcayagrswacwkcytggcagacaaagggaggaactggtcctacgatgagaatgccgccctggagaaagttgttcagaaatycacccagaggscctctcactcckgaskhkrgamgcctaaagacagtmaggaaraacttgaccagcaacaagcccgsccrtgtgacgacatcaccagscatacgckttgtktgaatatggtktttaaatgasccamaamcatgtggmsctagaatcttctcttttcagckctcttcatatakggaaagctccgatggstwmmcttttctatgttgtatattcaataaatgcmgtgaacgccyrvmwrrrmwrrrmmwrrhvvvmwnvvmmwavammmwaamaaarmaaamaamamaaaaacccgagggggccggacccatcgcctaaggagtgatacatcatggcgcgttcacgcggatggaaacgtggtccaatataccgagaatccctgcatggaaaaaagcgcaggctccaggccaagaggagcgaatgaaccagaaactc

SEQ ID NO: 2181 - DNA, 5143 bp, Rattus norvegicus
gttgcagacacctctgcgacgccagcttgaaagccgccggcgggctgggatttagctccactttatcaactcccaacccctcacccatctcaaccgcaactccaactctgtgagaaagtcctgactttgcggagccccaggtgcactggagctcagcaaacttgagacacttcccccctgtcctccatcctaatctaagtttaggttctgactgagccaagagtgggtgctaaagcagcgggcctcaggtgtctaggactccgggtccttggggactctcaggttgaagtcttgcagagtctgggcagaggctccagagcttctcccagaccccactgctctacaccgctggaaccgcgcttcatcgcagcatggccaccagccttagtgcagacagtccacagcagctgagctcgctgtctacccaacagaccattcttctgctactcgtttcggtcctggccatcgtgcacttaggccagtggctgctgcgccagtggcgacggaaaccgtggtcctcgcccccgggtccctttccttggccattgatcggaaacgcggcgtctgttggccgggcatcgcacttgtacttcgctcgccttgcgaggcgctatggcgacgtttttcagatccgtctgggcagctgtcccgtggtggtgctgaatggcgagagtgccatccatcaggctctggtgcagcagggcggcgtctttgcggaccggcctcccttcgcctctttccgtgtggtgtctggtggccgcagcctggcgttcggccactactcagagcgctggaaggagcggcgacgtgcagcctatggcacgatgcgtgccttctccacccgccacccgcgcagccgcggtctcctcgagggccacgcgctgggagaggctcgagagttggtggcagtgttggtgcggcgctgcgccggtggcgcctgcctcgatccgacgcagccgatcatagtggcggtggctaatgtcatgagcgctgtatgcttcggctgtcggtacaaccacgacgatgccgagttcctggagctgctcagccacaacgaggagttcgggcgcaccgtgggcgcgggcagcctggtggacgtgatgccctggctgcagctttttcccaacccggtgcgcaccatcttccgcgagttcgagcagatcaaccgcaacttcagcaacttcgtcctggacaagttcctgaggcaccgagaaagcctcgtgcccggggctgctcctcgagacatgatggacgccttcatcctctccgccgaaaagaaggcgactggggaccctggtgacagtccctccgggctggatttggaggatgtgcctgccactattacagacatctttggagccagccaggacaccctttccaccgcgctgctgtggctgctcatcctctttaccagatacccggatgtgcaggcccgmgtgcaggccgagttggaccaggttgtggggagggaccgcctgccctgcatgagtgaccaacccaacttaccatacgtcatggcttttctttatgaatccatgcgattcaccagctttttgcctgtcacccttccacatgccaccactgccaacacctttgttttaggctactacatccccaaaaacacggtagtttttgttaaccagtggtctgtgaatcatgacccagcaaagtggtctaacccagaggactttgatccggcccgcttcctggacaaggacggcttcattaacaaggcactagccagcagcgtgatgatattttcagtgggcaaacgacggtgcatcggcgaggagttgtctaagacgcttctgtttctcttcatctccatcctcgctcatcagtgcaatttcaaggctaaccaaaacgagccctcaaacatgagtttcagttacggcctgagcattaagcccaagtcgtttaaaatccatgtgtctctcagagagtccatgaagctccttgatagtgctgtcgagaagctgcaagctgaggaagcttgccagtgagagagggagaggccggaggtaactgaaatgttcaaagaaarccatctcattaactggagaggaaaacacagattttattttctccagcttcattttggcctcagttctcaagaatgagcggmaaccaagtggcctgaaggtgaggcgggcttaccaattcatggstcctcaccggccagcagctggagatcctgaagtattttgaaattgaagagtaawagggkccaaggratttgcawacygttcccccctcacccccattaaacacatgcacacaaatcagcatgtgtgtacagctatccaacaaaatatttcagtaactctgcctttttgggtcgatttgaaagggaacttctattgcagaaattggccccataggaaaccacagtaagcagaggcttaggatatatatatatatatatatatattcaagattcaaagaagtgatttaagtgtaaaatataaagagcagaaatttaccaagagacaaatgagcactcccttgtggccctggacgaggttttctttctgcctgtagatgtgcctcccactctagaacggaccataaagccgttttgctccccctcaatttatggctagtttaataaccacagtaggttttagagattagtgaatccaaaggtaaattgtttgaaaggcaaaaggattttgtaagttaaaactgtatgtcattcagctgttcaaacgaagcattccagttatgagggagaaaaaggtttgccagtctaacgtaagctttcaactttgggatcgtaacaaactgatctgagtaataagtcggataaagtaaaaaataaaaaagcctcatgtcaccaaatagcattcaataaattttgcataattattcacaagcatcatatgaatattaactatttgacaggaaagcacttgaataatacatttcttatgtcatcttgcaaaccaaaaagtataatcagttgggtgaaatttgcccaaatccaggaaacgatcctgacaaaatcgatctgattaatatcagggaagcaagtaacaggacgatcctttcctttcttatttacagcccctacacgagacaaatctcaaaactaaaccagcaaaaccatgctctgatctggtaattgtagttacaacgcacttttcttttggaattgacccctttcggttgcgttaagattccaaactcttggctggctctgattttaaattagtttaaaatccaccttgattattttgtttcggttgaagctggagaaagtatggttattatctcacagaaggtgagacacctaacctttatctaaggacaaatgtcaaaggcaacaatcaatcaaacaaacaaacaaagccatgagtgctctgggtgttcttattagacgccctctgacaagaaactcagtaccactggtagttggtagtttctttttatgtgctattactatggttgttgtaggtgttttttaaattgagtattaaggtctgcggttttgtgtttttttttaagtcagaatctgaagattgtcttgggaggttgtttagcgactgcttggggagacagcagagacggctaaaattggctcttatttaggatggcagactgagcagccgccttcctggtagctgagagaggagaaatatatgtatttggattgtgtaaacaatccgaaacctgttaagaagggttggatgagtggaaaagtagggacagggcgcgtggggggtttcccatttctgttttcactgcaatttagacggaacaaaagaagcccacggcactcagagagcttatggttggctctgtttcattaggcttcttggaattttcctatcaaaattgcaaaggaaggagtgtgtgatattcttgtgtgcagaggccagaagctgacagacagagagtgcatgagcaggagagaaatgtttaaatggtccccattcactccaaattagtctcttgacctgtaacatttgaggcatgatgtttagaaaaaaaggagtttcaagggtcaggtcttaccttcaagtgtctcttaagactggctggagaccaagccctcaccctctctctcccccatccacatctattttgtagttggagattgaattataaaaaatataatgtaatccttatttaaatttctcacaacagaaccccttgaatgtgaaacacaggttgtgtcagtattttcgaggccttgatttcaactacaaaaattaactctgtaaacatttttaagtttttcagacattttaaaagcatgcacctcagtaaggtcgggacagtgatttgagcctccatggcctctttactatgagaaatttgtaagagtgaaaagtcttcatgaaccaatctggactcctcattaagccaaccagacccagatgttttgtgaacgtaggggtcatgttcgtctgatgctttcagcaaaggggaaagaagggggctactttgtatatatttagacccagtgaaaggaaggaggatwcaagtcaggaaagagtaacaattgtcatattcggaagctaatagattactggcttagttggaaagcctgccttattctgctacagagggatttcttttgctggtcaccatcttcatcagagtatccacctcctgtcagggcaggcaaaaagtatktttttwttaaatgtctcccttgcacagtaaagcttggactatgtcagaacgttgcttttttttttaaaacaaaaaatatgcctcaggtgtgttttatgaattactcaaaagagttcatgccccagaacttagcctgtacctgtgaaatattatcatgccccttatgtattcrcaccagggctgtgstagattaaatagagatcatcaccatggtatgckaattactgtttttagcagtgacacagttgtgtgacagaaggtgtatgttaccaggtgattataacccagarataattccctatttaacctctwmwwrwrmwwwwgtactttgtcaygtatrttcttaatctgtatatasctgatacagtgcacacagatcctctgcacacagaattaactaatgtgatataccaacatttaacatgctctgtcttcactgtmtatcatgaaacagtgtcacstaaacaatvwmgwscactgtcataaaaaaaaaaaaaaaaaa

SEQ ID NO: 2182 - DNA, 1391 bp, Rattus norvegicus
gacagagcctccacgactcccagcctcctcctccccgccgccgccgccaccgccgccgcctcctcttcctcctcctcctccctcgctcccacagccatgtctgcttagaccagagcagctccacagccaattctggcagcagcggmcgcctcaataggacagccaccgcccgggagctatgacaggagtgtttgacagaagagtcccaagcatccgatccggcgacttccaagctccgttcccgacgtccgccgccatgcaccacccgtctcaggaatcgccaactttgccggagtcctcggccaccgattctgactactacagtcccgcgggggccgcccctcatggctactgctctcctacctctgcttcttacsgcaaagcgctcaacccataccagtaccagtatcacagcgtgaacggctccgcagccggctacccggccaaggcttatgcggactacggctacgccagccyckwscacsartwckkaggcgcctacaaccgagtcccgagtgccaccagccagccagagaaagaagtggccgagccagaggtgaggatggtgaatggtaaaccaaagaaagttcgtaaacccaggactatttattccagctttcagctggccgctttacagagaaggtttcagaagactcagtacctcgccctgccagaacgcgcggagttggccgcctctctaggactgacgcaaacacaggtgaaaatctggtttcagaacaaaagatccaagatcaagaagatcatgaaaaacggggagatgcccccggagcacagtcccagctccagcgaccctatggcgtgtaactcgccacagtcaccagcggtgtgggagccccagggctcatcccgctctctcagccaccaccctcatgcccaccctmcgacctccaaccagtcccccgcgtccagctacctggagaactcggcttcctggtacccaagtgcagccagctcaatcaattcccacctgccaccgcctggctccytgcagcacccgctggcactggcctccgggacgctttattagatgggctactctctcttgctcagttttgggactacagtgttttsctgttttagaaatcagaaagaaaggaattcatacggggatgtttgaacaatggaaacaaagattcatgtgtaaagctttttttttgcatgtaagttattgcatttcaaaggaccccgcccctttttttacgaaaagaacccttttttgcgcaactgtggacactatcaatggtgccttgaaatctatgacctcaacttttcaaaaagacttttttcaatgttattttaaccgtgtaaataagtgtagatagaggaattaaactgtatattctggataaataaaattatttcgaccatga

SEQ ID NO: 2183 - DNA, 1409 bp, Rattus norvegicus
aatttcctagagtgcagaaattcaagccgtggcgggcggggcggagctggacgctgggggcgggattccggatagcccctgactgcaaatccccaggctcagcgccttgcagagtctcagctagggcgccatggggaacagcagcgctactggtgacggtgggctgttggccgggcgtgggccagagtccttaggtactggcaccggacttgggggcgcgggcgcggcggcgctggtgggaggcgtgctgctcatcggcatggtgttggcagggaactcgctcgtttgcgtgagcgtggcctccgagcgcatcctgcagacacccaccaactacttcatcgtgagcctggcggctgccgacctcctcctcgcggtgctggtgttgcctctctttgtctactccgagggtggcgtgtggctgctgagcccccgcctctgtgacaccctcatggccatggacgtcatgctgtgcaccgcctccatcttcaacctgtgcgccatcagcgtggacaggtttgtggctgtgaccgtgccactgcgctacaaccagcagggtcagtgccagctgctgctcatcgccgccacgtggctgctgtctgccgcggtggctgcgcccgtcgtgtgcggcctcaatgatgtgcccggtcgcgatccaaccgtgtgctgcctggaggaccgcgactacgtggtctactcatccatttgttccttcttcctgccctgtccgctcatgctactgctttactgggccactttccgtggcttgcggcgctgggaggcagcccggcacaccaagcttcacagccgcgcgccgcgccgacccagcggcccgggcccgccggtgtcggaccctactcagggtcccctcttctcagattgtccgcctccctcacccagcctccggacgagccccaccgtctccagcagaccagagtcagacctctctcagagcccctgcagccccgggtgtctgctccctgatgcagcgctcgcgcaaccgcctgcgccgtcttcccgcagaaagagaggcgccaagatcactggaagggagcgcaaggcgatgagagtcctgccggtggtagttggggccttcctgatgtgttggacgcctttcttcgtggtgcacatcacacgggcgctgtgtccggcttgtttcgtgtccccacgcctggtcagtgctgtcacctggctgggctatgtcaacagtgccctcaaccccatcatctacaccatcttcaatgccgagtttcgaagtgtcttccgcaagactcttcgtctccgctgctgaaagaaccgctgatgtcttgaggtcaaggggttccaagcctgtgtgcagagtgcgctggcggctttcgttcgtctgattaaatgaagtctttcctaaccatttatcaacgctgggggctggg

SEQ ID NO: 2184 - DNA, 1686 bp, Rattus norvegicus
cggccgccgcatccaaagtgatccgskgccyccccgtctccgccaggctcgggaccatgaagctgctgccgtcggtggtgctgaagctctttctggccgcagtgttgtccgcgttggtgaccggtgagagtctggagcggcttcggagaggtctggcggcagcaaccagcaaycctgaccctcccactggaaccacaaaccagctgctacccacgggagctgatcgcgctcakgaggtccaggacttggwagggaccgatctggaccttttcaaagttgctttctcctccaagccacaagccctggycaccccaggaaaagaaaagaacgggaaaaagaagaggaaaggcaaggggttaggaaaraagagagatccatgccttaagaaatacaaggactactgcatccacggagagtgcagatacctgaaggagctccgtattccctcgtgccactgcctccctggttaccatggacagaggtgtcatgggctgaccctaccggtagagaaccccctgtacacatatgaccacactaccgtcttggctgtggtggctgtagtactgtcatctgtctgtcttcttgtcatcgtgggacttctcatgttcaggtaccataggcgaggaggttatgacttggaaagtgaggagaaagtgaagttgggcatggctagctcccactgaggaggatctgagctcaaggagccttcagaggatggctacttytgagatggcggttccttacaagttctacagagggaaaatacttcaccagcagccatgaagacttcttcattcattcccagttgctaccctgactgggcctcctgtaattgctctgcaaaaatatcagagcctctaagtgccaaacagactatgccccgctgggatctggatcagaagaaagcaggagcaagtgagcccttcaggccttcctgatcctccaccactgaacccactggtttgtttaaacacttagcttctggattaaagtgtcagctagtttccatatgctccaggatttttggctgaaaaaaaaaaaaraaragassmcksrtgagkggtttatggactggaagagatcaacagagttgagaagctaagtgttcaagtagccacaggggatctgctgtttggaccctccagcacgctggatttgatgagctaactgtgaaatatctcaagcccgagaactcttgagttttgggacttctacccagagggaaaaataacaagtattttgttgttgttgttgtttgtttgtttttaaaatgcctcttaaattatatatttattttattctatgtatgttaatatatttagtttttaacaatctaacaataatatttcaagtgcctagactgttactttgccaatgtcctggcccgcctctcttgcagctcttccacctggctcaatgccacactcccatctgctctgtaacccatctgtagtaatttattgtctgtctacatttcagaagatgcccctgtagcagagtatcccagggtgggttgtgtatggtcggagtgcaaggatggatttgggcagagccactctgtgagttggactgcagtcttgcctaggtgatttttgtctaccgttcgtgttttgaaagcycaargtgctgatgtcaaagtgtaatagatattggtgtttcctcgtgtcctctccctgccaaatctca

SEQ ID NO: 2185 - DNA, 1323 bp, Rattus norvegicus
gamgagcggcgcttcctctgctargctscgagctgtctgtttcttgggccctgtgtataggtgccggccgcccctggcgttcaacaccgcttccaggtgccggccgtgtctgccatggacgactatgcggttttgtccgatactgagctggccgcagtgctacgccagtacaacatcmcgcatgggcctattstgggctccactcgcaagctctacgaaaagaaaatcttcgagtacgagacccagagaaggaggctttcgccccccakytcgtcatcgtcttcawtctcctatcggttctyagacttggattcagcctccgtggactcagacatgtatgatctgcccaaaaaggaggacgccttactttaccagagcaaggactataatgatgactactatgaggagagctatttgactaccaggacatacggggagcccgagtctgtgggcatgtccaagagcttccgccggccagggacctcacttgtagatgctgatgataccttccatcaccaggtgcgtgatgacattttctcttcttcagaagaggaaggcaaggatagggaacgccccatctatggccgagacagtgcctaccagagcatcgcagagtaccgccccatttccaatgtctccaggagctccctgggcttatcatattatcctagatyckscacskcttctgtgtcctcctcttcatcttctccctcttcatggcttacccgacgtgccattcgaccagaaaagcaggcccctactgctgctctgggccaggatcgacaggtcccactctggggccagctgttactcttcctggcctttgctrcctttctgctctttgtttactattccatacaagctsaagaaggcaaccccttctggatggatccckargggtattggtttcagagcagctcttaacaggagttttggctgactgccttagcwgtgtttgctgggggtggggggtaggggcttttttgtgtattctagttagagggtacagggccywkmctacggcagtgcttgtctccacctcatcttgccaaggaagcagcaaatgctggctttccacagcccagtaggccctatgtaccttcctytggagcctcctagccttattgcctctgactmttagggtatgggratctggtggggaggacctcacttcattagaggaaaacttggtggtggcagtggtagttgtcatgcatgcctgtttgttgtcaccttttcagggggtattaacaaggccatcctggctttgctttcgtggacacaataataaacatgtttwtttttwaaaaaaaaaaaaaaaaa

SEQ ID NO: 2186 - DNA, 1429 bp, Rattus norvegicus
agacattacagccatggccatgcaaaaaatctttgcccgagaaatcctggactccaggggcaaccccacagtggaggtggacctgcacacagccaagggtcgattccgagcggctgtgccaagcggagcttccacgggtatctatgaagcactggagctacgagatggagacaaatcacgatacctggggaaaggagtgccgaaggctgtggagcacatcaacaagactctcggccctgctctgctggaaaagaaactaagtgttgtggatcaagaaaaagttgacaaatttatgattgagctggacggaaccgagaataagtccaagtttggggccaatgccatcctgggtgtgtccctggctgtttgtaaggctggagcagctgagaaaggggtccctctctaccgacacattgcagacctcgcagggaatcccgaccttgtacttcccgtgcctgccttcaatgtgatcaacgggggctctcatgctggaaacaagttggccatgcaggagttcatgattctgccagtgggagccaagctctttcaaggaagccagcgcattggcgctgaggtctaccaccacctcaagggggtcatcaaagccaagtatgggaaggatgccaccaatgtgggggacgagggtggctttgcacccaacatcctggagaacawtgagsccctggaactactaaagacagccattcaggcagctggtwmcccagacaaggtgktgattggcatggatgtgscagcatctgaattctatcgcaatgggaagtatgatctggacttcaagtcacctgatgatcctgcgaggcacatcagtggggagaagctcggggagcygtacaagtccttcatcaagaactatcccgtggtctccattgaagacccctttgaccaggatgactgggcaacatggacctcattcctctytggggyggacatccagattgtgggagatgacctgacagtcaccaaccccaagaggattgctcagsytgttgagaagaaggcytgcaattgcctgctgctgaaggtcaaccaratcggytytgtgacagaatcyawcywggcytgtaaahtggcacagtmtaatgsctggggaktgwtggtgavccwccgctytggggagaccgaagacactttcrttgmtgatcttgtggtgggaytctgcacaggacaratcaagactsrtgctccctrccgttcagagcgtytggcaaaatacaaccagyytatgaggattgaggaggytytcggagacaaagctgtctttgctggacgaaagttccgtaatccaaaggccaawtgagaagmtggagattccasgattccacaggacagacacagkcytycaagccyttctccmagaaataaacactgccmhvcadrmwwmaawwamaramamaaaaaaaaaaaaaaa

SEQ ID NO: 2187 - DNA, 648 bp, Rattus norvegicus
atgtggaaatggatactgacacattgtgcctcagcctttccccacctgccgggctgctgttgctgcttcttgttgctcttcttggtgtcttccgtccctgtcacctgccaagctcttggtcaggacatggtgtcaccggaggctaccaactcctcttcctcctcctcttcctcctcctcgtcctcttccttctcctctccttccagcgcggggaggcatgtgcgaagctacaatcacctccagggagatgtccgctggagaaagctgttctccttcaccaagtactttctcaagattgaaaagaacggcaaggtcagcgggaccaagaaggaaaactgtccgtacagtatcctagagataacatcagtggaaatcggagttgttgccgtcaaagccattaacagcaactattacttagccatgaacaagaaggggaaactctatggctcaaaagaatttaacaatgactgtaaactgaaagagaggatagaggaaaatggatacaacacctatgcatcttttaactggcagcacaacggcaggcaaatgtatgtggcattgaatggaaaaggagctcccaggagaggacaaaaaacaagaaggaaaaacacctccgctcacttcctccccatggtggtccactcatag

SEQ ID NO: 2188 - DNA, 984 bp, Rattus norvegicus
atgtaccaggattatcccgggaactttgacacctcgtcccggggcagcagtggctctcctgcgcacgccgagtcctactccagcggtggcggcggccagcasamgwkscgggtasatatgcctggctcaggcagtgccttcatccccacaatcaacgccatcaccacyrcmwgycmkgwcykgyrgtggatggtacagcccayagtgattacctccatgtccaacccctatccgcgctcgcacccctacagccccctgccargcttgssatcagtccctgggcacatggctctccccaraccaggagtgatcaagaccattggtaccaccgtgggccgcagaagragagatgagcagstrtstcccgaagaggaggagaagcgtcgaatccggmgrgagagaaacaagctggccgctgccaagtgtcggaaccgtcgacgtgagctgacggagaagctgcagrcggagacagaggagctggaggaggagaagtccggtctgcagaaagaaatcgctgagctgcagaaggagaaggagaagctggagttcatgctggtggctcacggccctgtgtgcaaaatcagtcctgaggaacgccgatctycccccacctccgggstacagtccttacgcggtacgggcagtgctgtcggccctgtggtggtgaaacaggagcctcctgaagaggacagcccctcttcctcagcagggatggacaagacccagcgctctgtcatcaagcccattagcattgctgggggtggtttctacggggaagagcctctgcacacccccatcgtggtgacctccacacctgccatcactccgggcacttcaaaccttgtcttcacctaccccagtgtcctggagcaggagtcgcctgcgtcgccctccgagtcctgttccaaggctcaccgcagaagcagtagcagtggggaccagtcatcagactccttgaactcccccactctgctggctctgtaa

SEQ ID NO: 2189 - DNA, 1944 bp, Rattus norvegicus
tcccgaatgacctgccgccgactaagttgcattccttgaatcttcgcagaaagacaattctttcatcagagttagtaatgtggacagtacaaaatcgagagagtttggggcttctctcttttcctgtgatggttgccatggtttgttgtgcacacagctccaatgaacccagcaacatgtcatacgtgaaagagacagtggaccgactgctcaaaggatatgacattcgcttgcggccagactttggagggcccccggtggacgtcgggatgcggatcgatgtcgccagcatagacatggtctcggaagtgaatatggattatacactcaccatgtatttccagcagtcttggaaggacaagagactttcatattctggaatcccattaaatctgacccttgacaacagggtagctgaccaactctgggtaccagacacctactttctcaatgacaagaagtcatttgtgcatggggtcacagtgaaaaaccgaatgatcaggcttcatcctgatggaactgttctctatggactacggatcacaaccactgcagcttgcatgatggatctccgaagataccctctggatgagcaaaactgcaccctggagatcgaaagttatggctataccaccgatgacatcgaattttactggaatggaggagagggagcagtaactggggtcaataaaattgagcttccccaattttcaattgtcgactacaagatggtgtccaagaaggtggaattcacaacaggggcatatccacgactatcactaagttttcgtctaaagagaaacatcggttacttcattttgcagacctacatgccctccacactgattacaattctgtcctgggtgtcgttttggatcaactatgatgcatctgcagccagagtcgccctaggaatcaccacggtgctgaccatgacaaccatcagtactcacctcagggagactctgccaaagatcccttacgtcaaagcgattgatatctatctcatgggttgttttgtgttcgtgttcctggctctactggagtacgcctttgtaaattacattttcttcggaaaaggccctcagaaaaaaggagcgagcaaacaagaccagagtgccaatgaaaagaacaaactggagatgaacaaagtccaggttgatgcccacggcaatattctcctcagcaccctggaaatcaggaatgagaccagtggctccgaggtgctcacgggtgtaagtgaccccaaggccactatgtactcatacgacagcgccagcatccagtaccgcaaaccactgagcagccgtgagggcttcggacgagggctggacaggcacggggtgcccggcaagggtcgcatccgcagacgtgcctctcagctcaaagtgaagatccctgacttgactgacgtgaactccatagacaagtggtcccgaatgttcttccccatcacattttccctttttaatgtcgtttattggctttactatgtacactaagttcagtctcatggttcggtttagactcctttcctcctcgcttgttttttaaccccacagatttccaacagtggtaactgctatggtttttgaggtaagagattccgccttccagttggttttcgatcttgtgtgtcagtttttattatcacaccatgtttacttcaacaacaacaacaaaaggtattttttcctgtctattgtggtccaaggtaccagctctgtaagagttccatcaattactttgtttacaaacacaaagagaggtaggtgggtgttagacattgttggcagtcattcttagttgccctggatcttactggattattttaaaatgaaaatgtacagtggaccctgccgtccacctgcactgtgttctgggtaaactgtaaccatctcatgctgccaaacaattaaatagaaaatttaaaaaaaaaaaaag

SEQ ID NO: 2190 - DNA, 2000 bp, Rattus norvegicus
gaattactgcactgggcagactaagttggatctcctctcttcagtgaatccctcaatcccaccaaaaactaaagggatgtggagagtccggaaaaggggctactttgggatttggtcatttcccttaataatcgccgctgtctgtgctcagagtgtcaatgaccctagtaatatgtcgctggttaaagagacggtggacagactgttgaaaggctatgacattcgtctgagaccagatttcggaggtccccctgtggcagtaggaatgaacattgatatcgccagcatcgatatggtttctgamgkcmryayggactacaccttgaccatgtatttccagcaagcctggagagataagagactgtcctacaatgtaatccctttaaacttgactttggacaatcgagtggcagaccagctctgggtgcctgacacctacttcctgaatgataagaagtcatttgtacatggagtgactgtcaaaaaccgtatgattcgactgcatccagatggtactgtcctgtatggcctcagaatcacaactacagctgcctgcatgatggacctaaggcggtatccactggatgaacaaaactgcacgttggagatcgaaagctatggctatacaactgatgacattgagttttactggcgtggcgatgacaatgcagtcacgggagtgacaaagattgagcttcctcagttctccattgtagattataaactcatcaccaagaaagttgttttctccacaggttcttatcccagattgtccctaagctttaagctgaaaagaaacattggctacttcatcctgcagacatacatgccatccattctgattaccatcctctcctgggtctccttttggatcaactatgatgcttctgctgcacgggttgcattaggaattacaactgtcctgacgatgaccacaatcaatacccatctccgggagactctccctaaaattccctatgtaaaagccattgacatgtacctaatggggtgctttgtctttgtctttatggcccttctggaatatgctttggtcaactacatcttcttyggsagaggaccccagcgccaaaagaaagcagctgagaaagctgctaatgccaacaacgagaagatgcgcctggatgtcaacaagatggacccacatgagaacatcttactcagcactcttgagataaaaaatgagatggccacatcagaagcagtaatgggacttggagaccccaggagcacaatgcttgcctatgatgcctccagcatccagtatcggaaagctgggttgcctaggcatagttttggccgcaacgccctggaacgacatgtggcacaaaagaaaagtcgcctgaggagacgtgcctcccaactgaaaatcaccatccccgacttgactgatgtgaacgccattgatcggtggtcccgcattttcttccctgtggtgttttccttcttcaacatcgtctattggctttactatgtgaactaaactccagcctcccatgagaagcaaggactagattcctcttcaaacagttgtacagcttgatgcctgatgtaggacttggaaaacacatcaatccaggacaaaagcgatgttaaaataccttagttgctggcctatcctgtggtccatttcataacatttgggttgcttctactaagtaatgactacactaaggtcctcgtggttttccagttacaatgcaagtgatttgtacacatgccggcaagatctttgtcagttttaggacacagcctactcagagggttaattacctagattctagaagacactggaaagctcaatggcatgggcagtcaagtctctgaaacagtcatttccaaatgctctccatcgttgttcctaaggttggcacgcagttgggacagcactgtgcttataaaacattatccgcaataatcgaaacatgctacttcaatatgggctttgaggtctaagccagatgatgatgatggtggtgatg

SEQ ID NO: 2191 - DNA, 1167 bp, Rattus norvegicus
tttcctcactctccacctataagatcatcatggaagtctcaagggaaatgctatttgaagaactggacaactactcctatgccttagaatattactcccaggaacctgacgcagaggagaatgtgtacccgggaatcgttcactggatctccctgctcttatatgcccttgcgtttgttctgggaattccagggaatgccatcgtcatttggttcatgggattcaagtggaagaagacggtcaccactctttggtttctcaatctrgccattgcrgayttcrtctttgttctcttcctgcctctgtatatttcctatgtggcactgagtttccactggccctttggscgatggctctgcaagcttaattccttcattgcccaactgaacatgttttccagtgtattcttcttgacagtgattagcctggaccgctacattcacttgatccaccctggctwrtcwcrtcmksascggmcsctgaagaactcactgcttgttgttctatttgtctggctgttggcttctctgctcggaggtcctaccctgtacttccgggacaccgtggaggtcaacaaccgcattatttgttataacaacttccaggagtatgagctcaccctgatgagacaccacgttctgacctgggtgaagttcctttttggctacctcttgcctttgctgacaatgagctcctgctacctgtgcctcatcttcaagacgaagaagcaaaacattctgatatccagtaagcatctctggatgatcctgtctgtggtcatcgccttcatggtttgctggactccttttcacctgttcagcatttgggaactcagcattcatcacaacagctctttccagaacgtgctgcagggcggaatccctctctctactggcttggccttcctcaatagttgcttgaaccccatcctttacgttataataagcaagaagtttcaagctcgattcagggcctctgttgccgaggtactaaagcggtcactgtgggaggccagttgctctggtacagtgagtgaacaactcaggagtgctgaaaccaagagcctgtctctcctagaaactgcccaatgagtattttgtgcccagaaaaccagtgcaaagtttctgtgggagcctcataaccaatcctttcagattaggatttgtt

SEQ ID NO: 2192 - DNA, 1564 bp, Rattus norvegicus
gtctggctcccgctctcacagccattgcagtacattgagctccatasagacagcgccggggcaagcgagagccggacgggcactgggcgactctgtgcctcgcggaggaaaatcaactaaacatgggcaaaggagatcctaagaagccgagaggcaaaatgtcctcatatgcattctttgtgcaaacctgccgggaggagcacaagaagaagcacccggatgcttctgtcaacttctcagagttctccaagaagtgctcagagaggtggaagaccatgtctgctaaagaaaaggggaaatttgaagatatggcaaaggctgacaaggctcgttatgaaagagaaatgaaaacctacatcccccccaraggggagaccaaaaagaagttcaargaccccaatgymccsaagagrcctccttcrgccttcttcttgttctgttctgagtaccgcccaaaaatyaaaggcragcayyctggcttatccattggtgatgttgcraagaaaytaggagagatgtggaacaacactgctgyggatgacaagcagccctatgaraagamggccgccamgctgaaggagaagtayragaaggatattgctgcctacagagctaaaggaaaacctgatgcagysaaaaagggggtggtcaaggctgaraagrrcaagaaaaagaargragagraagacgacgaggaggatraagaggrtgaggaagaggaggaagaagaggaagaygaagatgaagaagaagatgatgatgatgaataagttggttctacgcakktttttttttctkgtytataaagcatttarcsycyctgtacacaaytcactccttttaaaraaaaaaawwraaatgtaaggctgtgtaagatttgtttttaaactgtacagtgtctttttttgtatagttaacmsactaccgaatgtgtctttagctagccctgtcctggtggtattttcaatagccactaaccttgcctggtacagtctgggggttgtaaattggcatggaaattaaagcaggttcttgttggtgcacagcacaaattagttatatatggggacagtakttttkktyttttggkttkbytttkktttttktgwttttgdttttttksyttttkkttttttttyycawcttcagwtgtytctgatgcagmttatacgaaggtaattgttgttctgttaactgaataccactctgtaattgcaaaaaaatggyggctgttttgttgacattctgaatgcttctaagtaaatacaattttttttwywaaaaaaaaamwwawwwatcttctaaagtttaaactttcttaggtttctacaatgaacatattcatttgtactaagaaaaaatgttttagtaaagctttctctacaattattgactaaataatccacatgtgcctagagagtacctaggtagaaagctatttttacatccctcgcctcaaacgattgacacctctgatattcaggaaacattaaaacaaaaccataaaataattgctgattgaaaccaacttcttgttcttcctcctgctgaactgctggggtga

SEQ ID NO: 2193 - DNA, 2626 bp, Rattus norvegicus
ctgctgcctgcactttgccctggtcctccaatggcttcaacccgtgccaggcccatgctgcctctgctcctggtcctggtcgccgttgtgatccccgggcctgtcggtgctcaggtatccatccatcccacagaagccttcctgcctcggggtggatccgtgcaggtgaactgctcttcctcttgcgaagacgagaacctcggcctggggttggagactaactggatgaaagacgaactatcgagtggacacaactggaagctcttcaagctgagcgacattggggaagacagcagaccactgtgctttgagaactgtggcaccacgcagtcctcggcttctgccaccatcactgtgtattcgttcccagagcgagtggagctggatcctctgcccgcctggcagcaggtgggcaagaacctcatcctgcgctgcctggtggaaggcggagcaccgcggacacagctctcagtagtgctgctccgtgggaatgagacactgagccgccaggcagtggatggggaccccaaggagatcacattcacggtgctggccagcagaggcgaccacggagccaatttctcatgcttcacagaactggacctcaggccacaagggctgtcactgttcaagaatgtctccgaggtcaggcagctccggactttcgatcttccgactagggtcctgaagctcgacacccctgacctcctggaggtgggcacccagcagaagttcttgtgttccctggaaggcctgtttcctgcctctgaagctcagatatacctggagatgggaggccagatgctgaccctggagagcacaaacagcagagattttgtgtcagccactgcctcagtggaggtgactgagaagttggacagaaccctgcagctgcgctgtgttttggagctggcggaccagaccctggagatggagaagaccttgagaatctacaacttttcagctcccatcctgaccctgagccagccggaggtctcagaaggggaccaagtaactgtgaagtgtgaagcccacggtggggcacaggtggtgcttctgaacagtacttcccccaggccacccacctcacagggtacttcccccaggccacccacctcacagatccaattcacactgaatgccagcccggaggatcacaaacgacgcttcttttgctctgcggccttggaggtggatgggaagtccctgtttaaaaaccagaccttggaactccatgtgctatatggtcctcacctggacaagaaggactgcttggggaactggacctggcaagaggggtctcagcagactcttacatgccagccccaggggaatccagcccctaatctgacctgcagccggaaagcagatggtgtcccgctgcctatcgggatggtgaagtctgtcaaacgggagatgaatggtacctacaagtgccgtgcctttagctcccgtgggagtatcaccagggacgtgcacctgacagtgctgtaccatgatcagaatacctgggtcataattgttggtgtgttggtactgatcattgcgggcttcgtgatcgtggcgtccatttacacctattaccgccagaggaagatcaggatatacaagttacagaaggctcaggaggaggccctaaaactcaaggtacaagccccgcctccctgagcccactggacaggacrcctgcctgggccccgctgctcttgaacagatcaatggacagcatttacccctcacccacctcctctggctgtcacaggacaggacagtggcctggggatgcatacttgtagcctcaggcctaagaggactcggaggggcaagactgtgaactcgtgacctggacacacctacagcctggtgggcctgcagccaagaaaggctgacttccttctctattacccctgctgaggggccccctaccttaggaaggtgtgatatccggtagacacaagcaagagaagaaaaggaacaccatgcttcctctgacatgggaaagctgggacactgtccccaactcttgttgatgtatttattaattcagagttctgacagttatttattgagtaccctgtacagacactagaggagtgagcaggttaacatgtaagttattgcytagaccctggtgaaggggcacaacagagtctggggaaagatcatacgggtttgggcttctccacaggtcagggtgctttyctcaaaagagctgatttctttcacgagtcatataaatactatgtggacgagcagtggccctctgctcgtagacctctytgggacccctgcctcctcccacagcctggagtctcccagcaccagcatgggtgaccacctccccacctacatacattcctacctttgttcccaatgtcaaccaccatgcctaaatatggacgctcacctttagcagctcaacaatggagtctcatgcccgtgaaattatggtcaatccctgcatgcctccacccggctccacctcaaagagaatgcctgggagaaaatgttccaaccacttagaagggtcctgcaagctgttgtgggagggtaggcacccctcccagcgcagaagcctttcctttgaatcaataaagttttatgtgggaaaaaaaaaaaaaaaaaa

SEQ ID NO: 2194 - DNA, 1918 bp, Rattus norvegicus
cacgagggcggcggaaagtaagaggctactcggggaaggctgccagcatctgggtctcctgggttccgcttggaccakggcgctgaargaggcagtggscggccaacccgcacccatctggtcgctgtcgccgagcctgcttggctggcccagtmaggatgggacttccttggtgtttgatgagtctgttcttctgtgggatcctgcagagtcacgcttccgaacgctgtgatgactggggactagataccatgckacaaatccaagtgtttgaagatgagccagctcgcatcaagtgccccctctttgaacacwtcttgaagtacaactacagcactgcccattcctctggacttaccctgatctggtactggaccaggcaagaccgggacctggaggagcccattaatttccgccttccagagaatcgcatcagtaaggagaaagatgtgctctggttccggcccaccctcctcaatgacacgggcaattacacctgcatgttgaggaacacgacttactgcagcaaagttgcatttcccctggaagttgttcagaaggacagctgtttcaattcccccatgagactcccagtgcacaggctgtatattgaacagggtattcacaatatcacgtgtccaaatgtagatggatattttccttccagtgtcaaaccatcggtcacttggtataagggttgtactgaaatagtgaattttcataatgttcaacccaagggcatgaacttgagttttttcatccccttggtatcaaataacggaaattacacatgtgtggtgacgtatctggaaaacggacggctctttcacctcaccaggactatgactgtaaaggtggtaggctcaccaaaggatgcagtaccacctcatatctactcgccaaatgaccgcgttgtctatgagaaggaaccaggagaggagttggttattccctgtaaagtctatttcagtttcattatggactctcacaatgagatctggtggaccattgatggaaagaagcctgatgacgtccctgttgacatcactattattgaaagcgtaagttattcttcaacggaagatgagacaaggactcagattttgagcatcaagaaagtcacccctgaggatctgaagcgcaactatgtctgtcacgctcgaaatgccgaaggggaagccgagcaagcagccaaggtgaaacagaaagtcataccgccaaggtacacagtagaactcgcctgtggttttggagccacagtctttctggtggtggttctcatcgtggtttaccacgtttactggctggagatggtcctcttttaccgggctcattttggaacggatgaaacaattcttgacggaaaagaatatgatatttatgtttcctatgcaagaaatgcagaagaagaagagtttgtgctgctgacactacgtggagttttggagaatgagttcggatacaagctgtgcatcttcgacagggacagcttccctgggggaattgtcacagatgagaccctgagcttcattcagaaaagcagacgactcctggttgtcctaagccccaactacgtgctccagggaacacaagccctcctggagctcaaggctggcctagaaaatatggcctcccggggcaacatcaacgtcattttagtgcagtacaaagctgtgaaggacttgaaggtgaaagagctgaagcgggctaagtcggtgctcaccgtcattaaatggaaaggggagaaatccaagtatcctcagggcaggttctggaagcagctgcaggtggccatgccagtgaagaagagtcccaggtggtctagcagtgacaagcagggtctctcctactcatccctgaaaaacgtatgaaaggaaaagtcagggggtgaaaagaacaaggcggttcatgggaggaa

SEQ ID NO: 2195 - DNA, 5365 bp, Rattus norvegicus
ggaattccctggtatttgggcggctggtggcggcggggactgttggagggtgggaggaggcagaggaggaggaggagaaggaggaggagggagaaccccgtgcaacgttgggacttggcagcccgcctccccctgcccaaggatatttaatttgcctggggaatcgctacttccagaggggaactcgggagggaaggagcgcgcgcctggagggccaagcggggactcctccggtcgtctctgcctccctgcatcggactctaccaggggcggcaagggatgcaccatagctccttctctgctgcaaggactgggggagacttagtcctcggaagattgcggctgcactcaccctagacccactgcctttccctctgggcatgaaacgcccttaaactcggatcaggctatcttcctttggcgcagctacctcgtccttcggctgcccctccccagcgccaggaacggcgtgaatttcggagtcaggatttctgcttgcttcctccagcccggagtgcatgtgcggggccgcaccgagaagccacccctcacccagtttttcgacacctccctctgctccgcagcagcatggcgagccctccggataccgatggcttctcagacgtgcgcaaggtgggttacctgcgcaaacccaagagtatgcataagcgctttttcgtgctgcgggcggccagcgaggccgggggcccggcgcgcctggagtattatgagaacgagaagaagtggcggcacaagtcgagcgcccccaaacgctcgatccccctcgagagctgtttcaacatcaacaagcgggctgactccaagaacaagcacctggtggctctctacacccgagacgaacactttgccattgcggcggatagcgaggctgaacaagacagctggtaccaggctcttctgcagctgcataatcgggcaaaggcccaccatgacggggctggaggaggctgcggtggtagctgcagcggcagctctggcgtcggagaggcaggggaggacttgagctatgacacgggcccaggacccgcgttcaaggaggtctggcaggttatcctgaaacccaagggcttaggtcagacaaagaacttgattggtatctaccgcctctgcctgaccagcaagaccatcagctttgtgaagctcaactctgaggctgccgctgtggtgctgcagctgatgaacatcagacgctgtggccactcagagaacttcttcttcatcgaggtggggcggtcagctgtgaccgggcccggcgagttctggatgcaagtggatgactccgtggtggcccagaacatgcatgagaccattctagaggccatgcgggccatgagcgatgagtttcgcccgcgcacgaaaagccaatcttcatccagttgctccaaccccatcagtgttcccctgcgcaggcaccatctcaacaatcctccgcccagccaagtggggctgactcggagatctcgaactgagagcatcactgccacctcccctgccagtatggtgggtgggaaaccaggttccttcagggtgcgtgcctccagcgatggcgaaggcaccatgtcccgtccagcatcagtggatggcagtcctgtgagccctagcaccaacaggacccacgcccatcggcatcgaggcagctccaggttgcaccccccactcaaccacagccgctccatccctatgccttcttcacgatgctccccttcagccaccagcccagtgagcctgtcatccagtagtaccagtggccacggctccacttcagactgtctcttcccgaggcgctctagtgcttccgtgtccggttctcctagcgatggcggtttcatctcttctgatgagtatggctctagtccctgcgatttccgaagttccttccgcagtgtcaccccagattccctgggccacaccccaccagccaggggtgaggaggagctgagcaactatatctgcatgggtggcaagggagcctccaccttgacagctcccaatggtcactacattttgtctaggggtggcaacggccatcgctacatcccaggtgctaccatggggacaagcccggcgctgactggagacgaagccgctggtgcagcagatctggataaccggtttcggaagagaactcactcggctggcacgtcccccaccatatcccaccagaagaccccctcgcagtcctcagtggtttctattgaggaatatacagagatgatgcccgctgcctacccaccaggaggtggcagtggaggccgactgcccggctaccggcattccgccttcgtgcccacccactcctatcccgaggagggtctagagatgcaccacttggaacgtcgtgggggccaccaccgtccagactcctccaacctccacaccgatgatggctacatgcccatgtctcccggagtggctccagtgcccagcaaccgcaaaggaaatggggactatatgcccatgagccccaagagtgtatctgccccccagcagatcattaaccccatcaggcgccacccacagagagtggaccccaatggctacatgatgatgtctcccagtggtagttgctctcctgacattggaggtgggtcttgcagcagtagcagcatcagcgcagccccttctgggagcagctatgggaagccatggacaaacggagtaggggggcaccatacccatgcccttccccatgccaaacctcctgttgagagcggtggtggtaagctcttgccttgcactggtgactacatgaacatgtcgccagtgggagattccaacaccagcagcccctcagaatgctactatggcccagaagatccccagcacaagcctgtcctctcctactactcattaccaaggtcctttaagcacacccagcgccctggggagccagaggagggtgccaggcaccagcatcttcgtctctcttcaagctctggacgccttcgctataccgcaactgccgaagattcctcctcttccaccagcagcgacagcctgggtgggggttactgtggggctaggccagagtctagcgtcacacatccccaccaccatgccttgcagccccatctgcctcgaaaggtagacacagctgcacagaccaacagccgcctggctcgacccacaaggctgtccttgggggatcccaaggcaagcactttaccccgggtacgagagcaacagcagcagcagcaacagcagcagcagtcttccctgcaccctcccgagcccaaaagcccaggagaatatgtgaatattgaattcgggagtggccagccaggctatttagctggccctgcaacttcccgtagctccccttcagttcgatgtctaccccagctccacccagctcccagagaagagactggctcggaagagtacatgaacatggacttggggccaggccggagggcaacctggcaggagagtggtggagttgagttgggcagagtaggccctgcacctccaggggctgcttccatttgtaggccaacccggtcggtgccaaatagccgtggtgattacatgaccatgcagataggttgtcctcgtcaaagctatgtggatacctcaccagtggccccagtcagctatgctgacatgcggacaggcattgctgcagagaaggtgagcctgcccagaaccacaggagctgccccccctccatcctccacagcctctgcttctgcttctgttacacctcaaggggccgctgagcaggccgctcactcttccttgctgggaggccctcagggacctgggggcatgagcgcattcaccagggtgaacctaagtcccaaccataaccagagtgccaaagtgattcgtgcagacactcaaggctgccggaggaggcacagctccgagaccttctcggcgcctacgcgggctgccaacacagtgtcttttggagcaggggctgcaggagggggcagcggtggtggcagtgaggatgtgaaacgccacagctctgcatcctttgagaatgtgtggctgagacccggggatctagggggagcatccaaggagtcggctccagggtgcggggctgccgggggattggagaagagtcttaactatatagacttggatttggtcaaggatgttaagcagcaccctcaagactgcccctctcaacagcagtccctgccaccccctccccctcaccaacccttaggcagcaatgagggcagctccccaagacgctccagtgaggatttaagcacctatgccagcatcaacttccagaagcaaccagaggaccgtcaatagcttaactggacgtcacaggcagaatgaaagacctaaatgacctcagcaatcctcctttttaactcatgggtacccagactcgaactctttcacgattcacaaccaggacctcacgtcttcctcctcagtagatggtacgatgcatcccttacagtttgtttactttgtacaatcctcaggagttcattgactgaactgcacgttctttattgtgccaagcaacaagaaagcactgtgacaccggaacaatgagtgtgcataaacttcatcttgaactttaaggacagctggccacgaagagccagtgtgctccctgccacgccgaaagaggatgggtttactctcgtcaaatttacaagcatacggttcctctgctctgaaaccgtgttccatgacacgccgctgtaaattatttcatatggaactgttcgcgttgggtggagagagtattaaatatttaacataggtcttcatttatatatgtaattttttaatgaaaatgtaactttcctcacagywywttttttttctcttggaatgtggaactgaggtattcaatgttttgttttaaagagtgggaagaatacttaaaacaaggctaaaaagagtagactaggagatgatccttgttttaagattctaattcagaaaaataatataatatgaatcatagtgccatagaaggttctggactgtatagttgtacttgctgatgctgtctcttgtaatataaacttgatgtcgagctgagttccttttaagaattaagcttagttttgtaattttttttttttccaaaccgaaggaggatgtattctactggggtgtttycaagtgtcggcttagaaytggawgttgaatggaagcaaagttcaacamagagaggaagccacagactkccattgtaaatactstagagagagacatgagcgatcccttcaagtcaaaaatctctcyttggamtgaagaatgtgggtgtttataaattctgaaaatgtctttctgttcataataaactagacactgttggtccctccccammmmmamwwmwawaarcctttcccccgga

SEQ ID NO: 2196 - DNA, 3612 bp, Rattus norvegicus
ctaagactaaagacttatttgcattttatttaaattagatggacttggctttggacaatttccatacaagaaaaaaaaatatttcattttctaggcacaacttctgactgtcagattcttgctgcctttgagtcttgtagcgtcatcatcagaccgcatcccagacagacttccagatttgaacacctaccccccaaaacgtaggtgtttgggagaccacatcacttcatgacttatgtttgaggagcactaggctgttgtctagactaagcaagctctggaaagcaatgctgagtctctgagaagagggagcatggggtgtgctgatttaaaaacagaaaatgcaaagttggactgaaaatatcccaagtcttctaagcaatctgcttaaggcttccaaacttaccttaayykggtaagaaaataagctgccctatttttctttcttcttctcttacaactggaaccagccatttccccaaactaccaccatggaggtggcaatggtgagtgccgagagctcagggtgcaacagccacatgccttatggttatgctgcccaggccagggctcgagagagggagagacttgctcactccagggcagctgcagctctggctgttgcagctgccacggctgcggtggaaggcactggaggttctggtggaggcccccaccatcatcatcagacacgtggggcctactcctcccatgatcctcaaggaagccgaggtagtcggaggaggaggcsacagcgaactgagaagaagaaactccaccacaggcagagcagttttcctcattgctcagacctgatgcccagtggctctgaagagaagatccttagggagctgagcgaggaggaggaagacgaggaggaggaagaggaggaggaagaggagggaaggttttactatagtgaagaggaccatggggatgggtgttcctacactgacctactgccacaggaygatgggggtggcggcggctacagttcagtccgctacagtgactgttgtgaacgcgtggtaataaatgtgtctggtctacgcttcgaaacccaaatgaaaactttggctcagtttccagaaactctgttgggagaccctgagaagaggactcagtacttcgaccctttgcgcaatgagtatttttttgataggaaccgtcccagctttgatgccattttgtattattaccagtcaggaggccgcctgaagaggccagtcaatgtcccctttgatatcttcactgaggaggtgaagttctatcagttgggagaggaagccctgctcaagttccgtgaggatgagggctttgtgagagaagaggaggacagggctctgccagaaaatgaatttaaaaaacagatttggcttctctttgaatatcccgagagttccagccctgccagggssatagccatcgtatctgtcctggtcatcttaatctctattgtcatattttgcctggaaaccttgcctgagttcagggatgatagggacctcatcatggccctcagcgcaggtggacacagcagattattgaatgacacctcggcaccccacctggagaactcagggcacacaatattcaatgaccctttcttcattgtggagacagtatgtatcgtgtggttttcctttgagtttgtggttcgatgctttgcttgtcccagtcaagcactcttcttcaaaaacatcatgaacatcattgatatcgtctccattttgccttacttcatcactctgggcaccgatctggcccagcagcaggggggtggcaacggccagcagcagcaggctatgtcctttgccatcctcaggatcatccgtctggtccgagtgttccggatcttcaagctctccagacactccaagggcctgcagatcctgggccacaccctaagagccagcatgcgtgaactgggccttcttatctttttcctcttcatcggggtcatcctcttttccagcgctgtgtattttgcagaggcagatgaacctaccacccatttccaaagcattccagatgcgttttggtgggctgtggtaaccatgacaactgtgggctacggggacatgaagcccatcacagtgggaggaaagattgtggggtccctgtgtgccattgcgggtgtcttaaccattgctttgcccgtgccggtgattgtgtctaactttaactatttctaccacagagagactgaaaacgaagaacagacccagctgacccaaaacgcagtcagttgcccatacctaccttctaatttgctcaagaaatttcggagctctacttcttcttccctgggggacaagtcagagtatctagagatggaagaaggggtcaaggagtctttatgtggaaaggaagagaagtgtcagggaaagggggatgacagcgagacagataaaaacaactgttctaatgcaaaggctgtggagactgatgtgtgaatctctttccccacctgccgtgccgccgcccagctccgaatatattcatacataaagaatgcagttatgaaaatgagatatgcactgcatacagtaatacactgcttaatggcgatacatggcataattgtggcgaaacgtgtattgcatatcaaataagtgatgcatcttggagaagagggaggcattaaaaacagcagatctatctttatattttttaatagaatgcaagaattttgcacataatggsararkgttaatagtaaaggtggtcccgaggagagtgagtgtgtgtgagagagtgagagagtgtgtggccatgggagtgtaagtaaattgtcaacattgttgggaattgtgccgtgatgggaaaagttggcattctgaagtatttactatgtaagaactaatgaacttgagcagtcttttaccagtgttttaataacatctcctatgtctttggattctgtagttgttttctagaaattgtaagaattactgtgtagaaaaaagagaaagtaaattatttaatagwatataggtcacaatttaatcttggatttaattaaagtttatttttaactggaaattaacttttgaaaaggctsyasssyyttasaaattgattatattttsttattaattttgggagatatactagcaaatgcctaatgttctggaggaaatgtaacaagttttgttcacaggtcttaagactggaatttttttttcttttgcactactttctatgctgaagcccgagagagacttcatactgtgaatgtttactaacgcaccaatcagttcaatgacaatcattggaagaatggtttcttcgtctcatttattgttcttttcattttgtgagactaatgagcacacagataacagcacacgattcctgctttaaaatctgaacaaccgatctacaaagggactacgargtaacgttcagcagccgaatctttcaaaattggtttgttacaatgatgcttcagaaaccatactattttcaatactcttctgccttttaagtccagaataatttaaccaaagttattgcatgcacagaaagaattccggcattttgttgcatatttaataaaaagatcttaagccataattgctgtagctgctgggcgccttatttctccaa

SEQ ID NO: 2197 - DNA, 4689 bp, Rattus norvegicus
ctcaatcctcatccttgcatgtctgtaacatacacacaaagtcacatgcagccaaatgtctgcacatgcccgtttcccagcaagcttcttgtacatatccactattgaaatcgtgtcctctgcatttccagtggtgtcacaagtttgtgcgccccttgctgttccaacgaacgctgccatacgtttccaaagcacctgcgtctgtagactcattcacagacaatgggtggtgacatctctggagtagaatctcaaacaatatgcaggtaaagaaaataaacaatacaattaggcactcaaaatcacagtaacttcccagcaatggaaacccaaaaacatctggaggaagctgtatctagaattgccagacagaccttgaaaaatcagccccacttttgatgatgatgacagtcccagagactaaagacaaggacagggttgtgggtggggggtgtcccagcctaggactctatctttacattactcattcttatgcctcctgcaatggaagaatgctctcgggccagatgtggctaggggagaaagaagcaagaccccggactccagcagcttgggtttcaattccagcattgatactttttagtttcgtggccatacaatgcagtcaatctttctgcgcctgagtttctgtgtatgctgaagggtagtagtagtagtagtactcagttacagagtacactggtgcagaagcacacaagtcaagaatgatctggacttacgcaacaactcaccgacctccacctccttctctttccacaggtctctgtgagtccctagtttagagctgtcctgtgcacaatctccaaaaggatttattttaccctttcctttctcattgtgcattttaagaaagaggattaggtgaggttagagggatggtgaaggatgtagagtcaggaaagcagacagcctctctcttgttgagggtaaccctgggtctgtactggcagttcagatcaccaatgtctggatgatgaaaaacaggcttcagggggtgctgtgaggtctcagtctcctgccttttgatgagtttgtaggcaaataggtagagtttcatgtgtgtgtgtgtgtgtgtgtgtgtgtgtgtgtgtgtgtgacacacacacacacacacacacacacacacagagagagagagagagagagagagagagagagagttcactactcccctgcagtttaatttttcccaaagagagaggctgttaatctctaaagcagtggttctcaacctgtggttcacaatccttttggcaaacctctatttccaaaaaatatttacattacacttcagtagcaaattccatttacaatacgatagcaacatgacagttatgaagtagcaacaaaaaataaatttagggtgtgtgtgtggggggatggtcaacacaacatgaggaactgtattaaaggtcgagaagcactgctctaaaagaaaaacataggaaggactctcttcttcaatctcttacactggaactcagctaaaagcctttcccttccatctaaagcagttcccaccctctggcgtcccctggctttcagtgcattcccaggtgatctgagatcctgaagctagctattctcatcctgttgccctgggagtttcagcactcctggtacaacctgttcctcgctcctcctgctcttttcctcctccccttcctgtccttgcggcaggggccccagctgaaccctccagagagacactctccgactccgtccccaaaggagaaacgssmgggggaggagsagaggagggagccacagagggcggaggccggggagctcagccagagaggggctgctggaggttgcatctgctggaaggaggtttttcccgctgcctggtaaccagctgccagaacactgagagggagagagagaggcagggagcaggggcagcagcttcttgacgtcaggaccagccaaggatcgggccagctaccccggccagcctagagtcagcggggccctcggctggagaggagacctacgcgaggcttggagcgtgagttgggggtgtgggaaccggttgtctggggcgcagcatgccccctgcccccggaccatggagatctccctggtgcccctggagaatggcagtgccatgaccctcagaggaggaggggaggcaggggcaagctgtgtgcagacccccaggggagagtgtgggtgccctccgacgtctggactcaataatcagtccaaagaaacactgttgagggggcgcacaacgctcgaggatgcgaaccagggtggacggcctttgccccctatggctcaggagctgccacaacctagaaggctatctgctgaggatgaggagggagaaggcgaccctggcctgggcacagtggaggaggaccaggctcctcaggatgcagggtcactccatcaccagcgagtcctcataaacatctccgggttgcgtttcgagacgcagctgggcaccctggcacagtttcccaacaccctcctgggggacccagccaagcgcctgcactacttcgaccccttgagaaatgaatacttcttcgaccgcaaccggcccagcttcgatggcattttgtactactaccagtctgggggccgcctgcgcaggcccgtcaatgtctccctggatgtgtttgcagatgagatccgcttttaccagctgggggacgaggccatggagcgcttccgggaggatgagggcttcatcaaggaagaggagaagcccctgccccgcaacgagttccagcgccaggtatggcttatcttcgaatacccagaaagctctgggtccgcaagagccatcgccatagtgtcggtcctggtcattctcatctctatcatcaccttctgcctggagactctgcctgagttcagggatgagcgggagctgctacgccatcccccagtgccgccccagcccccagcccctgcccctgggatcaatggcagcgtctctggagcactttcctctggccctacggtggctccactcttgcctaggacactggccgatccattcttcatcgtggagaccacatgtgtgatctggttcacttttgagttgctcgtgcgcttctttgcctgccccagcaaggcagaattctctcggaatatcatgaacatcatcgatgtcgtggccatcttcccctactttatcaccctgggcaccgagctggcagagcaacaaccagggggagggggtcagaatgggcagcaggccatgtccctagccatcctcagggtgatccgcctggtgcgggtgtttcggatcttcaagctctcccgccactccaagggactgcagatcctgggtaagaccttgcaagcatccatgcgggaactcgggctactcatcttcttcctcttcattggagtcatcctcttctccagcgctgtctacttcgcagaggcagacaatcacgggtcccatttctctagtatcccagatgccttctggtgggcagtagtcactatgaccactgtaggctatggagacatgagacccatcactgtagggggcaagatcgtgggttcactgtgcgccatagctggggtcctcaccattgccctgcctgtccccgtcatcgtctccaactttaattacttctatcatcgggagacagaccacgaggagcaggctgccctgaaggaagaacaaggcaaccagaggcgggagtctgggctggacacagggggtcaacggaaggtcagctgcagcaaggcctccttttgcaagactgggggttccctggagagttctsacagkatcagaaggggtagctgtcctctagaaaagtgtcacctcaaggccaagagcaacgtggacttgcggaggtccctgtatgccctctgtctggacactagccgtgaaacagatttgtaaagagagatccaggcagactggcaccagtgaagctggccacaggggtgccccttgagcctgggcatctgctttayaccaccgagtatttaagcccacctggtcacccaccgatgtctgcctttctttcacccttctcaccttcctgccctctaacttccccattttaactcctctttccataacccccagggtcgcctatttttaacaagtatgacattccatgacgcaggagccrttgaagtgctgagccctcactggaagatggatgcattcatagccagttttctacacccagcagagggataatcaaacaaatttgactttaaaaagcttagatcccaagagaatccatagcattccctacccgtgttccaaatttactttacatgggattacatttgygtatgggcaaatattatttttatggccgatgactgcattttgtacagcagtgcacatgaagaatatttgggtgtgctcttaagatatactttgaattatgaaagtgttgggggggtcaccatttcytgggacactcagggacaaagaccctaaaagagttgttcaggtttctgtgttctcawgcttcttattattctgggatgtactattggtgcttctggtctaggagakagaatgttctagaagaccagcwaatctaatcytgtgactgtcttcacagaagcattttaaggatgttggaagaaggatttggagaattcatgcttttmgttttaataccaggaaataaaatgtgactgtcgggcaagtaaaaaaaaaaaaaaaaa

SEQ ID NO: 2198 - DNA, 611 bp, Rattus norvegicus
cgtccatccaggtccaggcgtgcagagttttgctccacatcagggaaaccgtgaagccccaggatggccctgtccaattccacaactgttctgccttttctggcctcgctgtggcaggaaacagatgagccgggtggcaatatgtcggcggacttggctcgtaggtcccagctccgagatgacagcaagctggaggctctctatatcctcatggtgctgggtttcttcggcttcttcaccctgggcatcatgctgagttacatccgatccaagaagctggaacactcgcacgaccctttcaacgtgtacatcgagtcggacgcctggcaggagaaaggcaaggccctcttccaggcccgcgttctggagagcttcagagcttgctatgtcattgaaaaccaggcggccgtagaacaacctgccacacaccttcctgaactgaagccactgtcatgaaccccatagttaattaatagacaagtgataagtgggtctttctagtcaaatgcctgccagtctttattgtagaggtacccttgagtttttataaggggtgagttaataacaccagttttctgaaattgcattctttctatagtaatcaatttatt

SEQ ID NO: 2199 - DNA, 5604 bp, Rattus norvegicus
agtgactgctggtcggaccctgggacagactgagggcctggagggaaaccagcccagtacccacacggatggagtgggcctcaggaaaaccagggaggggcaggcagggacagcctgtgccatgggaacttcgcttgggcctacttctaagtgtgctggctgccacattggcccaagtcccatccttggatgtacctggctgttctcgaggaagctgctatccagccaccggtgacctgttggtgggccgtgcagacagactgacagcctcctccacgtgtggcttgcatagccctcaaccctactgtattgtcagtcacctgcaggatgaaaagaagtgcttcctgtgtgactcccgacgtcccttctctgctcgagacaacccaaatagtcaccggatccagaatgtagtcactagctttgcgccacaacgccggacggcctggtggcagtcggagaacggtgttccgatggtcaccatccaactggacctggaagctgagtttcatttcacccacctcatcatgaccttcaagacatttcgtcctgcggccatgctggtggagcgctctgcagacttcggccgcacgtggcgtgtctaccgatatttttcctacgactgcggggctgacttcccaggaatcccgctggccccgccgcgtcgctgggatgatgtagtgtgtgagtcccgctactcagaaattgagccatctactgaaggcgaggtcatctatcgtgtgctggatcctgctattcctattccagacccctacagctcacggattcagaacctgttgaagatcaccaacctccgtgtgaacctcacccggcttcacacactgggagacaacttgcttgacccacggcgggagatccgggaaaaatattattatgctctctatgaacttgtcatccgcgggaactgcttctgctatggacatgcctcacagtgtgcgcctgcaccaggggcaccggcccatgctgagggcatggtacatggggcctgtatttgcaagcacaatactcgtgggctcaactgtgagcagtgtcaggatttctatcaggaccttccctggcatcctgctgaggatggccatactcacgcctgtcggaagtgtgagtgcaacgggcatagtcatagctgccactttgacatggctgtgtacctggcatctggaaacgtaagtggaggtgtctgcgatggctgtcagcacaacacggctgggcgccactgcgagctctgccggcccttcttctaccgtgacccaaccaaggacatgcgggatccagctgcgtgccgtccttgtgactgtgacccaatgggttctcaagacggtggccgctgtgattcccatgatgaccctgtgctaggtctggtctcaggccagtgtcgctgcaaagaacacgtggttggcactcgctgccagcaatgccgggacggcttctttggacttagtgccagcaaccctcgaggatgtcagcgttgtcagtgtaactcaaggggcacagtgcctgggggcaccccttgtgactccagtagtggaacctgtttctgcaagcgtctggtgactggagacggctgtgaccgctgtctgcctggccactggggcctgagccatgacctgctaggctgccgcccctgtgactgtgatgtgggcggtgccttggatcctcagtgtgatgaagccacgggtcagtgcccgtgccgcccacacatgattgggcggcgctgtgaacaagtacagcctggctacttccggccttttctagaccatctaacctgggaggctgagggtgcccatgggcaggtgcttgaggtggtagaacgtctggtgaccaaccgagagactccgtcctggactggtgtaggctttgtgcgactgcgggaaggtcaggaagtggagttcctggtgacctctttgcctagggccatggactatgacctgctactgcgctgggagccccaggttcctgagcagtgggcagagctggaattggtggtgcagcgcccagggcctgtgtctgcacacagtccgtgtgggcacgtgctgccgagggatgaccgcattcaggggatgcttcacccaaacaccagggttttggtgtttcccagacctgtctgccttgagcctggtctctcctacaagctgaagttgaaattgactggaacagggggacgtgcccatcctgaaaccccatactctggatctggaatactcattgactcgctggtgctgcagccccatgtcttgatgctagagatgtttagtgggggggatgctgctgccctggaacgccgtaccacctttgaacgctaccgctgccatgaggaaggtctgatgcccagcaagacccccctatctgaggcctgcgttcccctcctcatcagtgcgtcctccctggtctacaatggcgccttgccctgccagtgtgaccctcaaggctcactgagttccgaatgcaatcctcatggtggccagtgccggtgcaagcctggagtggttggacgacgctgtgatgcctgtgctactggctactatggctttgggcccgcaggctgtcaagcctgccagtgtagtcccgacggagcactcagtgccctgtgtgaagggactagtggacagtgtctctgccgaaccggtgcctttggtcttcgctgtgaccactgtcaacgtggccagtggggtttccctaactgccggccgtgtgtctgcaacgggcgtgcagatgagtgtgacgcccacacaggcgcttgcctgggctgccgtgattacacagggggcgagcactgtgagaggtgcattgctggttttcatggggacccacggctgccatatgggggccagtgccggccttgtccctgccctgaaggccccgggagccagcgacactttgctacttcatgtcaccgggatggatattcccagcaaattgtgtgccactgtcgagcaggctacacagggcttcggtgtgaggcttgtgcccccgggcactttggggacccatccaagccaggtggcaggtgccaactgtgtgagtgcagtgggaacattgaccccacggatcccggtgcctgtgatccccacacggggcaatgcttgcgctgtttacaccacacggaggggccccactgtggccattgcaagcctggcttccatgggcaagctgcccgacagagctgtcaccgctgtacctgcaaccttctgggcacagatccccagcggtgcccatctacagacctgtgccattgtgacccaagcactgggcagtgcccatgcctcccccatgtccaaggcctcagttgcgaccgttgtgcccccaacttttggaactttaccagtggacgtggctgccagccttgtgcttgtcacccaagccgggccagaggccctacctgcaatgagttcacagggcagtgccactgtcatgctggctttggtgggaggacctgttctgagtgccaagagctccactggggagaccctggactgcagtgccgcgcctgtgactgtgatcccagaggaatagacaaaccccaatgtcatcgttctactggtcactgtagctgccgcccaggcgtgtctggcgtgcgctgcgaccagtgtgctcgtggcttctcgggtgtttttcctgcttgtcacccctgccatgcatgctttggagactgggatcgtgtggtacaggaccttgctgctcgtacgcggcgcctggagcagtgggctcaggaattgcagcaaacgggtgtgctgggtgcctttgagagcagctttttaaacctgcaggggaagctgggaatggtgcaggccatcgtggctgcccgcaacacctcagctgcgtctactgcaaagcttgtagaggccacagagggactgcgtcatgaaattgggaagaccactgaacgcctgactcagttagaagcagagctcacagatgtacaggatgagaacttcaatgccaaccatgcactcagtggtctggagagagacgggctcgcacttaatctcacactgaggcagcttgaccagcatctggatatcctcaaacactcaaatttcttaggtgcctatgacagcatccgacatgcccacagtcagtctacagaagcagagcgccgggccaatgcctccacctttgcaatacccagccctgtgagcaactcagcagatacccggcgtcgggcagaagwgctaatgggtgcccaaagagagaacttcaaccgccagcacttggccaaccagcaggcacttggacggctgtscacacacacccataccctgagcctgacgggagtaaatgagctggtgtgtggggccccakgggacgcaccctgtgctaccagcccttgtgggggtgctggatgtcgggatgaggatgggcaaccccgctgtggtggcctcggttgcagtggagcagcasccacagcagatctagcactgggccgggctcggcacacacargcagagctgcagagagcgctggtagaaggtggtggcatcctcagccgagtgtctgagactcgtcggcaggcagaggaggcccagcaacgagcacaggcagccctggacaaggctaatgcttctaggggccaagtggagcaggccaatcaggagcttcgagaacttatccagaatgtgaaggacttcctcagccaggagggagctgatcccgacagtattgaaatggtagcaacacgggtgctagacatctccatcccagcctcgcctgagcagatccagcgcctagcaagtgagattgcagaacgtgtcsraagcctggcggatgtggacacaatcctggcacataccatgggggatgtgcgtcgggctgaacagctactgcaagatgcacagcgggcacggagccgggctgagggtgagagacagaaggcagagacagwcsargcggcactggaggagscccagagggcacagggagctgctcagggcgccatccggggagcagtggttgacacaaaaaacacagagcagaccctgcagcaggtccaggagaggatggcaggtacagagcagtctctgaactctgstagtgagcgggctcggcagttacatgcccttctggaagccctgaaactgaaaagggcaggaaacagcctggcagcatctacagytgaagagacagcaggyagtgcccagagccgtgccagggaggytgagaaacagctacgggaacaagtaggtgaccagtaccaaactgtgagggcgttggctgaacggaaggctgaaggtgttctgsccgcacaagmsasagcagracarytgcsrgaksmggcymggggkctgwtgmargcwgctcrggacaagtwgswgcsrstacmrgaactggagggcacatatgaagagaatgaacgcgaactggaggtcaaascggctcagctggatgggctggaggccaggatgcscagtgtgcttcaggcaatcaacctgcaggtccagatctacaacacctgccagtgaccactccctagggtttagccttgtctccaagcacagttccacatgcgtttgtccgcacattaaagagctcttggmtagcaagtgctytcaataaaccagtgtgamcchmmhmaaaaaaaaaaaaaaaaaa

SEQ ID NO: 2200 - DNA, 2254 bp, Rattus norvegicus
gcagccccggggcggatggcacgggccgcctgtctcctccgcgcgatctcgcgcgccctcctgctcccgcttcctctgctgctcctgttgctgcttctcctgccgccgcagctgatggcccgggccaggccaccggagaatcaccgtcaccgccctgtgaagagagtgcctcagctcctgcccgcagctctgcctaatagcttgccgtctgtccccgcctcccattgggtccctggtcctgctagtagctccagacctctacgatgtggtgtgcctgacccgccggatgtactgaatgcccgaaaccggcagaagcgcttcgtactgtcgggagggcgctgggagaagacagacctcacttataggatcctccggttcccatggcaacttgtaagggagcaggtgcggcagacggtggcagaggccctccgggtatggagtgaggtgactccgctcactttcaccgaggtgcacgagggacgcgctgacatcatgattgacttcaccaggtactggcatggggacaacttgccattcgatgggcctgggggcatcctggcccatgccttcttccctaagacccaccgagaaggggatgtacactttgactatgacgagacttggactattggggacaagggcacagacctgctacaagtggcagctcatgaatttggtcatgttctgggcctgcaacacaccacagcagctaaggccctcatgtcccctttctacaccttccgctaccctctgagccttagcccagatgaccggaggggcatccagcacctctatggccggccccagctgacccccacctccccaaccccaaccttgagctcccaggctgggacagataccaatgagattgcactgcaagagccggaagtccctccagaagtctgtgagacctcctttgacgcagtttccaccatccgaggcgagctcttcttcttcaaggcgggctttgtgtggaggctgcgcagtgggcaactgcagcctgggtatcctgctctggcctctcggcactggcagggactacccagtcctgtggatgcagcttttgaggatgcccagggccagatttggttcttccaaggtgctcagtactgggtatatgacggtgagaagccagtcctaggccccgcaccactctccaagctgggcctgcaggggtccccggtccatgctgccttggtctggggtcctgagaagaacaagatctacttcttccgaggkggagactattggcgtttccaccccagaacccaacgagtggacaatccggtgccccgacgtaccactgactggcggggggtaccttctgagattgatgctgctttccaggatgctgagggctatgcctacttccywcgkggmcatctctactggaagtttgaccctgtgaaggtgaaagtcctggaaagtttccctcgacccataggtcccgacttctttgactgtgcagagcccgccaacactttccgctgacaacacctcagatgcattcagggcacttatatcattaaagagagccacagccatatttgtggacctgggcttcaggcatgggacagacggggcctaggtctcctcaggggagtgggttggggtgcagccactgtttgcagggaggaccatgctggccatggtcacctgccaacaactgtctcagagaaggcaaaggctttgacattacttaaaaataagggaggtcttgggctgacaatatgtcagctaccagtaatccacagtcaacttgactgccaagcctccatstctgtcccacaaagaacccccacaggaattcaggaaccacagtgtcttcattctgtttctgtaacgaggtccctrttggtmgtggtgttsgkmaygagatgccaagggtmccatggtaaggagatgcccagggtyccatgytsccacagctaaggacbtggsccagtatctytcytggttaagttgsctmtggagagatactggactgattatattcagasgwgtktttcctggaacatagsccaaaagsgacacagccasccagggaggcagctgyttcctcccagagcctcagwggcctcacatacctcacagccttgccctgggccatttytccctggcgcmttccctcttcccagcaccagtgcctcccaaagccatgtaaatgtgtmtacagtgtataaagcctttttttaagaaagccgagastgtcattmaacrtgagtgttttctwdrwaaaaaaaaaaaaaaaaaa

SEQ ID NO: 2201 - DNA, 884 bp, Rattus norvegicus
gaattctgaggacgtttcatttcttagatggttcttaactcttgtgacttagagaggggcttagagagggttcctatttccatttcgtgcccatgcaatatgttttccatgtaaaaagtttcatgaccccattactcaagctgccatttaaatgtggtccttttccatcactgactacttcacacacactcacacacatacacacatgtgcgtgtgctcgaacacacacacagggcgggggatttgacaaaggtagctttttgaaaagaataaatgcgtcctcttcagaggggagaaaatacaaagttccctaatgatttccctctctgtcccttaggacacatgagccccaccacctgcaccctgaggaaacacaagaccaacaggaagccacgcacaccgttcaccacgtcccagcttctagccttggagcgcaagttccgccagaaacagtacctctccatcgcagagcgggccgagttctccagctctctgaaccttacagaaacccaggtcaaaatctggttccagaaccgaagggctaaggcaaaaagactgcaggaggcggaactggaaaagctgaaaatggctgccaaacctatgctgccctcgggcttcagtctgcccttccctatcaactcccccttgcaagcggcatccatatacagcgcctcctaccccttccataracctgtgcttcccatcccgcctgtgggactctatgccacgccggtgggatatggcatgtaccatctatcctaaagaagaccagatkgacacactctargatggatgtttgtggaaagcattcccctccctctccaggaaggcggtgccaattttgctcctgaacgcaaaccctgcgttgtccccctaagcaacag

SEQ ID NO: 2202 - DNA, 7336 bp, Rattus norvegicus
attcgtaccacatctccaacttgctggaaaaaatgacatccagcgacaaggacttcaggtttatggctacaaatgatctgatgacagaactgcagaaagactccatcaagctggatgatgacagcgaaaggaaagtcgtaaagatgattctgaagttgctggaggataaaaatggcgaagtgcagaacttagctgtgaaatgtcttggtcctttagtgagtaaagtgaaagagtaccaagttgagacgattgtagacaccctctgtacaaacatgctttctgacaaggagcagcttcgagatatttccagtattggccttaaaacagtaattggagaactyyytyywkkkwwttyywyacttgkcaagcacttttatttcacacctccggtggggcttccttgtgtccarractgggtagggcctgaraagagagccagcctcttaagaacccaggctgacacgggggctgcaraggaaattcgggacatgcactgcttgtccctamagctccgatccctggctccttgcagcccacaggcaktgggtaragcatccctgcgatgcagggacttcccattctgtcctgccttcarctgtgaccctgtggamagcycycryrmystctggaaggttctctggccaratgaccgctgctgggaggtattcaagggywakaggtgtcttgtgagtcgctcgttcgcttgcttgcttgctctccatggctgtggagtgcagtcgccaggtgtggcccacatatccactttgcaggctagtcctgcccatgtccaggttacagcggtggacagttaatatcaaagctcagacacacgtacaaaaagtttggtcctccattaaggctgttatgaacttaaaagttatgtaaaccacaaaaagagaaacagttactgaaaagtacaaaggggggggggggactgctgtgcaggttggggctctgatggtcctggccagcagtccccagcctccacaacacacagagctggccacagcatccctctgggaacttttcattctagatccttctcagagagtgaaggccggctccacagctgggatgccagttcggggattttagaacacgcagatggccagtcatggtcctcagccattggcttggctggagctggagggcaggcagtaggtaggggggtctgaatacctgcgtttggccccaggaagtatggcatcatggtggtccaggggtcctagtgtaccctgcgatggcaggtcactcttctgcggccccccgcacggccctctcctccagcaggctctcagtgctggctgatgtctctgagtcaaggttctcctcgtcagaaccccgtgggtccagctccggcagtcgatatgtgatgtcctccttctcttctttgatggactgaatcctctccatgagaatctccttttcccggtcctcgtcaccacctgccgcctcctcggggagagcccccagctcctccaagtcttggaccactggggtcctggggcttttggtccggaccccctcatagggagacgaaaaccccagtttgagaggccacggggcattctgcctcagcagggagagcctgcggaacgcaatgctctcagctgcctccaggtggttgatctcctccatcttcaccttgtatttcctcatctgttccttgatgagcatctccacacacgtggtaatctttagtacgtccttcatgctggtcagggggtcggagttgtcagggcagcgaagcaggcagggcgcgaagatgatagctagagctcccggagacatgcggttcacatcttcaagcagggccactttgacaaggtggaagatgagcctctccagggaggtgtggttggcttcaggcaggtggtccaggactgcatagatggcagccagctgctcctgcttctctggaagctcaacagccctgaggaagtctccatactgggcaaaagtcatgagtggctcaggcagctcccgcagccattgcttcaggaccccggtgatggcgtggatggggaagtcctccagcttaactgtagcagggtctgtctgcagagcctggcgtaattcccgtgtccggttggcagcgcctgacttgcggtaaagaccctcggtatacaggccatgcatctctacatgttccagaagcttctccagcacaatgggcacggaggccttgtcactggtcaggctgtctacacacacgccgaagtggcctggttcggcacccagctcactcttcctccgtccagtgtaggagcaatagctctgaatcttgtgcacacatttcttgtggcaggtcatcttgcacacactgcatagcagggccttgtccatgagccagatgtaggacagacactgctcacacgactgcgggatgttcacttggtagctggcaaacacatgtccattgtgttcctggacagcacgctcctgcttcctcttcttcttctgggctttgcccttgaccggctcaaagtcagtcttgttgtagctgcgagtgaattcatccagcagtgactggaagacattgaggaccaggttggtgtccttctccccacgctcggcagccaggttactgacaacgatctggtagttctccatcaagtccttgtagcctacatggatcttcccgttaggcacagaatacatggtcttgatattgctcctgaaacgctcagtggcctcaatgaacaagctctcgatgggtgtcttctgtgagcgaaggtcattcaccttgttgagcaggaactcatccagaaacttgagctcgttggcattagtgatcttacggaacaccgactctcgccacttctcggacactgtgatctgtccgaccttacgatttcggttcttcttcccttttagaggcttctcgcctgtggtgtggcggtgctgctggctagaaggtacatctagagtcttcctggccggggcctcctgtgcagcctgccctccactgccctctgtctcctccacaccctccaggctgggcttcttatccttggctttgtgcaggaagagtcgcttaaaggcagatttagagtcaccctgggagcctgtgggcaggcctgcatcgggaccagcagatgggtcttctgacttcttcttatggccggctggcttcttggcgctcagatccccatcgacttcagttgaagtcttgaccggggacagcttggagacatcactggtggagaaggagatgcgcctctcctctgtgggagtcagggctgcccctgcagtccggggcttctcactcaggtccagggattggctcagcatggcactggcgagcttcttgcctcgccatatctccacagcagtggctagccgctctgtgtccgggtgttggtaccgttggatctgggtggagccactgggactctcgggcttgtcctgaaccttggtgctgttctcacccttgtcctcatcctggggggattccagggagctgctggggagcactgggctaaccctgctgtctaggtccaggctggcgggcctctgcaagggactgggactcctaggcggatctcccacaatcggcacctgctttggacaagagggggctgcggtctcagtccatgtctcaagtccatcttctctgggctcctttgtgtcctcagggaagctctcccctgtttccaggcttgcctttctggaaggttctcggagggtgctattctcctccctgcaggattggatgtgtttgttctgtcgttcaacatgctccaaccctcgctgccgccgtgactctcgcttctcccggctactggggactttctcatgactttcagctggcactgttttttgggctggggtctccatctccgggctggggatctccttcttaggtgacaagccatttggggacttgctgttcatccaggtctcagtctccacacccaggctctcagggtcctccacagggtgctcagacggctgctccccagcggccacagggctgggctctccctctgacatctctgctcctgcagtctccctggcttgctctgccttctgcttctctaacatcatctggctgaagctcctgcgctgtaggtggccacggcagaggctctgcaggcggatgatgctatgcctctggtggtggtaggcctgtctctgcaggtagcctctccaggcagcctgaagatacacagctgcccgcgtcctctccagtgtacggcgcacacgataagaccgccagcaggcctggatggtcagggcagcatgcttcatctgcacaaagtgcctgcgttccagcaccatccggaaccaactctgcagcagcaggatcctgcgtaagacctcaccatgcagcctctcctgcagggcctgccgctctgtctccttcaggaagaccttcgtcttcccgatctggtagttctgcctgtccacctgcagcttctccaacagggcagcaatggcctccctacagggctggacatccttgggcagcagcacctggaactgctccgtgaagtcctggaaggtgtacttggcgctgtagccagagcgccggatgcgcacggtctccagcatgcctgtgtagcgcagttgctgaagcaccagctcatcatcaaagcagagctccttcttctcggcattggagcgaatgcagcggatgaagaagggctcagccttgcccagcgcctccaacagcttgttaagagatgtctggaactgtgcactgatgctgggcggcttcttcttcttgtgcaggtgcagcagtgacttggtagttcggtcatgcagcgtcatgctgatgatgagcctcagggacttagagtccagcaggttcttgggaatgatctgcttttgtttgatacctttactcttcaggaagaaggtgcggggcttctggagccgactgagggactggagaagcctccgcgggtcctcgccctgccatggcagtcctttgaggctcttgatgatttggttatgcaaatcgcggtacagtttctctgaaggggtgttggctcctcttggcagctcttccacgtgacttcgagtgacaggactacttacacctgcttctgctttctctgctctctctgcacgcaggcgcccagcctcccgcagcacagccatggccctgatggctgcccgtaatacagcccagcggaacacagctaccgggtccatgccgatgagttggcgcacataggagctgtcactgccccttagcagtgccacgatgtcaggccgcatgtagtccatgttcttctcccggaagtccttgatctggtactttactctgcctgcgaagtgctggatgatgaaggcgggctccaggactggtgtgcccaggaagtacttgttgtcctcatgctgctgcttgaatttggccagcagagtgtggcttgtggcatggggaaagttgctttcctcgtccagcaggtagaagaggccagtgggcttcttgctgatgaggtggatacagcccacgttgtcggtgtagtcaatgttgtgccacgagataccctcaccctggtactcctcctgctccagcttgaagatgtgctgggtgaagtagtactgcaactgctcgttggcgtagttgatgcaaaactgctcgaagctgttccgttcaaagtcctcaaatccgaatatgtccaggacgccaatggacaagcaagaaacagcctcttccatgtccttcttgttgaggagggcgtggttgatcctcagcacaatccagtcaaacagggcgctgtacagagacttagccatggagtctcgtgcagtgatagcctcactgaggctgtaaggcaggatgagtttgtcattgaccgtgattgtttttctcttggttaggacctccaccagggtctcccgctttaccttcaggagctgggatagtgtgtccaatacctccgggggcccgacctccaggccttcatcccggcctgtggctctcttcttataggtgacattgccaagatacaggatggctgagaggacagagaagatctgcttcttcgtggcaggtaggaagcccaccatctccatggcctgctgaagcctttcaaagtcatgtttgaggtcttctccatcttcaatattcaagttatgctggttgaggtagaaatagtcttgaggctgcttcagctgaaattcctgacgctcttcctcactgacgcccagcagcagataataaaacacatggtagttccgctcatccttctcctgggaaaccaggcgagacttttcaagaaggtatttttccacaacagctcccctcacgatgccactctccaggtagttgacttggatgaacttcccgaagcggctggagttgttgttgtgggctgtcttggcgttcccaaaagcctccagcacaggccctgcacccaggatggtcctctcgacgccgctggcgtagcccttctggctgagcgctgtgaggcagtggatgaggaagttggtgctttgcgtcttgccggacccgctctcaccagagatgacgatgcactggttcacgtgcttgcgcagcatggtgtagtaggctacatcggccagagcgaacacgtgcggctccagctttcccagctgctggttctcgtacatcttcacatacttggggttgtaaatgggcaggaacttgaaggggttgatggccaccaggatgctgcccgcgtacgtgtagatcttctgctgcacgaagcgcagcttcaggctctgcagcaggttggcctcgttcagctccggcaggttgcacaggtcgtcgaagtccgcttgaggccttggcagcagccctcgctccaccaggcgacatgcggctgtgggctgagccagcagctgcacgtgcaggtactgaatgctgccgtcagcgttgcgctcctgcagcaggaagtagtagccgtcctcccgagggtgctccttctgcgctcgccgaggccacagcagcactcggtgcacaggcgagtcgctggcatccagcacccactcctccccacccgactccttcacctccaccagcacatagtgcttcgagccgtccaggtgtagactggccaccacgtctcggatgacatcgcttgttgtgctgtccttggtggcggttacacggcatgaggtctggctcccagcactgggcagctgagggtagatgtgcaggtggaaggtggccggccgccttcggcctgagctgccagcctcgtgagcactcatcctgcccacctcctggcctcagcatgcctcatcggcgggccgcgcacctcctgcaactggacttggaccgctggcgccggtctccggccggcccggctgctcgcggcccccccgcccggagcgaccagcctcgccctcgtgccga

SEQ ID NO: 2203 - DNA, 5963 bp, Rattus norvegicus
tgctggagttctccgcttccgctgggtcactgtcgccgctacttcttttcaacccctaaaagctccacgggccactcccttctctagtgctccacgtccgcttgccctcgggggccagaccagcgacatggagggttgcgtcggggaagaatcttttcagatgtgggagctcaatcgacgcctggaggcctacctgacccgggtcaagacgctagaagagcaaaaccagctgctcagcgccgagcttgggggactccgggcgcagtccggagacacctcctggagagcccgagccgatgacgagctggcatccctgcggatcctcgtcgatcagcgctggcgggagaagctcgaggctgaggtgcagcgcgacaaccttgcggaagagctggagagcgtggcgggccggtgccagcaggtgcggcttgctcgggagcggaccgtccaggaggccgcctgcagccggcgcgcactcgaggcggagaagaatgcgcggggctggctgagcacccaggcggccgagctggagcgggagttagaggctctgcgagccgcgcacgaggaggagcgcgcacacctgaacgcccaggccgcctgtgcgcctcgccggccccccgcaccgccccaccggatccccggtccggcccccgaagtcgaggatctggccaggcgactaggcgaagtgtggcgcggggcggtgcgtgactaccaggagcgcgtggctcacatggaaagctcgctgggtcaggcacgcgagcggctgagccaagccgtgcggggcgctcgggagtgtcgcttagaggtgcaacagctgcaggctgatcgcgacagcctccaggagcgcagagaagcgctggaacagagattggaaggccgctggcaggaccggctgcaggccactgataagttccagctggctgtggaagccctggagcaggagaagcaaggtctacagagtcagatcgctcagatcctggaaggtgggcagcaactggcacacctcaagatgtcccttagtctggaggtggctacatacaggactctgctggaggctgagaactctcggttgcagacacctggacgaggttcccaggcttctcttggctttctggaccccaagctgaagccgaatttccttgggataccagaggaccagtacctgggatctgtgctccctgccctcagccccacatccttcccttcccccttgcctaatacccttsagaskcctgtgacagccttcctgaagactcaggagttccttcargccakaacccccaccttggccagcactcccatcccacctatatctgaggctccctgtcctccaaatgcagaggtsagagcccaggaggtccctctttctctgctccagacacaggctccagagcccctttggctgaaggccacagtgcctagttcttctgctatcctcccagaactakaggaacctgkgggcaagcagcagggtcacttccctgatgatctgacctccttagccacaamcctcaaccctcaccaccctactttakaggctaaagatggagaatccastgagtctagagtttctagcatattccaggaagatgaggggcaaatctgggaactggtagagaaagaagcagatatagaggtaaaagtagaaaacagctcagcccagaaaacacaagaaagtggtctggacacagaagaaacccaggattcccagggacctttgcagaaggaaacactgaaggctctaggagaggagccactgatgtctctgaaaatccagaactatgagacagcagggaaagagaattgcaattcttctacagaaggccacctgggaacactagaaggcccaraaaaaraaaarmaaataccactaaagtctttagaagaaaagaatgtagagtcagagaaaactctagaaaatggggttcctgtactatctgagcttttaggaaaagaagacacaagaacagaggatcaagaattaatgtctcctaaaggtacactaaagagattttcatctctaggaaaggaaagtcaagaagtagtgaggccttcaaaagaggggaacctagaatcatggacagcttttaaagaggagagccaacacccactgggatttccaggagctgaggaccagatgcttgagagactggtagagaaagaggatcagagcttcccaaggtctccagaggaagaggaccaggaggcatgtagacctctgcagaaagagaatcaggaaccactagggtatgaagaagcagagggccagatacttgagagactgatagaaaaagagagtcaggagtccctgaggtctccagaagaagaggaccaggaggcaggtagatctctgcagaaagagaatcaggagccactagggtatgaagaagcagaggaccagatgcttgagagactgatagaaaaagagagtcaggagtccctgaagtctccagaagaaaaccagaggattgggaagcctctagaaagagagaatcagaaatctctgaggtatcttgaagaaaaccaggagacttttgtaccactagaaagcaggaaccagaggccactgagatctctagaagtagaagaggaggagcagagaattgtgaaacctctagaaaaagtgagtcaggattccctcggatctctagcagaagagaatgtgcagccactgaggtatctggaagaagatgactgcataaataagagccttctagaagacaagactcacaagtccttggggtctcttgaagatagaaatggggatagcattattataccacaagaaagtgagacccaggtttcattgaggcctccagaagaggaggaccagaggattgtgaaccatctagaaaaagaaagtcaggagttctcgaggtcttcagaagaagaagagcaggtgatggagagatctctagaaggagagaaccatgaatcactgagttctgtagaaaaagaggaccagatggttgagagccaactagagaaagagagtcaggactcagggaagtctcttgaagatgagagccaggagacctttggacctctggaaaaagagaatgcagagtccctgagatctctagcaggacaggaccaagaggaacagaagcttgaacaagagacccaacaaacactgagggctgtagggaatgagcagatggcagtgagcccaccagaaaaggtggatccagagttaccgaagcctcttggaaatgaccaggaaatagctagatctcttggaaaagagaatcaagagtcactagtgtcactgaaagaaaaaggtatagagacagtgaagtctttagaaacagagatcatagaaccactggagactgcagaagaggacctggaaagaaggaagtctatagatactcaggagccattgtggtctactgaagtggctagagagacagtagaacctccagaagatgagcccccaggatcgctagggtctgtggatgagaaccgagagacactgacatcccttgaaaaggagagtcaagaactgagctctctgggcaagtggaacgtagagaccagggtagaggacagtcagcagtgcctgcaagtagaagagggtctgcaggaggaacagcaccaagagtctctgagagaggtgaagcaggagctgcctagctctggaaatcaacagcggtgggaggatgtggtggagggcaaagcagtgggtcaggaagcacctctggcaaccacaggagtgggaactgaggataaggcagagttgcatctgagggggcaaggtggagaggaagaagctgcagcagagggagagctgttgcaggatattgtgggggaggcctggagtctggggagctctgagcccaaggagcagagggtccctgctgaggccctcgacaacctggaaggaggggccttagaggtcccagttgctcagtcaatgccagaggtgacagagcgagatgaggatagagcccaagcaggtgaacaagactccatagaggtgacccttgggttagaggctgccagaactggactggaactcgagcaggaagtggtagggctagaggacccaaggcattttgccagggaggaggccattcccccatccctgggggaggaaagtgtgaaggcaaagatagctcagggcttggaagggcctggaaaggaaccaaaagaggcaggtgctctggactcggggatccttgaattgcccaagactagcagcgaggctctggaatgccagggccatgaagagtctgagtccatggagggctgggaagaagaggaggcctcactggagacttcagatcatgagggcagtgatgcccctcagcccaggcccccagaaacagaagaagatgagggtgcacaggcagcactgacagcccctggtcccaagctcttggaaccctgttcacccatcccaatcctgacagatgcccatgagctgcagccccaggctgaggggatccaggaggctggctggcagccagaagctgggtctgaagcactagaaagggtagaaaatgagccagagtttggtcttggggagatcccggagggcctccaggattgggaagagggcagagaagaaagcgaggcagatgatctaggggaaactctccctgactctactcccctgggcctctacctgaggtcccctgcttctccaaagtgggatctggctggagaacagaggctttcccctcaaggggatgccgggaaggaagactggggtcctgctgtccccgctgcccagggcctcagtggtccaccggaagaggaggaggagcaaggccatggctctgacctatcatctgaggagtttgaggacctagggactgaggcctctcttcttccaggggttcccaaggaggtggcagatcacgtgggccaagtgcccccggtactgcagcctgcatgctgggatcagggtggggaatctgatgggtttgctgatgaggaagaaagtggggaggagggagaggaagaagatgctgatgaggaaggagcagagtcaggagctcagtggtgggggtcaggggcctctggtggaggctgcaaggtccaggatattgcccaaagaggagacccggtacaggagtctgtgggtgtcagtggtctctgggatgatggcttgagaggtgctgcagctaatgttcctgccctagagatggtatctcaggacagtgctgagccttctgggtcagaggagtctgagtctgcttccttggagggggaggaaggtcaagtgactgaccatttagatgctccccaggaggtgaccagcatggtcccgggggtaggagatgcctttgacattggtggccagagccccaacttggactcagaacaagtgaatgggaaaatggagaatggactagaacaggctgaggggcaggtggtcctggatggggacgaggatcaagaactcctattacagggacasgaggtgggtgctctaaaggttcctttggtagcatctcstgtgcatytargcccaagccakcccctgaagttcactctgagtggggtagatggggattcctggtcytcakgggaakactagaaactgcccctctggctctgaggaygtamtggtggggatgtcmytccytgytctggrtsmccactcttagctttgataacttgacccatggtatttgtcctgrasagttgtggctgggctgagcaakggaggtgagatcctcctgarggctcargakttccakgcctataswtctaccccctctttcttctgtggctcacctgctggwagaggcctgrgcccakagctttcscacaaggstgttctggycacagmttgctakccttgcctamcayctgcacawggtctggtmtggtgtatgmccaggggagctgagggcagcatttatctgacccttcatctcagcytgmtgagagcttgttcctstcttcctccctgaataaagccgtatccctmcctmmaaaaaaaaamaaaaaaa

SEQ ID NO: 2204 - DNA, 1721 bp, Rattus norvegicus
cgcaggggcgttaggcttccgagacgcgccgggctctgggaaccccggtcaccgctcaagccctcccgcctgcggacctcactcgctcgtttctggagctggattgactcgcttttccaatcttcgcgtccccccttcccagctttttgactccatcactccacaccaagaccccctttcccctgcttgatcatcagccttgtccgcgtggtcatgggatgtctaatttcatttgtatctaggctgctgagagcgctccctgctctgtaaagtggatgtcaggtggatctatgtttttgaaggaacaaagactcagccaaggcaccgccaaggaagtttgagaggagggaggatgcaggctgcgtgctggtacgttcttcttctcctgcagcccaccgtctacttggtcacgtgtgccaatctaacaaatggtggaaagtcggaacttctgaagtcaggaaacagcaagtctacactaaaacacatatggacagaaagcagcaaagacttgtctatcagtcggctcctctcacagactttccgtggtaaagaaaatggcacagatttggacctgcgctatgacaccccagaaccttattccgagcaagacctctgggactggttgaggaactccacagatcttcaggagcctcggcccagggccaaaagacggcccattgttaaaaccggcaagtttaagaaaatgttcggatggggtgattttcattccaacatcaaaacagtgaagctaaacctgttgataactgggaaaattgtagatcatggcaatggaacgtttagtgtgtatttcaggcataattccactggtcaagggaatgtatctgtcagcctggtgcccccaacaaaaattgtggaattcgatttggcacaacaaaccgtgattgatgccaaagattccaagtccttcaactgtcgtattgaatatgagaaggttgacaaggccaccaagaacacactctgcaactacgacccttcaaaaacctgttaccaggagcagacccaaagtcacgtgtcctggctctgctctaagcccttcaaggtgatctgtatttacatttccttttatagtacagactataaactagtacagaaagtatgccctgactacaactaccacagtgacacaccttacttcccctccggatgaagacgaacagggcatgagactgaagcctgaggaattacaggtcataggacagggcyrykassttaaggaagaaggtcacatctgttgcctggaatgtgtctacactgctgctcttgttgrctggtgcgaacatgctagtggaaaacaattgatgtaatttctgcacagtcagcttcatctctcagcatagttgtaaatcaccatagctctcagagtctcatctgaagacatgctgtcactgtagagacacatgagcacccactcctgcacatttcagctcacatctatcatggtaccctttgagagggctttcattgtcttgactcatgatggttcaggataaactatgatcaaacacaaagaattaactagacagaggatgtatctaacatgccsktatggaaatctcttttaaggtcttgagtccatgctaatcaatagtccccactcatgcattcctactgcttggagtarctgtgctggtgaatactactgkaggagktatatgcttgttaaatgraaaaaatgkgtctttagagctcaatattctttt

SEQ ID NO: 2205 - DNA, 1837 bp, Rattus norvegicus
gccaaaagctgttctgatcacccagggtttttcctcccaacccagaccccaccatcgaacctccaactctggtcccacctagcctgctctgtccttaaggggccgggaagccccagtcactccactgctattgtagatgcagatggtggcctgcccttgaccatagaggccgtgtggggtgttcatctctgagccccttctggcccaccatggctcggcggctgcaagatgagctgtcagccttcttctttgaatatgacactccccggatggtgctggtacgaaacaagaaggtgggagtcattttccgtctgatccagttggtggttctggtctacgtcattgggtgggtgtttgtctatgaaaaaggataccagacctcaagtgacctcatcagcagtgtgtccgtgaagctcaagggcttggctgtgacccagctccagggcctgggaccccaggtctgggacgtggctgactatgtcttcccagcacacggggacagctcctttgtagttatgaccaacttcatcgtgacccctcagcagactcaaggccattgtgcagagaacccagaaggtggcatatgccaggatgacagtggctgcactccaggaaaagcagaaaggaaagcccaaggtattcgcacaggcaactgtgtgcccttcaatggcactgtgaagacatgtgagatctttggttggtgtcctgtagaggtggatgacaagatcccaagccctgctcttcttcgtgaggctgagaacttcaccctcttcatcaaaaacagcatcagctttccacgcttcaaggtcaacaggcgcaacctggtagaggaggtgaacggcacctacatgaagaagtgcctctatcacaagattcaacaccccctgtgcccagtcttcaaccttggctatgtggtgcgagagtcaggccaggacttccgcagccttgctgagaagggtggggtggttggtatcaccattgactggaagtgtgatctggactggcacgttcggcactgcaaacccatctaccagttccacggactgtatggggagaagaacctgtctccaggcttcaacttcagatttgccaggcatttcgtgcagaatgggacaaaccgtcgtcacctcttcaaggtgtttgggattcactttgatatccttgtggatggcaaggctgggaagtttgacatcatccctactatgactactatcggttctgggattggcatctttggagtggccacagtgctttgtgatctcttattgctccacatcctgcctaagaggcactactacaagcagaagaagttcaaatatgccgaggacatggggccgggagagggtgaacatgaccccgtggccaccagctccactctgggcctgcaggagaacatgaggacctcctgaccttagtcttgagatccggacttgacgcagtgtgtggcttccggcaagggctgatggctttgagccagggcagagggcattcccagaggctttcctgcaaggcagacaccagtggccctctggttcagcatgaagacaggcaagactttggatttcagagctctggtttcagttccacatgtcccttcstgagggatgcctcctccagttttcaccaatttgggttcatatggctgggcccctcacacatctatactctagctttgtgcttaaggctcaggctgtcattgtctttcccacagccttacctgcctagatttgggctcttccacatggtagccactagccagatgtgtcagtttgaactttaattaaaatataataaaaarawrrmwrrrwwraamwaaaaaaaaaaaaaaaaaaaaaaa

SEQ ID NO: 2206 - DNA, 4197 bp, Rattus norvegicus
tcgggcgccgcgcgagcctgccgctgccatgcctccgcgcgcgccgccagcgcccgggccccggccgccgccccgggccgccggccggcacgggctctcgccgctggcgccgcgcccctggcgttggctgcttctgctcgctctgcccgccgtctgctccgcgctgccgccgccgcgccccgtctacaccaaccactgggcagtgcaagtgctgggcggccccggcgcggcggaccgcgtggctgcggctcacggctacctcaacttgggccagattggaaatctggacgattactatcatttttaccacagcaagaccttcaagagatcaaccttgagtagcaggggcccccacaccttcctcagaatggacccacagskrmwmkggctccagcaacaggaagtgaaacgcagggtcaagagacaggcgcgaagcgactctctttatttcaatgatcccatttggtccaacatgtggtatatgcattgtgctgataagaacagtcgctgtcggtcagagatgaacgtccaggcggcatggaagcgcggctacacaggaaagaacgtggttgtcaccatcctcgatgacggcatagaaaggaatcacccagacctggcccccaactacgattcctatgcaagctacgatgtcaacggaaacgattatgacccatcaccgagatatgatgccagcaacgagaacaaacatggtactcgctgtgcgggagaagtcgctgcttcagccaacaactcctactgcatcgtgggcatagcatataatgcaargataggaggcatccggatgctggacggtgacgtgaccgacgtggttgaggccaagtctctgggcatcagacccaactacattgacatttacagcgctagttgggggccagatgatgatgggaagaccgtggatgggcccggccgtctggctaaacaggctttcgagtatggcattaaaaagggccgccaaggtctgggctccatttttgtctgggcctctgggaatggtgggagagaaggggaccactgctcctgtgatggctacaccaacagcatctacaccatctctgtgagcagcaccactgagaacggccacaaaccctggtacctggaggaatgtgcttccaccttggctaccacctacagcagcggggccttctatgmacggaagatcgtcaccacggacctgcgtcagcgctgcaccgacggccacactgggacatctgtctcagctcccatggtggctggcatcattgccctggctctagaagcaaacaaccagttgacctggagggacgtgcagcacctgytagtaaagacgtcacggccggctcatctgaaggcgagtgactggaaagtcaacggagctgggcataaagttagccatctctatggatttggcttggtggatgctgaagsgctcgtcctagaggcaaggaagtggacggcagtgccatcccagcacatgtgcgtggccaccgcagacaaaaggcccaggagcatccccgtagtgcaggtgctgcggaccacagccctgaccaatgcctgtgcagaccactctgaccagcgtgtggtgtmcctggagcatgtggtagtccgaatctctatctcacatccacgacggggtgacctccagatccacctgatttctccctctggaaccaagtctcaacttttggcaaagagattgctggatttttccaatgaggggttcacgaactgggagttcatgactgtccactgctggggagaaaaggctgaaggtgaatggaccctggaagtccaggatataccatcgcaggtccgcaacccagagaaacaaggaaagttgaaagaatggagcctcattttatatggcactgcagagcacccataccgcaccttcagctcccaccagtctcgctcacggatgctggagctttcagtcccggaacaggagcctctcaaggctgagggaccaccaccgcaggcagagactccagaagaagaggaagagtacacaggtgtgtgccatccagagtgtggtgataaaggctgcgatggtcccagtgcagaccagtgcttgaactgcgtccacttcagcctgggaaactccaagacaaacaggaagtgtgtgagcgagtgccccttgggctactttggggacacagcagcaagacgytgccgtcgatgccataagggatgtgagacatgcacgggcaggagcccaacacagtgcctgtcttgtcgccgtgggttctatcaccaccaggaaacgaacacatgtgtgaccctgtgtcctgccggactttatgctgatgaaagtcagagactctgcctcaggtgccacccgagctgtcagaagtgtgtggatgaacctgagaagtcgactgtgtgcaaggagggattcagcctcgcacggggcagctgcattccggactgtgaaccaggtacctacttcgattctgagctcatcagatgtggggaatgccatcacacctgccggacctgcgtggggcccagcagagaagaatgtattcactgtgcaaaaagcttccacttccaagactggaaatgtgtgccggcctgtggtgagggcttctacccggaggagatgcctggcttaccccacaaagtgtgtcgaagatgtgatgaaaactgcctgagctgcgagggctccagcaggaactgcagcagatgtaaagctggcttcacgcagctggggacctcctgcatcaccaaccacacgtgcagtaacgccgatgagaccttctgcgagatggtaaagtccaaccggctctgtgaacggaagctcttcatccagttttgttgccgcacctgcctcctggctgggtagggcgggcgccagctgccacagagggcagggtcctcctgtctgcccttttgcccagctaccttcctacagatggccagccatagcccattccttggggtggccctgagtctgacagctgtgccctcccccccccagagctgggtcccactgcagcatctctgagcacctgaactaggtggaggtggcccttaaggataaggctaaatcggcaaaaatccccctgaactctgcttgctggctgcagtctaaagctggactcgaaataggaacagagtgaattatgagactcatgcctgcagcttgggagtggcttctgggaccctagtttactgaaacttcaagaccaaagcagaaaaagagagatgcctggcatcccatcaagtcctcctcccacacattcgtgtgaccgtgacagatctcaccgagttggctggcaggaccccatgctgtcctcacctataatgaagggcctcgcttcctccccatgcatcactggccaccaaacagcctgagggatggtttgatgagactgtaaataaaataggtttcasggcakragatgtatgaccactggggatagaacctatgtctacacagctccttccgaaactacagccccctgactggaaggtccggcaccagactgaagtaggtctactcatcctctcctcagcattctcctctgagtgagctgagctgtccaagtgactgttcaacctgtgtcccagggcctcctgggcctgagscacsagkcatctacagatacagagcctgtggagragggtccaaaggagctacttaaggctagccgaaagacctctaatggccaagcagttcctccttatgcaaagccagccccaaatcactaatcgccagccctccatggcacacaactgcttctcaagtgcatttggcctccacactcaggactctgttctcgggtggacactgctctggcccagtatagtacaagcctacgttgatagagctggattkwtttttytgccaagcctgtgtgggcattttataagmwacgtgttctaatttttaccgatgttaattattttgacaaatatttcatatattttcattgaaatgcgcrratmtgcttggtccagttccctttaacgtgggaataacatttgccttaaatttttccaacctcgtctctctccatatggtcctgctctcctctctgaatataatgtgttytgtcttgtcacctgtaagtggcaaggactcagctgttgtctgttgaatccacaacttcaaataagaaatcagtgaagcaaatctaatgttaaccctgagttaataaaagagttaacatcccmttgcaaaaaaaaaaaaaaaaa

SEQ ID NO: 2207 - DNA, 2550 bp, Rattus norvegicus
gaattcggcacgagcttcttcccagggatctgagaattgctctcacacaccaacccagcagcgtctgtggagaaaactctcacgagcaactcttttaaaataccgtcatttcaaaccgttgtggtctttaagcaacaacaggggggaaaaaaaacccaaaacaacaaaaaccaaaaaaaaaaaaaaaagccaaacaaaactcttgacaggagctttaacagcgacgaaagagaggatgcctcttaaaggcagaagactttaactaggggcgggcgagcagatgtgtgagatcttctattcaaagagtggacatatagcccagttttcagagccacgtattcgagccccgtgggatccggaggctgccaaccagctccagcatgcagaacagtcacagcggagtgaatcagcttggtggtgtctttgtcaacgggcggccactgccggactccacccggcagaagatcgtagagctagctcacagcggggcccggccgtgcgacatttcccgaattctgcaggtgtccaacggatgtgtgagtaaaattctgggcaggtattacgagactggctccatcagacccagggcaatcggaggcagtaagccaagagtggcgactccagaagttgtaagcaaaatagcccagtataaacgggagtgcccgtccatctttgcttgggaaatccgagacagattactctccgagggggtctgtaccaacgacaatatacccagtgtgtcatcaataaacagagttcttcgcaacctggctagcgaaaagcaacagatgggcgcagacggcatgtatgataaactaaggatgctgaacggacagaccggaagctggggcacccgccctggttggtatcccgggacgtcagtaccagggcaacccacgcaagacggctgccagcaacaggaaggacagggagaaaacaccaactccatcagctccaatggagaagactcggatgaggctcaaatgcggctgcagctgaagcggaagctgcagagaaatagaacatcttttacccaggagcagattgaggctctggagaaagagtttgagaggacccattatccagatgtgtttgcccgggaaagactagcagccaaaatagatctacctgaagcaaggatacaggtgtggttttctaaccgaaggkccaagtggagaagagaagaaaaactgaggaaccagagaagacaggccagcaacaccccgagtcacatccctatcagcagcagtttcagtaccagtgtctaccagccaatyccacagcccaccacacctgtctcctcctttacatcgggttccatgttgggccgcacagacaccgccctcaccaacacgtacagtgctttgccgccgatgcccagcttcaccatggcaaataacctgcctatgcaacccccagtccccagtcagacctcctcgtactcctgcatgctgcccaccagcccttcagtgaatgggcggagttatgatacctacacccctccgcacatgcaaacacacatgaacagtcagcccatgggcacctcgggaaccacttcaacaggactcatttcacctggagtgtcagttcccgtccaagttcccggaagtgaacctgacatgtctcagtactggcctcgattacagtaaagagagagaaagagagagaatgtgatcgagagggggattgtgttcactcagccaatgactatgtggacacagcggttgggtattcaggaaagaaagagaaatggctgttagaagcacttcactttacaactgtgtcctatactggagcccgggaatggactagaaaccaggacctttgcgtacagaaggcacggtatcagttggaacaaatcttcattttggtatccaaacttttattcattttggtgtattatttgtaaatgggcatttgtatgttataatgaagaaaagaacaacacaggctgttggatcttggatctgtgttggctcatgtggttgtttaaaggaaaccatgatcgacaagatttgccatggatttaagagttttatcaagatatatcgaatacttctacccatctgttcatagtttatggactgatgttccaagtttgtatcattcctttgcatataattaaacatggaacaacatacactagatatatgtaaaaaatatctgttggtttttccaaaggttgttaacagataaagtttatgtgcaaaaaagggtaagatatgaattcgaggagaagttgatagctaaaaggtagagtgtgtcttcgatataatccaatttgttttatgtcaaaatgtaagtatttgtcttccctagaaatcctcagaatgatttctataataaagttaatttcatttatatttgwcwrgaawamwmwawarmwrwwttatacacattttcatgcaatcatttgtttctttcttggccagcagaagttaattgttcttagatatagctgtattactgttcacagtccaatcatcttgtgcatctagaattcattcctaatcaattaaaagtgcttgcaagagttttaaaaaaaaaaaa

SEQ ID NO: 2208 - DNA, 4245 bp, Rattus norvegicus
ggcacgaggaagtggatgcggactgtccttgccactaacttcatcatgctkagggggaggttgagaatccacttgtgataaagacatttttttcctccccaagtgactatacgtttaaattgctaaaacatctgtgcagcaacctagtaaaacatwatawtcgtatgmttgagcaaaaagcctgccaaacaatcgcttgagaggaactttgctgagggagagcaccgagataaagcaactgctgtttgttttgtctagtcaagagagagccaaggcaaccaatatttkgtktttyttttwtttcatttgtgaaggattatttgagaaagtgtgtcgaggggaagtttcctgacasgaatttttaaagctgtytattakcasacgagcaakagatcttgaatgtcaaaykcctgacaaactcttgagaccagccaccaaaccacgaaaagtgamtttctgagtcwtctcttcsgcccttctgatggaagcagaarcakggagcascatggakactggaaaggggaccaaccgaggcattcggattgcactggmcctgttcattactggcaccctggtgctgggcacactgctctttctagtgagtcaaggtctcctaagtttccaagctaaacasgagtactgcctgaagccagaatgcattgaagccgctgctgccatcatgagcaaagtaaatctttctgtggatccttgtgagaattttttccggtttgcttgtgatggctggataagcaataacccaattcctgaagatatgccaagctatggggtttatccttggctgagacacaatgttgacctcaagttgaaggcacttctggagaaatcagtcagtcgaaggcgggacactgaagctgtacagaaagccaaaatcctttattcatcctgcatgaatgagaaagcgattgaaaaagcagatgccaaaccactgctccacatcttgaggcattcacctttccgctggcccgtgcttgaagctaatattggtcctgaaggggtttggtcagagagaaaattcagtttactgcaaacactggcaacattccgcggtcaatacagcaattctgtgttcatccgtttgtacgtgtcccctgacgacaaggcatccaatgagcatatcttgaagttggaccaagcaacactctccctggctgtgagggaagactttctggataacactaccgaagccaaatcttatcgtgatgccctttacaaattcatggtggacactgctgtgcttttaggagctaatagctctcgagctgaacatgacatgaagtcagtgcttagactggaaattaagatagctgagataatgattccacatgagaaccgaaccagtgaggctatgtataacaaaatgaacatctcagagctcagtgctatgattccccagtttgactggctgggctatatcaagaaggtcattgataccagactctacccacacttgaaagacattggcccctcggagaatgtggtggtgcgcgtcccacaatactttaaagatttgtttaggatattaggtgctgaaaggaagaaaaccattgccaactatttggtgtggagaatggtttattccagaattccaaacctcagcaggcgctttcaatatagatggctggaattctcaagggtaatccaggggacaacaactctgctgcctcagtgggacaaatgtgttaactttatcgaaagtgccctcccttatgttgtggggaaaatgtttgtgaatgttcacttccaggaagataagaaggaaatgatggaagaattgattgagggtgttcgctgggccttcattgacatgctggagaaagaaaatgaatggatggatgcagggacaaaaaggaaagctcaagaaaaggcaagagctgttttggcaaaagttggctatccagagtttataatgaatgatacttatgttaatgaagacctcaaggcaatcaaattttcagaatcggactactttggcaacgtactgcaaacccgcaagtatttagcacagtctgatttcttctggctaaaaaaagctgttcccaaaacagagtggtttacaaacccaacaacggtcaatgccttttacagtgcatctaccaaccaaatacgatttcctgctggagagctgcagaagcctttcttttggggaacagaataccctcgatctctgagttacggtgctataggagtaattgtggggcacgaatttacacatggatttgataataatggtagaaaatatgataaaaatggaaaccttgatccgtggtggtctgtggactctgaagaaaagtttaaggaaaaaacaaaatgcatgattaaccagtatagcaactattattggaagaaagccggcttaaatgtgaaggggaaaaggaccttgggagaaaatattgctgataatggaggtcttcgagaagcttttagggcttacaggaaatggataaatgatagaagacagggagttgaagagcccctcctaccaggcatcacattcaccaacaatcagctcttcttcctgagttatgctcacgtgaggtgcaattcctacagaccggaagctgccagagaacaagtccaaattggtgctcacagtcctccacaatttagagtcaatggtgccattagcaactttgaagaatttcagaaagcttttaactgtccggcaaattccaccatgaacagaggtgcagattcctgccgactctggtagctggagtgctggtttctgccatcctgacagagctgaggagtgccggtagaggaggcactcacatactcagcacctactgctttttgcctatattttgtcgaagacttttatttttaatgcatttctattatttgggtagatgatttgcttggatctaaacagtatctgttcaaagtcattgggtttataaaaggaatgcaagaactgagggaaatacatctttttaaagtaagccaaaccaatgaaaacaagtgtcaaggctatttggttaaactgctcttggctgatctcccctatcatccctttatgttagccacggctaggtggtacctaacatttcaatctatagctctgcagggggcctgaggagaatgtatccatagaaaggatcagtcaatgaaaattgtcaccctcagtgataaagttgtgtgccctttggtgtacagtgattatacaacatttcttaattctaaagtggttaaattagaaatacgttggaccttcattttacagtttatgataaagtttttctcttcaggtttggagtctattggacaattatctcagaactttcttcagatgtagctaactgccctgtttaagtaatcatgaacaaagatggcatacagtcaatttggtaaaggatttgggtctataaaatagggaaaaagaacacatctttaactgccagcagtattaaaaactattaaccaccacaataacaactaatcacacaacaataaagataataggaaatgaaatctgcaaacgttgatccagtccctccatacatcagtggacatctatctgacggataacaatcatggagcagttctgattttgttttgttctgctcagatatcctgactgaactgagtatatattgaggaaataatattccgtttccatgtcaggaacatatggttttcatttcctttcagcatgatgatataatcaccacactgaggatggagtaaaaagcctcttccttctcagccactttatgttacctctccttaaaagaaaatttttgcaaaagtttctagaaagaaagcattttggtatatatgaatccaatttaagcaatcctgtctagatctaaaggacataactttactcttcaagtcttatgaaaggtttaatttttctaaaaacagtactgtattttgatctttagagcattatttttgtaatcatcacctatagtgttaattaattaacagtattagtgtgtatttatgtaggataactgttatcacatttaaaagtgtatgtaggataaaattataatggcattgaagtggtgagtatttcctgtttttttctattgttttaaaaattagtatagccatttttctacccccccattacataattcattatacatggggtgctgggttaagtgggccaatataaaaacttcaaaagcaaaatgacaaaatcagatgaaccacaggacttcattttgcatccttgtgacttgtcattcttttgcaaaaaaaaaaaaaaaaaaa

SEQ ID NO: 2209 - DNA, 2327 bp, Rattus norvegicus
gccgtgaatcggccctttgatacagtaatakaatwmmrgcggactggcaagcggtgsstcttagttctctactctcttgtgggaatgagttgccaacctttcacctcggctgatacctttatacctctgaattctgacgcttctgctgccctgcctctgagaatgcaccacagtgccgctgagggtctcccagcctccaaccacgccaccaacgtgatgtccacagcgacaggacttcattattctgtgccttcctgtcattatggaaaccagccatccacctacggagtgatggcaggcactttaaccccttgtctttacaagtttccagaccacaccctgagtcatgggtttcctcccctgcaccaacctctgctggcggaggacccaacagcctctgaatttaagcaggaactcaggcggaaaagtaaattggtggaagagccaatagacatggactccccggaaatccgagaactggagcagtttgccaacgaatttaaagtgagaagaattaagttaggatacacccagacaaacgtgggcgaagctctggccgctgtccacggctccgaattcagtcaaacaaccatctgccgatttgaaaacytgcagctcagtttcaaaaatgcttgcaaactgaaagcaattttatccaagtggctggaggaagctgagcaggtcggagctttgtacaatgaaaaagtgggagcaaacgaaaggaagaggaaacggaggacaactatcagtatcgccgctaaggatgctttggagagacactttggagagcacagcaaaccttcttcgcaggagatcatgcggatggctgaagaattgaatctcgagaaagaagtagtaagagtgtggttttgcaaccgaaggcagagagaaaaacgggtgaaaacgagtctcaatcaaagtctgttctctatttcaaaggagcatcttgagtgcagataagacttgcctgtggtagccatgtgtggtagcctttccattcctttctgatttsaagaaaaatcagaagttacttagcttcataaactagattaaatcagcaacccctgcagtttttgtttcactttcttctttctttccyttttagatccaatgatttaaaacaagacgwtttattyagttgttctcagaattcatrgcattgcctttactcctaaatcatcaccaagaatgctcacaatacctcttccaattctgcctttatacctaatacacagagakgtggkgataactgggagagaggccayyatatatgtgaatattttgagtttaaaattaccttttgtaagtcaatktattgttctttaaattttaatcagtaaggacaaatatttaccgactattaaccagggatggctcaaggttgataakctattgacttgkccagagagatgtctcagyggttaagagcatctgttgctcttccagaggatgtgggttccatcacctatacagctcacaactgtctgtcwcwctatttccagaggaaatccaaggagtctcctgggttccattgacactyggcctgaaaatgagcacagacatacatgtagacaaaatactcatacatatacagtaaaaataataaatctataaacaaaaagaaaatatattggtttatactcagtatgcccctagcactatgttttgttttgttttgttttggagtaaggtttgacaatccagaggtgactagagacaactaagaattttattaattgccttcagaaataatcttcagtcagaatctattgatatctttgacattaacacttaggacacgttttttgaacaatttgtaggagcatttaggcatgacatctgggcgtattcttttatacacattagctttctgaggctctgctacagaaaacatgtgagctgcaagctaaacttgctgacccaaataatccttcagttttggctttgttttgttttgtttggtagtgagttcaatcctgagcacaagtgaaatttaaaaatgaaaaatatggtttagggatccctaacctatatcataaatctgtgtggaagctgcactagggcgaggctacgtggcttacttgctgttatgtttccagtgactgaaaaagcactggctcctagtaggtatgtatagaccatgctaaaaggaatgggcccaatggtgaacaaccgctacaaatatgaagggtaccaggcaacctgaaaaatctaacttgtttttgaagtctcattgtagaaactcactgaggttccttaacaaagtgtcaattttggtctcactggtcacattttgatttattaataaaaattggaaatatgaaaaa

SEQ ID NO: 2210 - DNA, 1628 bp, Rattus norvegicus
aagctttccaagctgaggaactggcgggtgctagcaatggagtcggttgctgcagagagcgctccagctccggagaatgaacactctcaagagaccccggaatcgaacagtagtgtgtacaccaccttcatgaagtctcatcgctgctatgacctgatccccacaagctccaagctggtggtatttgatacttcgctgcaggtaaagaaagccttctttgccctggtgactaacggtgttcgtgctgcccctttgtgggatagtaagaagcagagctttgtgggcatgctgaccatcactgacttcatcaatattctgcaccgatactacaagtcagccctggtgcagatctatgaactggaggagcacaagatagagacttggagagaggtctacctgcaagactcctttaagccacttgtctgcatttctccaaatgccagcttgttcgatgctgtctcttcattaattcgaaataagatccacaggsttccagttattgacccggagtcaggcaacaccttgtacattcttactcacaagcggatcctcaagttcctcaagttgtttatcactgagttccccaagccggaattcatgtctaagtctctggaagagctacagattggcacctacgccaatattgccatggtccgtaccactacacctgtctatgtggctctgggcatctttgtacagcaccgagtctccgccttgcctgtggtggatgagaaagggcgtgtggtggacatctactccaagtttgatgtgattaatttggcagcagaaaagacatacaacaacctagatgtgtctgtgacaaaagccctacagcaccggtcacactacttcgagggtgttctcaagtgctacctacatgagactctagaagcaatcatcaatagactggtggragcagaggttcaccgtctggtggtggtggatgaacatgacgtggtcamgggcattgtatcgctgtctgacatcttacaggctctggtgctcacaggtggagagaagaagccctgagcatggggcggaacaggcagkgcctggggagatggccccctcactgcctgcctgctgtaagagccggaatcagatggaatcytgagagaacggagtcttccctcaggasbtccacgsccactgtctagaactkagagaagggraarggaggagaasgactgwbdgctkctctcaccatsgwgctacacttagagaaaacacttgtcagcctagccagccccagtcgctcgtcacagcccccttgtgggtgaaccatgggttttgtgctcctcasgcagatcctgatctytaagagatccckagacctcaccacgccccacctctgtytytgcccttactccamtaagrgaatagctctgcagaagtcttggtaaagtawttttattcctcyttcttcactctgtgtggaggaggctggsctgtwtgctgtcagtccttcccatgagtctcgggaggtgcgtcycggctcctggsctgtgcagacgaargcagatgsctctgtggaggagggcggtgggtagggasccaagattaatgctttttgtggcgaacctaattaaatgacaaggtttcatcwtgrwaaaaaaaaaaaaaaaaaa

SEQ ID NO: 2211 - DNA, 3015 bp, Rattus norvegicus
cggccgcgcggaggggacgwtgctgtcgmwckctggaagcyggmgkyacwggttcctgagcaacatgggaaatggttcagtgaaacccaagcattcgaagcacccagacggccagtcagggaacctcagcaatgaagccctgcggagcaaagtggcagagctggagcgcgaggtgaagaggaaggatgcagaacttcaggagcgcgagtaccacctgaaggagcttcgggagcagctagctaagcagaccgtggccattgcggagctcaccgaggagctgcagagcaagtgcatccagctgaacaagctgcaggatgttatccacgtgcagggaggaagcccactgcaggcctctcccgacaaagtgcctctggatgttcaccgcaagacctcaggcttggtctccctccacagcaggaggggggcgaaggctggagtgtctgcagagcccacaagccggacctatgacctcaacaagccccctgagttctcctttgagaaagcgagggtcaggaaggattccagtgagaaaaaacttatcacagacgccctgaataagaaccagtttctgaagagactggatccgcagcagatcaaagacatggtggaatgcatgtacgggagaaactatcaacagggcagttacatcgttaagcaaggggaacctggaaaccacatctttgtgctggccgagggtagactggaggtgttccaaggagagaaattgctgtcgtccatcccaatgtggaccacgtttggggagctggctattttgtataattgtacgcggactgcctctgtgaaagctattaccaatgttaaaacttgggctctcgatagagaggttttccagaacattatgaggagaacagcgcaagccagggatgaggaatacagaaacttcctcagaagtgtctccttgttgaagaatttacctgaagacaaactaaccaagattattgactgcttggaagtggaatactatgacaaaggagattatatcatcagagaaggagaggaagggagcacctttttcatcttggcaaaaggaaaggtgaaagtcacacagagcacagagggccatgatcagccacagttgatcaaaacactgcagaaaggagagtactttggagaaaaggctctgatcagtgatgatgtcagatcggccaatataatcgcggaagaaaatgatgtcgcatgcctcgtgatcgaccgagaaacattcaaccaaactgtcgggacatttgatgaactccaaaaataccttgaggggtatgtggccaccctgaaccgtgacgatgaaaagagacacgcaaagcgctccatgtctagctggaagttgtccaaagccctttctctggagatgattcagctgaaagagaaggtggccagattctcctcaacctccccattccagaaccttgagattatcgcaacactgggcgttggtgggttcggaagagtggagcttgttaaagttaaaaatgagaacatcgcttttgccatgaagtgtataaggaagaagcacattgttgacactaaacagcaggaacatgtctactccgagaagaggatcctggaggagctgtgttctcccttcatcgtgaaattgtatcgtactttcaaggacaataaatacgtatacatgcttctggaggcctgcttaggtggggagctctggagtatattaagggacagaggcagcttcgatgaacccacctccaaattctgtgtggcctgcgtgacagaagcattcgattatctacaccgactaggcattmwckasrgagacctgaagccagagaacttaattctggatgccgatggctaccttaagttggttgactttggattcgctaagaagattggctctgggcagaaaacgtggacattctgtgggactccagagtatgtggcccccgaggtcattcttaacaaaggacatgacttcagtgtggatttctggtccctggggattytggtctatgagcttctaacgggcaaccctcccttttctgggatagaccaaatgatgacctacaatttgattctcaaagggatcgagaaaatggattttcctagaaagataacaaggcgacccgaggatttgatccggaggctttgcaggcaaaacccaacagaaaggctggggaacctgaagaatgggatcaacgacatwaagaaacacaggtggttaaacggtttcaattgggaggggttgaaagcacggagccttccctcacctttacgaagagagctcagtggccccatagatcacagctactttgacaagtatcctcctgaaaagggggtkcctccggatgaaatgtcaggctgggataaggacttctgacaggagagaaaccgacgccaccgtggaagaggaccgtgaggatcggtgacacgatgctgattatccctctcttcaaagcattgttagatctcccggaagacaatggcagaaaagaaaaccctgatagacagggaaggagagtggccggatgtggttctgaatgagaatgtgtcctttagatgctgtgaattattcctgtattccattctgttcttgtctaaagatgtcaaaggttgttcctttccatttccatggtccratccattttcgttggcatascacagttttctctcaaatcrgttkctccctccaaatcaaactctcctgcctagaatcctaataatattaatatggcttttgttctygagcacctaagttatccagatagaaggaagactacagaacaacgttagaagaatcactccagggctcagcagacaccagggacttcctcctccgattgtggtttccagacatcttggraagtcaatagaagaccatgaattttattttctttcaacttacagatacactaatatattttycgatgttattgargcaaaaggaaacatttggatattaatgagtagtgccagttactaaagaaggccagtcaatcaaatcagataatcatatcakttttcgayarmaamraaaaaaaa

SEQ ID NO: 2212 - DNA, 471 bp, Rattus norvegicus
atggctgcaggaagacttcggatcttgtttctgctgctcctgtccttgcacctgggccttggctgggtccttgatcttcaagaggctcctgcggcagatgagctctcatctgggaaaatggcagagactggaaggacctggaagccccatcagggtaacaacaatgtccgccttccaagagccttacctggtttgtgccggctgtggagcctgaccctaccagtggctgagcttggcctgggctatgcctcagaggagaagattatcttccgatactgtgctggcagctgtccccaagaggtccgtacccagcacagtctggtgctggcccgtcttcgagggcagggtcgagctcatggcagaccttgctgccagcccaccagctatgctgatgtgaccttccttgatgaccaccaccattggcagcagctgcctcagctctcagccgcagcttgtggctgtggtggctga

SEQ ID NO: 2213 - DNA, 3974 bp, Rattus norvegicus
gctcttttcttctccctcgctatccgctcccccgcccccgtgcctctggctctgcgcctggctccctcgggtccgctcccctttcccgccggcctggcccggcgtcacgctcccggagtctccccgctcggcggcgtctcattgtgggagggggtcagatcaccccgccgggcggtggcgctggggggcagcggagggggaggggccttagtcgttcgcccgcgccgcccgcccgcctgccgagcgcgctcaccgccgatctccctccttgctctgcagccgcggcccatggagcccgccggcccggcccctggccgcctagggccgctgctgttctgcctkctgctctccgcstcctgtwtctgtgcaggagccagcgggaaagaactgaaggtgactcaggctgacaaatcagtgtctgttgctgctggagattcggccactctgaactgcactgtgtcctccctgacgcctgtgggacccattaagtggttcaaaggagaagggcaaaatcggagcccgatctacagtttcataggaggagaacactttcctcgaattacaaatgtttcagatgctactaagagaaacaatatggactttagcatctgtatcagtaatgtcaccccwgaagatgctggcacctactactgtgtgaagttccagaaaggaatagtagagcctgacacagaaattaaatctggagggggaacaacgctctatgtactcgccaaaccttcttcaccggaagtatcgggcccagactccagggsctytcctggacagacagtgaacttcacctgcaagtcttacggcttctctccccggaatatcaccctgaagtggctcaaaratgggaaagaactctcccatttggagaccaccatctccagtaaaagcaatgtctcctacaacatctccagcacagtcagcgtgaaactaagccccgaggacattcattctcgggtcatctgcgaggtagcccacgtcaccttggaaggacgcccgcttaatgggaccgctaacttttctaacatcatccgagtttcacccaccttgaagatcacccaacagcccctgacgcccgcgagccaggtgaacctcacctgccaggtgcagaagttctaccccaaggctctccagctgaactggctggagaatggaaacttatcacggacggacaagcccgagcatttcacagacaacagggatgggacctataattacacaagcctgttcctggtgaactcatctgctcacagagaggatgtggtattcacgtgccaggtggagcatgacagtcagccagcgatcaccgaaaaccataccgtgcgggcatttgcccactcgagtagtggaggcagcatggaaaccatccctgataataatgcttactacaactggaacgtcttcatcggtgtgggtgtggcgtgtgctttgctagtagtcctgctgatggctgccctctacctcctccgaatcaaacagaagaaagccaagggctcaacttcttccacacggttgcacgagcccgagaagaatgccagggaaataacccagatccaggacacaaatgacatcaacgacatcacatacgcagacctgaatctgcccaaagagaagaagcccgccccccgggtccccgagcccaacaaccacacagaatatgcaagcattgagacaggcaaactgcctaggccagaggataccctcacctatgctgacctggacatggtccacctcaaccgggcacagccaacccccaagcctgagccatccttctcagagtatgccagtgtccaagtccagaggaagtgaatggggctgtggttggctctaggccccatccccacaagttttcttgtcctacatggagtggccatgatgaggacaaccagccagccagccctgtctccagaaggccaggtggcacaggtcctaggaccaggggtaagggtggcttctgtcttccctccgtggctctccaacacctcttggacacccatgtccccttcttctggagctgggtgttgcagaaccagagggggaactggagaaagctgcctagaatccaagaagcgttgtgcctcagcccatcacactgggtctggatcctggtcttggcaacccccaggttgcttccttgatgctccagcgcctggtcttctgtgtggagaagagttcaccatctccatccaacttgagcttcggggccagactccctttagatcagaccgccccatgtgtggaagaactacaccaggagtcaacaagttttcacatgtgtgaagaactacaccaggagtcaacaagtttacgccaacagtgctagcctccccacctcccaggctgacgagccctgaggagaaggaaccctcttccccctagaccagcwgagactccctgggcatgttcagtgtggccccacccttccagtcccagctcgcttcctccagctagcactaactcaacagcattgctctgtggacgcctgtaaattattgagaaatgtgaactgtgcagtcttgaagctaaggtgttagaaaatttgatttgtgctgtttagttgttgttgggtttcttttcttttcttttttttcttcctttttctttcttctttttttcttttcccccttaaaacaacagcagcagcatcttggctctttgtcatgtgttgaatggttgggtcttgtgaagtctgaggtctaacagtttattgtcccggaaggattttcttatagcagaaacagattttttttccaattcccagcaccctgaggaccaagaaggatccctctgttgtcattttcagcactcagcgtcactgggatgagccaggctctgtccccacagctggcccttggcctccatggctactgtggtaagtgcagccttgtctaatccagtgctgacgttggccattcctcattgaggagagaaggtcagtgacaaactcacaagcactgcagaggcatacggagagaagggacgctcggccagcacccggtattccagcgctctgaggtaatcagtgcaaggagtctgttattaccatcagacctcagcaggatcatactggaacagaacctgatcatacctgtgacaacacagctgtsagccagggcaaaccaccccactgtcccagagtctgggcagaggctctgacccccacccttcaaactggatgtcggggcctggctgggcccaatggcaagcagatgttgcaaccctagctatctggtcttaacatgcagctcagtaagttgaggcgctaatgtccccccatgccgggggattcctggttccggctcttcaagtaagaagctgattcaacctgcctgtttctgtaggtgtgacagggatgtcaggaaaacagccaggactcatctctatagggctggtgacctgatacttcccataaaggcatccaggagttagctgacccaatagtcagagttgacctcactggcctagcaaaccgtaacttgtctttggcccagccatggtcttgggctgtcttctaattccaaagggttggtaggtaaagakccatcctyttyyyytytgccaagagrcatcacgtgtktacacacacacatgsgsgsgcgsgcacacacacwcacacacacacacacacacacacacacacacacacgggtgtataggygrswyrarrggatgtcctcgctgacatcctaattttgtcttaagtttttttggagggagaawrsaamgaggcagggmasatacgtagctctagctttagtcaggcrgcytggggggatccccaagcctatgtatggaaccytggtacraaagcgccctgtgaggagtgggatytcagttttatctgtagaccagatgagaaggagaaaggccccattttgtacatagttgcmacttaaaatttttggcttgcaaaatatttttgtaataaagatttytgggtarmawhraaaaaaaaaaaaaaaaaa

SEQ ID NO: 2214 - DNA, 743 bp, Rattus norvegicus
tcggcttcttctggggcccggtcgccagcgcagtcgccacggtccgtgtcgccagcttgtctcagtttagagagggcaagatggcctcagccacagactctcgatatgggcagaaggagtcctcagaccagaacttcgactatatgttcaagatcctgatcattggtaacagcagtgtgggcaaaacctcattccttttccgctacgcagacgactcttttactccagcctttgtcagcactgtgggcatagacttcaaggtcaaaaccatctaccgcaatgacaagaggatcaagctgcagatctgggacacagcaggacaagagcsgwrscgaaccatcaccacagcctactaccggggcgccatgggcttcattctaatgtatgacatcaccaatgaggagtccttcaatgcagtgcaggactggtccactcagatcaaaacttactcatgggacaatgcccaggtgctgctggtggggaacaagtgcgacatggaggacgagcgaktggtgtcctcaraacgaggccggcagctggccgaccacctgggctttgagttctttgaggccagcgccaaggacaacattaatgtcaagcagacctttgaacgtctggtggacgtgatctgtgagaagatgtcggagtccctagatactgcagaccttgcagtcacgggtgccaagcagggcccacagctcaccgaccagcaggcaccacctcatcaggattgcgcctgctga

SEQ ID NO: 2215 - DNA, 1360 bp, Rattus norvegicus
gggttcctctcgctctcgagactggaggacgaaccccgtggagctgtggcgcaggatggcgagaccgccatgtccgagacttacgatttcttgtttaagttcttggtcattggaaatgcgggaactggcaaatcctgcttgctccatcagttcattgagaagaaattcaaagatgactcaaatcataccataggagtggaattcggtcaaaagataataaatgttggtggtaaatatgtgaagttacagatatgggacacggctggacaggagcggttcaggtctgtcacgacaagctactacagaggtgcggctggggcactcctcgtctatgacatcaccagccgagaaacctacaatgcgcttactaattggttaacagatgccagaatgctggcgagccagaacatcgtcatcattctctgcgggaacaagaaggacctggatgccgaccgggaagtcaccttccttgaagcctccaggttcgcacaagagaatgagctcatgttcctggaaaccagtccactgactggcgagaacswcgargaggctttcatgcagtgcgcaaggaagatacttaacaaaattgaatcaggtgagctggaccccgagaggatgggctctggtatccagtatggagacgccgccttgagacagctacggtcaccccgacgtacacaggctccaagtgcacaggagtgtggctgctaggcaccccagcaacacaggttcagtggtggtttctggagcacasccgcaggagcccgaagagctgaagattttactaccatctactactctgcacaraagtagatctccacgggaacggtgcacgccggcagccagggctcagcarccgttytgcaaactaactcagaggacagacagtacctttacatgccacacgtatgcagatcyccgccccacacgtacccttcatgttccgttaaatccagcttgtgctgcacacagcccagcacgttcccacacagmacagagccagtgtgacatgwtagratycsrcacsmrrtkwkctttttytatktaarctcacgggaaatgcagttgtgartgagagarwgagcgagcgygtgtttmtcattgtgtcggktaactcccaggaratsccagtttgtgaargtggagcgtgcttttctcattgtktcagttacacgcgtgaytcagtaygaaaggastytggtgtgaacagccagtgcgyttsttawytaatccctctcacccacttwtacactgtktctgtaatyccacacctgaaatgctaarcccacaggactcgttaacaryctggaaataaagtggaaccgagtttykcatgchmmrwmaaaaaaaaaaaaaaaaa

SEQ ID NO: 2216 - DNA, 1353 bp, Rattus norvegicus
cggcacgaggacatgggcacacagcagaaggacktcaccatyaagtcagatgcgcctgacaccctgctgctcgagaagcatgctgattatatcgcctcgtacggctcaaagaaagatgattatgaatactgcatgtccgaatacttgagaatgagcggcgtctactggggcctgacagtgatggacctcatggggcagcttcatcggatgaataaagaggagatactggtgtttatcaagtcgtgccagcatgagtgtgggggagtcagtgccagcatcgggcaygacccccaccttctctacacgctcagtgctgtccagattctcactctgtatgatagcatccatgtaatcaacgtagacaaagtggtagcctatgttcagagtctacagaaagaagatggttcctttgctggagacatctggggagaaatcgatacaagattctcattttgtgcagtggcaactttggctctcttgggcaaacttgatgctattaatgtggaaaaggccattgaatttgttttgtcctgtatgaactttgatggtggatttgggtgcagaccasgctctgaatctcacgccggacagatctmwygyygsacaggattcctggccataactagtcagttgcatcaagtgaactccgacctacttggttggtggctttgtgaacgacagttgccctctggcggactcaatggaagacccgagaagttaccagatgtgtgctattcctggtgggtgttggcctccttaaagataatcgggagrcttcattggmwygasagagaaaagcttcgaagcttcatcttggcatgtcaagatgrmrmsasrggagggtttgcagacaggccaggaracatggtggatccctttcacaccttgtttkgcattgctggattgtcacttctgggggaagagcagatcaagcctgtcarccctgtcttttgcatgcctgaagaagtgctacagagggtgaatgtccagcctgaactagtgagctagtccgaggggaagagccttcrgtgtgcagtatcagttactgtggttatcaaacccagaagtgacttaatattttgkatatcatatgtcaatgataaattayataagkattgtaaaataaatgtcatatttagatctttarwrwwmwrarwamarwwtytgtcamtactgtttgttaatgtctaacagcagcaaacttaaaaagctagtatttaactgccatctccctgtgtccttttgacctgtaacaatgacgggaaatgatttctgttaataaagatgatcaaagtgagtgaaactcatgatttaaataaaagatgcwtaaahtcgarmwmrwmmaaaaaaaaa

SEQ ID NO: 2217 - DNA, 4730 bp, Rattus norvegicus
gggccgggcggaggttcgcgggcggcgctaggccgggcgaagcggcatgagccggcccccgccgacggggaaaatgcccggcgcccccgaggccgcggccggggacggggcgggcgcgggtcgtcagaggaagctggaggcgctcatccgagaccctcgctcgcccatcaacgtggaaagcctgctggatggcttaaattccttggtccttgatttggattttcctgctttgaggaaaaataaaaatatagataatttcctaaatagatatgagaaaattgtgaaaaaaatcagaggtttacagatgaaagcagaagactatgatgttgtaaaagttattggaagaggtgcttttggtgaagttcagttggttcgtcataaggcatcacagaaggtttatgcaatgaagcttcttagtaaatttgaaatgataaaaagatcagattctgcttttttctgggaagaaagagatattatggcttttgctaacagtccgtgggtggttcagctcttttgtgcctttcaagatgacaggtatctgtacatggtgatggagtacatgccaggtggagaccttgttaacctgatgagcaattatgatgtgcctgagaagtgggccaagttttatactgctgaagtcgtgcttgcactggatgcaatacactccatgggcttaatacacagagatgtgaagcccgataacatgctattggataaacacggacatctaaaattagcagattttggcacatgtatgaaaatggatgaaacaggcatggtgcattgtgatacagcagttggaactccagactacatatcacctgaggttctgaaatcacaaggaggtgatggttactatggacgagaatgtgattggtggtctgtaggtgttttcctttttgagatgttagtaggggacactccattttatgcagattcacttgtaggaacctacagcaaaattatggatcataaaaattcactgtgttttcctgaagatacagaaatttctaaacatgcgaagaatctcatatgtgccttcttaacagacagggaggtacgacttggaagaaatggggtagaagaaatcaaatcagcatccttctttaagaatgatcagtggaattgggataacataagagagacggcagctccagtggtgcctgagctcagcagtgacatagacagcagcaactttgatgacattgaggatgacaaaggcgatgtagagaccttcccgattcctaaagcttttgtgggaaatcagctgccttttataggatttacctactttagagaaaatttgttactaagtgattctccaccttgtagagaaaatgatgcaatacaaacaaggaaaagtgaagaaagtcaggagattcagaaaaaattatatgcactagaagaacaccttagcagtgaggtacaagccaaggaggaactggaacagaagtgcaagtctattaatactcgtctagagaaaacagcaaaggaactagaagaagagattacctttaggaaaaatgtggaatcaacattaagacagctagaaagagaaaaggcccttcttcagcacaaaaatgcagaatatcaacggaaagctgatcatgaagctgacaagaaacggaatttggaaaatgatgttaacagcttaaaagatcaacttgaagatttgaagaaaagaaaccagagctctcagatatccactgagaaggtcaatcagctccagaaacaactggatgaagctaatgctttgctaagaacagagtctgatactgcagcacggttaagaaaaacccaggcagaaagttccaaacagattcagcagctggaatctaacaatagagatctacaagataaaaactgcctgcttgaaactgccaagttaaaacttgagaaggaatttatcaatcttcagtcagctctagaatctgaaagaagggaccggacccatggatcagagataattaatgatttacaaggtagaatatctgggttggaagaagatttgaagactggcaaaaccttactagcaaaagtagagctggagaagagacagctgcaggagaagctcactgacttagagaaggaaaagagcaacatggaaatagatatgacatatcaactgaaagttatacagcagagtttagaacaagaagaagctgaacacaagaccacaaaagcacgactagcggataaaaataagatctatgaatccattgaagaagctaaatcagaagccatgaaagaaatggagaagaagctgtyggmmgaraggtytttaaagcagaaagtggagaacctactyctggaagccgagaagagatgttctatattggattgtgacctcaaacagtctcagcagaaactgaatgagctgctgaagcagaaagatgtgctgaatgaggatgttagaaatttgacattaaaaatagagcaggaaactcagaagcgttgtcttatgcaaaatgacctgaagatgcagacccagcaagttaacaccctaaaaatgtcagaaaagcaaataaaacaaraaaawaawmatcttatggaaatgaaaatgaacttggaaaagcaaaatgctgaacttcgaaaagagcggcmggmygcaratgggcagatgaaggaactgcaagaccaacttgaagcagagcagtatttctcaaccctctataaaacacaagttagagamcttaaagaagaaaatgaagagaaaactaaactttgtaaagagttgcagcagaaaaagcaggatttacaggatgaaagagactccttggctgcccagctggagatcmcyckyrccraagcagactctgagcagctggctcgctccattgctgaggagcaatactctgacttggaaaaagagaagatcatgaaagagctggaaatcaaagagatgatggctagacacaaacaagagcttactgaaaaggacgctacaattgcatcccttgaagaaacaaatagaacactaactagtgatgttgcaaatcttgcaaacgagaaagaagaactaaacaacaagttgaaagatacccaagaacaactgtcaaagttgaaagatgaagagatcagtgcagcggctattaaagcacagtttgagaagcagctgctgactgagcgaacactcaagactcaagctgtgaataagttggcagagatcatgaatcgaaaagaacctgtcaagcgtggtagtgacacagatgtgcgaagaaaagaaaaggaaaacagaaaattacatatggagcttaagtctgaacgtgaaaaattgacacaacagatgatcaaatatcagaaagaactgaatgaaatgcaggctcaaatagctgaagagagccaaattcgaatagaactgcagatgaccctggacagtaaagacagtgacattgaacagcttcggtcgcagctccaggccttgcatattggtatggacagttccagtataggcagtggaccaggggatgctgagcctgatgacggatttccagaatcacgattagaaggatggctgtcgttgcctgtgcggaacaacactaaaaagtttggatgggttaagragtatgtgattgtaagcagcaagaagattcttttctatgatagtgaacaagataaagagcagtctaacccttacatggtgttagacatagacaagctatytcatgtccgacctgttactcagacagatgtatacagagcagatgctaaagaaattccaaggatatttcagatcctgtatgccaatgaaggagaaagtaaaaaggaaccagaatttccagtggaaccagtgggagaaaaatctaattatatttgccacaaaggacatgagtttattcctactctttatcacttcccaaccaactgtgaggcctgtatgaagccactgtggcacatgtttaaacctcctcctgctctagagtgcmgtagatgccacattaaatgtcataaagatcacatggacaaaaarraararawmatagccccctgcaaagtttattatgatatatcatcggcaaagaatctgttgttattagcaaattcaacggaagaacagcagaaatgggttagtcggttggtgaaaaagatacctaaaaagcctccagctccagacccttttgcccgatcatcccctagaacctcaatgaaaatacaacaaaaccagtccattcggcggcccagtcgacagmttkctsmaramawammwrgctaacttgccttctatgaaagcagttattgaaggtgatcatattcttccatccacaagactgaaatatggtttctcaaaacttaactaaaaagctatatttttactgagacacatacatacaccacatgtcgctcgttgcgtgcatgcttgcastcccttcccccctgaaataattacaaatcatggagaggtttgtctgggctactttgaacagttgaacaaacaatggttggtgaggtaaaaaaagtgtcctacaattctcccagacttgcttcataaagctcttggcagtcacactacattgcacaggattgagaagagtttaaagaaatcacatttcagcttcaacagagggtttcaccagcatattagtcagaagaatttgggagtgaatcccactacagtgatgctgactgcatctttaagaagtgaccatgatgttgtgttcatgtatggtatgtatatacatatgagttgagcctcatatatatatacacatacacacattcacataaacaca

SEQ ID NO: 2218 - DNA, 2414 bp, Rattus norvegicus
gcgggctagaggagacagagcctggcgctgaggaaggaatctggcagtcgagagctgactccagccgacggaacctgcagcccttgctccggacagcagcgcgccgggcaggagtccgggatagcgaagcgcagagcaatcagcagagcctgcccggagctccgtgcaaccggcaactccgacccacatagcccgccgagctcccgccgccggtccgggcagcatgagacgtgcggcgctctggctttggctctgcgcgctggcgctgcgcctgcagcctgccctcccgcaaattgtcaccgcaaatgtgcctcctgaagaccaagatggctctggggaygactcwgacaacttctctggctcaggcacaggtgctttgccagatatgactttgtcacggcagacaccttccacttggaaggatgtgtggctcctgacagctacacccacagctccagaacccaccagcagggataccgaggccaccctcacctctatcctgccggctggagagaagcctgaggagggagagcccgtggcccacgtggaagcagagcctgacttcactgctcgggacaaggagaaggaggccaccaccaggcctagggagaccacacagctcccagtcacccaacaggcctcaacagcagccagagccaccacggcccaggcatctgtcacgtctcatccccacggggatgtgcaacctggcctccacgagaccttggctcccacagcacccggccaacctgaccatcagcctccaagtgtggaggatggaggcacttctgtcatcaaagaggttgtggaggatgaaactaccaatcagcttcctgcaggagagggctctggagaacaagacttcacctttgaaacatctggggagaacacagctgtggctggcgtcgagcctgaccttcggaatcagtccccagtggatgaaggagccacaggtgcttctcagggccttttggacaggaaggaagtgctgggaggtgtcattgctggaggcctggtgggcctcatctttgctgtgtgcctggtggctttcatgctataccggatgaagaagaaggacgaaggcagttactccywsgaggagcccaaacaagccaatggcggtgcctaccagaaacccaccaagcaggargagttctacgcctgatggggaaatagttctccccccacaacccctgccactcactaggctcccatttgcctcttctgtgaaaaacttcaagccctggcctccctaccgctgtgccgtctcctctgcacccagacccttctgcccgagcggtctcagggtgtgctgggaattccttctcctctgacttctgctagaagcttgggtgcagagggtttcttgcattttgtctttctaccacagccacgcctgttgtccactcttctgacttggcttctccaaatgggaggagactcagctctggacagaaagggaacccaactgctttggacctagatggcctattgtgactggaggatcctgaggacaggagaggggcttcaacagacacgccatagcacttacccatagagaccattagggttggctgtgctgtggtagggaaggagtccagggctccttggaattcacttctcattgtggggaggtctactttagacaacttggttttgcacatgtttcctctaatttttctgttttagagccccagcagaccttacttctggggtaaggcaagtcagttgactggtgtccccacctcgyttccctaatctacattcgggagaccscatcggggttaaataagacttttcattttcgkttttgtttttaacctagaagaaccaaatccggacaccaaaacgtaggcttagtytgtgtgttgtctctgagtttgtcgctcatgcgtgcaacagggtatgsactatctgtttggtgccccatttttggtggcccataagtaggctggctagcccaggatgccatggaktagccacctcttgaccagtcatgcctgtgtgcataracycagggccatggcctttgtgacattggaagagcctgtgtgagaacttcctcctagattagtctarggatggargggargaractgtayagtttggragragggktgmcaagggtgtccaagaytctcccacctttggtrctaactctsgtcaccctttctcctggaagttgacaagacacatcttgagtatggctggcactggctcctccatcaagaaccamgttcaccttcagctcctgtggccctgttcccagsctggagtcagaaatgtttcccaaagagtgagagtcttttgcttttggcaaaacgctacttaatccaatgggttctgymcagtagattttgcagatgtaataaactttaatwtaaaggrrwmmwwwdaaaaaaaaaaaaaaaaaa

SEQ ID NO: 2219 - DNA, 3026 bp, Rattus norvegicus
ggagaaggcgacctggagcagcggggrcgcacggacagagacccaggctgtgtggcgctataaccgcgcagtcacaggcgagccagagtgcagcagagccatggccctgagcgatctggtgctgctgcgatggctgcgggacagccgccactcgcgcaaactgatcctgttcatcgtgttccttgcgctgctgctggacaacatgctgctcaccgtcgtggttcccatcatccccagctatctgtacagcattaagcatgagaaaaactctacggaaatccagaccaccagaccagagctcgtggtctccacctccgaaagcatcttctcttactataacaactctactgtgttgatcaccgggaatgccactgggactcttccaggagggcagtcacacaaggctaccagcacacagcacactgtggctaacaccactgtcccttcggactgtcccagtgaagacagagaccttctgaatgagaatgtgcaagttgggctgctgtttgcctccaaagccactgtccagctcctcactaacccattcataggacttctgaccaacagaattggctatccaattcccatgtttgccggcttctgcatcatgtttatctcaacagttatgtttgccttctccagcagctatgccttcctgctgatcgccaggtcccttcagggaattggctcctcctgctcatccgtggctgggatgggtatgctggccagcgtgtacacagatgatgaggagagggggaassccatgggcattgctttgggtggcctggccatgggagtcttagtgggaccccccttcgggagtgtgctctatgagtttgtggggaagacagctcccttcctggtgctagctgccttggtgctcttggatggggctattcagctctttgtgctccagccgtcccgagtacagccagagagtcagaaggggacacctctaacgaccttgctgaaggatccatacatcctcatcgctgcaggctccatctgctttgcaaacatggggatagccatgctggagcccgccctgcccatctggatgatggagaccatgtgttcccgaaagtggcagctgggcgttgctttcctcccggcgagcatctcttatctcattggaaccaatatttttgggatacttgcacacaaaatgggaaggtggctatgtgctcttctgggaatggtaattgttggaatcagcattttatgcatcccctttgcaaaaaatatctatggactcatcgctcccaactttggagttggttttgcaattkkkatggtggactcctctatgatgcctatcatgggctacctggttgacctgcggcatgtgtctgtctatgggagtgtttatgccattgcagacgtggccttttgtatgggctatgctatcggtccctctgctggtggtgccatcgcaaaggcaattggctttccttggcttatgacaattattgggataattgatatcgcttttgctccactctgctttttccttcgaagtccacctgctaaggaggaaaaaatggctatcctcatggaccacaactgtcccattaaaasaaagatgtacactcagaataatgtccagtcatatcccatcggtgatgatgaagaatctgaaagtgactgagaccctctaacgtcgccmaatgtttaactgtgtagaagtgtttccagtgagatgacttatgcagagctgtcttagtcccaccatccattgctggcaaagagtaaaaacaaccaaaggtgatactttcttttccatggttatgattgactgccaacagccttataaagaaaaagywkyttttytwkkkktttkkwwwwwtagkgytgaaaactttattttawgtatttgatwywattaatattatacaatatattwygacgaaataggtatactgyaaatgtataaatatttgaatccaaattaaatataattkttaaacttacattcattaamamwwrramaaaaaaatcttatyttttttctgaatactggtaatgagtgtttaaagcacacattatcttgagactctscaacaaaaaactarcagtctgarraacagaccatgtwagacagckcgttatgtaccaacactgaatgtgtwgwtatttaacttgtaactagtaccaatgtgtttaggaatttacaactcgtcatcttaagtgcagagggaagagactttatcasccatctttmagacttawtcataaacctttgctggcactarttttctgttgtaaccacccacctgaatggttgtaaatgattttctgggttatgtcatcggcagcagtcactaaagccgacaaggggtgaaacatgaatgttctgaaggcagaggagagaatccaaatgctgctttcttttatataaatgcttgatggtcttcttgggtgagaacaaaacgttatgcactttaaacagtcaaggttaagtatgatgtggtttatcaaatccggctcatgttctagaaaacaaggctatcaagctgctataatgtgaaaaatcaaactatcacatctcccacctgcttcaggtcatctgagtgttttttctagagatttgttaattttgagttgctgttattttttagactcytaaaaggttgttcatatcaatktagaaatgagtttcacgcaaagatgratscaatgaamctgcccgtgtctagcacagtaatgttcaaggtaatgragtggtcggsacrmskycycktkctgaascagagaaamccwtctacaagcgtgtgtgtgttactgcatcatctgtgcgctggtagamcaatgttcytaagcacgacamcactgatcgatcttttcagtatgccagctaatactgcwagtgamcmctatctataattgctttgtatgagattmcawtctkctggaatacaaacacagtatgggatctgtcttaaatagtatcaattctgcagttctgtaatcaaaaaaaaaacactgtcaattgtgttaatctgatctgtgtcacgttgcacataaag

SEQ ID NO: 2220 - DNA, 3493 bp, Rattus norvegicus
ggatcctgttaatattgaacttcagggcttttacatacacgtgacataactatatatccataatacaacccacacgtcttctcgtgtgtggtttaaagcatctctagattacctgtgacaccaccgtgagcaagctatgaaacgttactcactgtactgcatggcttagggaaacacgagggaaatagtctgtacaagttcagtacaaaactatttccatccgtgcgtggtgggtggaatcagttaggtgaagacacaggacaaagagatggctgtggtaggacccccttctcctaggctggttgtggctctccttacagtggtgggaatcgcgcagttcctagggattgcatgctctggggaagtcagtaacggtggctaagggatttgtattgcgttttccccagccccatccagcaatctcatcctcctgagaatttctccaggagaccaagaacttggctgagttctctgcaaagtcctgcactcgtttttccacagagaaatcagtccacagagatgccaggtctgcttcaaaaagcacctgccacagataagcctcagcctatagacccttggctccaggtgcctccgtccctcctgtgtagctactccttttctgcttcacgtggactccgtgcaagccaggcgtggcaactgtgcgaggtgcccactgcgggagcacagaggtctttttgtgccaggcggtcaccaccccttagcccggcccctccctgctcaccgaacagactttactgccggcccgggcgcccgcagtctctcttgcagctttgctgacwkagagcactgcacacctaggagctgcttcccgacggtgcggtgcagcgcagcagcccaggggcccagcgttcctgccgcgcagcccctccgtcgcggktcccctccctcggggctgatcattaactcaaaagcagtataaggagtgagtggccccggtgagccggtgasccggagggactcgtcgccaccgccatggacagtagcaccttgagccccgctgttactgccaccgatgcacccatccagtcctatgagcgcattcgcaatgcggctgacatatcagtcatcgtcatctacttcgtggtggtgatggctgtcgggctgtgggccatgttttccactaatcgtgggactgttggaggcttcttcctggcaggccgaagtatggtgtggtggccgattggagcctctctctttgccagtaacatcggaagtggtcactttgtggggctggcgggcacaggagcagccgcaggcattgccatgggtggcttcgaatggaacgccttggtgttcgtggtcgtgctggggtggctttttgtccctatttacatcaaggctggggtggtgacgatgccggagtatctgcggaagcgatttggaggcaagcggatccagatctacctttccgttctgtccctgctcctctacatctttaccaagatctcagcagacatcttctctggggctatattcatcaatctggcmttgggcctggatatatacctggccattttcatcctgctggccatcaccgccctttacaccatcacagggggactggcagcagtaatttacacrgacaccttgcagactgcgatcatgctggtgggatcttttatcctgactgggtttgctttccgagaagtaggagggtatgaggccttcatggataagtacatgaaagctattccaactttggtttctgatggaaacataaccgtcaaagaagaatgttacacacccagggccgactcgttccacatattccgagaccccattacgggggacatgccatggcctgggctcatcttcggcctgtccatcctcgccctgtggtactggtgtacggatcaggtcattgtgcagcgatgcctctcggccaagaacatgtctcacgtgaaggctggctgtaccctgtgtggctatctgaagctactgcctatgttcctcatggtgatgcccggaatgatcagccggattctatacacagacaaaatcgcctgtgtcctcccctcagaatgtaagaaayactgcggcacsccagtgggctgtaccaacatcgcctacccaacactggtggtggaactcatgcctaacggacttcgaggcctgatgctgtccgtcatgatggcttccctcatgagctccttgacctccatcttcaacagcgccagtactctcttcaccatggacatctacaccaagatccggaagggtgcatcggagaaggagctcatgattgcaggaaggttgttcatcctcgtgctgattggcatcagcattgcctgggtgcccattgtgcagtctgcccaaagcgggcagctctttgactacatccagtccatcaccagttacctggggccacccattgcagccgtcttcctgctggctattttctgcaagagagtcaatgaaccgggagccttctggggactgattctcggcttcctgattggaatctcccgtatgatcactgagtttgcctacggaactggaagctgcatggagcccagcaactgccccaagatcatctgcggggtccactatctgtactttgccatcatcctcttcgctatcagcgtcgtcaccgtcttggtcatctccctcctcaccaagcccatcccagacgtrcacctgtaccgtctgtgctggagtctacgtaacagcacagaagagcgcatcgacctggatgcaggagaggaggagcccgtcgaggaggaccctaaagataccattgaaatagaygcagaagccccccagaaggagaaggggtgcttcaggaaggcatatgacctgttctgtgggctggaccaggataaaggaccgaagatgactaaggaagaggaggaagctatgaagctgaagatgacggacacttccgagaagcccttgtggaggacagtggtgaacatcaacggcatcatcctcctggcagtggctgtcttctgccacgcctattttgcctgaaccccgccttctgggggtagacttggcgactctggagttgttatttcccactagaccccgccactctgtagtggtaaggggaaactggccagttgtaaattttactcattcggataaaagatgtataagtgtgattatagacttgcttgaggaaaatgattaccctgctgtgaatttatgcctgtgaaaccagtgtgccacactcatccatcacaccagagctttggagtgacgttgactcagatgtagaaaaagtcataccgagacacagaggccctgtgttgtctgtctcaggtacgtccagcgtgtaactattgtttataattcttaaatactattttttaaaattgtggtctggttcctgacatttttctacctgacccctcaccaattcctcctcctcctcctattttttttttctaaaagaaatctcccatcatcgcatccctttagagttttttggttttttgttttgttttgttttttgtttttgtttttaatt

SEQ ID NO: 2221 - DNA, 2647 bp, Rattus norvegicus
gggtagtctgaagagaccagaggaaggagcaccaagtagcctcagggccctgggtttattcttcccagcccttcatctgggctacactgatttctcttttggaccctacatcagacagcacacatcaaccgcctagtggactcaccgttaccttcctgtgccattgccatcggagagatctcggccatcaatcactagcacatgattggcaaatggagaatggggctttgggctttggcaattctgacagttcccatgtatttcatagtgacagagggcagaaaaacatcctggggtctagaaaacgaggctttaattgtcagatgcccccaaagaggaggtgcgattaaccctgtggaatggtattattcaaatacaaatgaaagaattcctactcaaaagagaaatcggatcttcgtctcaagagatcgtctgaagtttctaccagccaaagtggaagactctgggatttatacgtgtgttatcagaagccctgaatcgattaagaccggatctttgaatgtcaccatatataaaagaccaccaaactgcaaaatccctgattacatgatgtactcgacagtagatggatcagataaaaattccaagataacatgtccaacaattgccttgtataattggacagcgcctgttcagtggtttaagaactgcaaagctctccaagggccaaggttcagggcacacatgtcctatttgttcattgacaaagtgagtcatgttgatgaaggtgactacacatgtcgattcactcacacggagaacggaaccaattacattgtgactgccaccagatcattcacagttgaagaaaaaggcttctctacatttccagtaattacaaaccctccacacaactacacagtggaagtggaaataggaaaaacagcaaacattgcctgctcagcttgctttggcacagcctctcagttcgttgctgtcctgtggcagattaacaaaacgagaattggatcttttggcaaagcaagaattcaagaagagaaaggcccaaataaaagttccagcaatggcatgatttgcttaacctcactgttaaggataactggtgtgaccgacaaggacttctccctgaaatatgactgtgtggccatgaaccatcacggagtgataaggcaccccgtaagactgagaaggaaacaaccaagtaaggagtgtctctcacaaattgcttgacaaaattggctgaatttgctgcaaaccacaatcctttttctcagaggactgtgtgttatagcttggtcccaggggattcatcatgatcgtgggattagttggccagtttcctcaaatgtgtttttcatgttgagaaagctccttaaatctggtctgtccagaatgtttctgtcttctagaaggactctctgtcattgtatctttcctctctctgtttccccttgtccttgttctcctcacggtcctccccatcccttcaccttccttcacgttctctctactcttcttcccttatctctgggctccttctcacctgttagtggcttcttcagtcaccctttgcacatgctacaagggacattggtgttgatactgggttggaagcagtaataaccctactgtgtttctccctttgtgactcttgtaacagaaaacaacttacacattaggtggatgaccaacttgatcccattttaaaagagtagagaaaacatgatatttttacccttaacactctcttatgatactaaccactgcctcaatggcaatacaactaatgtaaamacakkattttaacttctttcaaatatcaagagggtgtggaagggagagagacactgactctaagctcatagtgatatgtggggcatttattgggattaagatattgattaaatgattagggtgggggtacctattggataccatcaagctgtgtcactgcctgaagtggtagttgggatttttttttggttctgtttgtcttctttggtttgttttaactatagagaccattctgctcttgaactcctagagttccacctggctttgcctctcaggtcctgggattaaagccatatgtcaccttacccagccaggatgtttcttgttttggtttcaattttagagcctctggcttgtaagatttttataaagtagagtttgattcataggtggccagagttgtgactcatagatgggttttagtgaggtcttaggcatccaccccttataatgctgttacccagggtgactgtggaccacagcactgtgttatgagatggtggaggtcatggcacattctataggaaaagagaagccaagcccctagtctcaccaggcacaaccttgagtcctcactgctctcctctgccaacaggaccttttgtccagatttctgagtattctctagttacatttgtatttgaactatatttgtgttatctgtaattctgtatttgttttgtttgtgtgtggttttgtattttccagattatttttaattcacctgttgctattcaaatcaatgtatctgtactgcttcatcaacacagcctgttaaataaaagtcgtgtctgttgttgttgaatgatmataatgaatttgtttgttcctgaaattctgatatttcttaaattaaaaaaacaaaaataaa

SEQ ID NO: 2222 - DNA, 1695 bp, Rattus norvegicus
  misc_feature (1200)..(1200): n is a, c, g, or t
ggcacgaggccggcagccgagtcggattgagctgctgcagacgccaggccactccagccagcactgccgttttcacgccccggctgcagacagctaggaggctttatctagtttgaaccaggctgctggagctcgctccttccctctctttttttccacgaggctgtttttttatttggctgcaattgcatgaaatcccaatggtgtagaccagtggcgatggatctaggagtttaccaactgagacatttttcaatttctttcttgtcgtctttgctgggaactgaaracrmwwmmrwraracttgacartagctctggtgcaagtgtggtagctatcgacaacarratasagcaagctatggatctggtgaaaagccatttgatgtatgcagttagagaggaagtggaggttctgaaggagcagatcaaagaactaatagagaaaaactcccaactggagcaggagaacaatctgttgaagacactggccagtccggagcagctcgcccagtttcaggcccagctgcagactggctcccctccggctaccacgcagccacaggggaccacacagccccctgcacagccagcgtcccagggctcaggatcaaccgcatagcctgctatgccccaacagaactggctgctgctgtctgaactgaacagaccgaagagatgtgctagtgagaagccgcctccagtcacccatttcattgctgtctgcgaaagagacgtgagactcacacatgctgttctcgstttytccccagtattaagcactcatatgcttttggcttgaagaaatatactagttgagtgaattaaaggttaaacagagagtgagcatggatgtaccctgtgcaacgtggcagatgtctgaggaatggtttgattgacgctgaggaggagctctgtgccttttcaaccctccccagccgsccacwmwactcccaagctytggggctcgcctgcatggggctcagaaggtgggctgctcctggattttktgttctcctctcmykmssttcaaagaatttgagaggccagaaacgwgactgcaaagggggkgatgcagtcctttwmcaaaaccgacaactgtcaccaaagcttataaaacaggacagtactgtccskcwykwbkgaaacatcagaagacacaaaactgttagtgwcacmwykswrwmargyakmtsrrayntwsgctatcttattatraaggttgtthtkywtktkkwwtwwttkygtaygtagtgtaacgratttgtacaatrgaggrccgtaactastgttaggttgtacagaktgaagtktagatgttccattggytgtytgaaaagstgtggattgtccttcctagagagatstacttaaaaabtgcttcrtgacaaaaacchcaccygaagaaattttaagaatttggcacagttagtcactttgtgtcaccyggaatytaghtgytgagtvttgcaaagtaaaccccctgttgastgatgtcagytgagmtagtgaatgaatagatggagaaacgtcagtcagtygmtgaggaagtggatttcccagtaggggtttbtgcagmtcacmtgwatagtcyygckcrtgttccsmaywcagaacccactgtatttacctgttctacwtgtcacctttcaataaagcatatcaaatgttrdwhmhwwaaaaaaaaaaaaaaaaa

SEQ ID NO: 2223 - DNA, 6455 bp, Rattus norvegicus
aacttctgtctgtatgtgttctagctttacagggtgagagctatagtggcccagcacaagttttcaagattatatgaacccttgttttctcttgcagattcctataactccatcttggctactaccaaaagctcttgaaccaagctctggctaagaagatggggatcgaaggggaaacagtagtcttgaagaacatgctcattggtgtaaacctgatcctgttgggatccatgctcaagccttctgaatgccggctggaagtgactacagaaagggtccagagacaaactgtggaggaggaaggaggggcttccagctacaacacatccagcaaggaacagcctatggtctttaaccatgtgtataacatcaacgtgccactcgaaagcctctgctcctcggggctggaggcctcagctgagcaggacgtgagtgccgaagatgatactctggcagaatacacaggccaaacctcagaccatgaaagccaggtcaccttcacccacaagatcaacctccccaaaaaagcctgcccatgtgcaagctctgcccaggtactgcaggaactgttgagccgaatcgagatgctggagagggaggtgtcagtgctgcgagaccagtgcaacaccaactgctgtcaggaaagtgctgccacaggacaactggactatgtccctcactgcagcggccatggcaactttagcttcgagtcctgtggctgcatctgcaatgaaggctggtttggcaagaactgctcagagccctactgcccattgggctgctccagtcggggtgtatgtgtcgatggccagtgcatttgtgacagtgaatacagcggagatgactgttcagagctccggtgcccaacagactgcagttcccgagggctctgtgtggatggggaatgtgtctgtgaagagccctacacaggcgaggactgcagggagctgcgttgccctggggactgttcagggaaggggcaatgtgccaatggtacctgcctgtgccaagagggctatgctggtgaggactgcagtcagcgacggtgtctgaatgcttgcagtgggcgaggtcactgccaggaggggctctgcatctgtgaggagggctaccagggccctgactgctcagcagttacccctccagaggacttgcgagtggctggtatcagcgacaggtccattgagctggaatgggacgggccgatggcagtgacggaatatgtgatctcttaccagccgagcctggggggccttcagctccagcagcgggtgcctggagattggagtggtgtcaccatcacggagctggagccaggtctcacctacaacatcagcgtctacgctgtcattagcaacatcctcagccttcccatcactgccaaggtggccactcatctttctactcctcaagggctacagttcaagacgatcacagagaccaccgtggaagtgcagtgggagcccttctctttctccttcgatgggtgggagatcagcttcactccaaagaacaatgaaggaggggtgatagctcagctccccagcgatgttacgtcctttaaccaaacgggactgaaacctggggaggagtacattgtgaatgttgtagcactaaaggaacaagcccggggccctccgacctctgccagcgtctccactgtcattgacgggcccacacagatcctggttcgagatgtctctgatactgtggcctttgtggaatggaccccacctcgagccaaagttgatttcattctattaaaatatggcttggtgggtggcgaaggtgggaagactaccttccggctgcagcctccccttagccagtactcagtgcaagcccttagacctggctcccgctacgaggtgtccatcagcgcagtccgggggaccaatgaaagtgatgcctcaagcacccagtttacaacagaaattgatgctcccaagaatttgcgagtgggttcccggacagcaactagccttgacctcgaatgggataacagcgaggctgaagctcaggagtacaaggttgtgtacagcaccctagccggggagcagtaccatgaagtgctggtacccaaaggcattggtccaactaccaagactaccctcacagatctggttccaggcacagaatatggagttggaatatctgcggtaatgaactcgaaacaaagcattcccgctaccatgaatgccaggactgagcttgacagtccccgagacctcatggtaacagcttcctcagagacctctatctctctcatctggacgaaggccagtggtcctattgatcactatcgaattacttttactccatcttctgggatctcctcagaagtcactgtgcctagggataggacttcatatacactgacagatctagagcctggagcagaatacatcatctccattactgctgagaggggtcggcagcagagcctggagtctactgtggatgccttcacaggcttccgccctatctcccacttgcacttttctcatgtgacctcctccagtgtcaacatcacctggagtgacccatctcccccagcagacagactcattctgaactacagccccagggatgaagaggaggagatgatggaggttctcttggatgccaccaagaggcacgccgtcctaatgggtctacagccagccactgaatatatagtgaatctcgtagctgtccatgggacagtaacctctgaacccatagtgggttctatcactacaggaattgatcctcccaaaaacatcacaattagcaacgtgactaaggactccctgacagtttcctggagccctcctgttgcgccttttgattactacgagtatcctatcgaccacccaagtggacggctggacagctctgtcgtgcccaacactgtgacagagttcacaatcaccaggctctatccagctagtcaatatgaaataagcctcaacagtgtacgcgggagggaggagagtgaacgcatctgcaccctggtgcacacagccatggatagccccatggatctaattgctaccaacatcacgccaacagaagccctgctccagtggaaggcacccatgggtgaagtggaaaattatgtcattgtcctcacccactttgccatggctggagagaccatcctggttgatggggtcagtgaagaattccagcttgtagacctgcttcctaggacccactacactgtcaccatgtatgctaccagtggacctctcgtgagtggcaccatcgccaccaacttctccaccctcctggaccctcccgccaacctgacagccagtgaagtcaccaggcaaagcgcactgatctcctggcagccacccagagctgcgattgaaaactatgtcttgacatacaagtccaccgatggaagccgcaaggagctgattgtggatgctgaggacacctggatccgactggagggcctgtcggagaacacagactacacagtgctcctgcaggcagctcaggaggccacaaggagcagcctcacctctactatctttaccacagggggccgggtgttctctcatcctcaagactgtgcccagcacttgatgaatggagacactctgagtggagtttacaccatcttcctcaatggggagttaagccacaagttgcaagtatactgcgatatgaccacagatgggggcggctggattgttttccagagacggcaaaatggccaaactgattttttccggaaatgggcagattaccgtgttggctttgggaatctggaggatgagttttggctagggctagacaactaccacaggataacagcccagggccgctatgagctgcgtgtggatatgcgggatggacaggaggccgtctttgcctactatgacaagttcgctgtggaggacagcagaagcctgtacaagctccgtataggaggctacaatggcactgcaggagactcccttagctatcaccagggacgtcctttctccactgaggacagagacaatgatgttgcagtcaccaactgtgccatgtcatacaagggtgcttggtggtataagaactgccaccggaccaacctcaacgggaagtatggggagtccaggcacagtcaggggatcaactggtaccattggaaaggccatgaattctccatcccctttgtagaaatgaagatgaggccctacatccatcgtctcacagccgggaggaaacggcgagccttgaaattctgagcactgggcagccagccaccagccaaacgatcttttctgtcatttgtttgtattttataatatgagacaaggggggaggggcaacagtaatgtgcttcacaacatattcagactatctgaaggaagcaggaatcagttaggtaccatctgctcctaatttctgctgccttggagcctgactctcaggctacagtccctgctaaccagtcctgcctgatcaccccctcttttcccacacaggaggaaaactggggagttaaaacaaaaacaccggatgaagtacagattattatggtgatgggcacacacacaattttctctgctccctcttctgagatactatccaacttctaagaaatagtaatctggtcaccgctgaccatgaccaggtgaccacactatcccagagaagattcaacaagaaagcttagccaatcttctcttaagaggaaagatacccaccacactctggcacaacagcccaaggttcacttcaatgggctaaagattctcccattctgacacttaacttttaggaagagtggcctcgttcagcccccggccctccactagattcctccactagatcctatagacctaccaacccaactattgtttagaactccagttaccaaagcttgtctgatcctggccctggatcacataagagctgtgccctgagtgtcataagctattgtcatggaataactttctttggtggtgagacttggggaagggaattgtttctagcacatttgcaccaggcattgacaaaggacaggagtagaaatgaaggcacctaccagggagtccgtagtcccattggaaactgaccttgtttagtgctacttcgtacatttatgatctgatttaccatggactcctttctctgattcctagctgaaggtctctagttctgtacccagccaggctctcctcagtggaagtggcttcataagaatcaggggggaaatttgtctgagccattcccctgacctgattaccctgggaaggagacagaatatttgtccaggacttttgtttgtttgctttgatcctgtagtaaacagaactgaccccctcaatgaggtgagatcatgagaaacattttccatctcccctctgttatcctgctttgagaagaaaaatgaaaagtgccagaggaaattgcatttagaactccaaaggtgagaggagtgatctccccgggccccccacatgatttgatttttaagccctggagaactggaggctatagaagccatgacctttcagcttctcctcaaataaaaaacaagccagtcttccctgcagcaaactctgccaagcttctcaactgccttctccccgtctttctgtccgctcccatctctgaggacccagtgtgtgctatagggcctgtggtaccatctagggtgtcttatacctgtgccaaccatttctgaacaagttggcatcttgaaatagaaatagctaccatttaatcaaactttgagcaagaagcaatagtcctcctgggctgatgatcacctgcttagcatcatgacattggagttagcttgccattttctgtaacctcccccatttttgtgatgcagacccagtgacctattcaaggccaaaaacgcagatggagttttcactttttaatccatcatggacttcaaacagctaagagagggaggaagaaagggaagcctataggttatataaaatttaactagatgtaggccaaccatgcagaaccagaggtgagcgctttcaaaggacttgagggctgtgatacagggccacctcagacaccatgacagctacaagtccttgatggatttgttcaaatctctgggactcggtttcctcacctagttgaattagagtttagaccaaaagaatttctaatgctcctttaggttaacagtcaataatgtttatctgtgataggaaagcacaatcaaagttggccttggtgagccatcataattaaggaaaagccagaatctttgtgaaggagatggggaaagggaaggaaaggaaagaagggaggaaagagactgactcagaactctctgtgtctctcatacacacacacacacacacacacacacacaccccaaaaacaatgctaaaagaagctgaagtcattatgtctacaaaagcagagccaaggacctgggtgtggctgaacagcccacctcatcaagggagccgaaatctcgtgccgaattc

SEQ ID NO: 2224 - DNA, 4216 bp, Rattus norvegicus
cctatggtttgacagcctctgtgctgctcctgctgcttctgttactgcggctgtgtggtctgtcatgagttgagrcggsvdygtgagggtttagagaaactgccgctctgaagcctgarcctctgctcagtgatcttcctgccagagggactggacaagatttcttctgcatgattggaaacttggacctattagcacgtcatctacccagagaagcaggcagcgtgacagagtgaagaggggaaggaactactgcagaaacaagcaaacagcacaaaaggtggaggctggaaagatgttttagaaagtctctgtgtcagagaagcttcaagccactgaagatggagaatgaaaccgtcagtgaactgaaccaaaccgagctcccgccgcaagtagccgtggccctcgagtaccaggtggtcaccatcttacttgtggtggttatctgtggactgggcattgtgggcaacatcatggtagtcctggtggtcatgagaacgaagcacatgagaaccsctacaaactgctacctggtgagtctggctgtggcggatctcatggtcctggtggctgcaggmctccccaacatcaccgacagcatctatggttcctgggtctatggctatgttggctgcctctgcatcacgtatctccagtacytmggaattaacgcatcttcatgctcaataacagcctttaccattgagaggtacatagcaatctgccaccccatcaaagcccagtttctgtgcacattttccagagccaaaaaaatcatwatctttgtctgggcctttacatccatttactgtatgctgtggttcttccttctggatctcaatatcagcacctacaaagatgctattgtgatatcctgtggctacaagatctcccgcaactactactcacctatttacctaatggactttggcgtcttttatgtcatgccaatgatcctggccactgtgctttacgggtttatagctagaatcctcttcttaaaccccaytccttcagaccctaaagaaaactctaagacgtggaaaaatgactcaacccatcagaacaagaatatgaatttaaacaccaccaacagatgtttcaacagcaccgtttcttccaggaagcaggtcaccaagatgcttgcagtkgtkgtaattctgtttgcccttttatggatgccctacaggactcttgtggttgtcaactcatttctctccagccctttccaggaaaattggttcttgctcttttgcagaatttgcatttatctcaacagtgccatcaacccggtgatttacamcctcatgtctcagaagtttcgtgcagccttcaggaagctctgcaattgcaagcagaagcccactgagaaagctgctaactacagtgtggccctaaattacagtgtcatcaaggagtcagaccgctttagcacagagctagatgacatcaccgtcactgacacrwrhrtgkcamccaywmwwgtatcattkgatgaywcytgmytgscmwcsgagaaraatgracccagttcttgtacatatggatattctttgactgccaaacaggagaaaatatgaacttcctcaagaataccttgggctggtattaataaaggaaatctttcaaaaaattcaatgtgactcaaaaagatccaactgatcgaaggtcttcattcagaagtcagtaagaacatcgtgatacttaaatggtacagggtggcacaataaggaagcaaacatctaatccctagccatgaggacaagccactcctgttttgatatatatatatacaaattactggcatgcttttccttaatgtgtctctctttctcaaaataactgttatttgccagatgactctgaacacatcctggaaaccaatttgttctgagcctccacatatgtccttcaatacccttgaataccaaataattctgaataggcaagttaaacagaaaatcccatggaggacaagttcatttcatgtttgtmtccaagaaattgaactaagatgcygagstcaacattgactttctcttgaatgaatgaacgaacgaacgaaagaatgaatgaacatgaataagtaaatttatgaatctccaactaagaaatataacgtaaaatcttcatgatgcctgatttcctcatagatttgttyacaaatataaaacttgtttgccttttgtttttatcatcttaaaccattctcttggcttattaaaatgtactatattttgtcagatcatggtcaccaccatctctgtgtatatattatgaatacaaagttcaatagtactctcaaatctctcacctaatttaataatgatcaagattattacatgtatgttcagagaataacaacatactatcactgacatgtgaataaaattaaatgtgcagagtacatggtaggaagagaagttatatgatttcagattacaaaccttagaattcctcattgggaaaagaatatcaggggggtgctagagtaattagaacaacctcataggaaagcttgaatttcttataagaatagacttggcttagataggaaaagacaagtgatgtaaggaaagagaggtgagtaagggtaggaggaaaagaaacaaactctaggtgtaatggataatgtgtccagttaagtgtgactcattggggattgatcaaggcaagcaactagaagaaaggaaagaagggaaataaagtatttcctgattattgtatttgttgaggaaatagtcagccagacaggtggtagatgtgtatattagtaagctgtcatgtattttctaaacattgtaaatttcacttatatctataaaaatgtagtatgctatttgtctcctaagtgttataattctgtaagtatcctaaagttcataatttccaggtaaaaactaattgtatatgtgtatatcttttctatattgcactgttatcatatatgggatatatttatttatgaatatgattcagaggtccttaacagccataagttatccagttatgctcaccagtagagatccaagctagctcataggcccttcatatgcctaagcatccatattaaatgagaaactgataagcagtgacaagcttctaatgccctcaccctgttgacttssatgctgcttatatcgtgctcctgaatgcttggtttcttacaacatgcctctgaatgttttggtttccttttaccatttgtagagagctgtatactcactcatctcattgcttggagatcaatcattgtgtccgtgtggaaaaataatctcctttaagaaagtgcagtattatgtgttctctctgcaatgggaaactattactgtatgtgtatgcatggcrrcmryaaagtatcaaactgaaagayccmmmmmmmwwwwwwwwwwtttttttttttttttttttttttkkccawagaamcgtctttattgaagaggacaggagtcatgctgagtttakggacatgcastsaasgggcartcgtgagctgtccttggtggycaggccccargtctgctctggaccasggggccctcargttctccctcargctgttrgtctggcccadgtgctgtgaagtcctttggggccaatgactcavatttagtgtcttggrcctgtgaccabaaggtakattgaagtagggactccatgatttggsgtcctgttasascctgrggccctgcacmtmktrsbkatcasasatttggawcttgsrggttcccttgagggtgsggcccatggagtytssarsttgggaaattaaagatccatggactaagggtattagagtcctatccttgttccaaagatgggactttctgtttggggtctcmtggtgcctgggagtcaggtttgagatgccctgagagcctgggatgttctcctggcaacaggttccttcctcccggtcctaaggaccttgtgttgggggatttcctgagggtttgggattggtatcttaagtttgggmytccstggggatttgaagattctgtgacttgggtagggggaagtcctgggaattagaaatttggggtcttctagagattgtagggcttggaggcatggggaattggggattatatataatatatattctctctggaatttgaactccccagtgttctagaatggggtctccaaatttggggatccccccaaagggggggaagttattactttaaaaaatagagaattttccctcgtg

SEQ ID NO: 2225 - DNA, 1034 bp, Rattus norvegicus
gaacacagacaaggatgtatgtgtgggttcagcagcccacagcatttctgctcctgggactctcacttggagttacagtgaagctcaactgtgttaaagatacctaccccagtggtcacaagtgctgtcgtgagtgccagccaggccatggtatggtgagccgctgtgatcacaccagggacactgtatgtcatccatgtgagcctggcttctacaatgaggctgtcaattacgacacctgcaagcagtgtacacagtgcaaccaccgaagtggaagtgaactcaagcagaactgcacacctactgaggatactgtctgccagtgtagaccaggcacccaaccccggcaagacagcagccacaagcttggagttgactgtgttccctgcccccctggccacttttctccaggcagcaaccaagcctgcaagccctggaccaattgtaccttatctggaaagcagatccgccacccagccagtaacagcttggacacagtctgtgaagacagaagcctcctggccacactgctctgggagacccagcgcactacattcaggccaaccactgtcccgtccaccacagtctggcccaggacttctcagttgccctctacacccmccttggtggctcytgagggccctgcatttgctgttatcmtagscctaggcctgggcttgctggctcccttgactgtcctgctagccttgtacctgcyccgaaaggcttggagatcgcccaacactcccaaaccttgttggggaaacagcttcaggacccctatccaggaggagcagaccgacacacactttactctagccaagatctgagcaataccacaggagtggattttatggggcacagacagcccatatcctgatgcctgcctgccagggccctccacaccgttytaggcrctgggctggctgtgcactctcccatgtatgctgtgcatamtacctgcctggtggcactcctaataaacatgctcgcagctgtgagtctgtcactggccctaaaaaaaaaaaaaaaaa

SEQ ID NO: 2226 - DNA, 2147 bp, Rattus norvegicus
  misc_feature (1237)..(1237): n is a, c, g, or t
ctggagctccaccgcggtggcggcmgmtcwaagwrstrgkaskvkcsycssggcygcggwbaytmgaagsasgackccggatccggctcgkcgctcgccctcgctcgccatggagaagaccgagctgatccagaaggccaagctggccgagcaggccgagcgstacgacgacatggccacctgcatgaaagccgtgacggagcadggcgccgagctgtccaacgasgagcgcaacctgctatckgtggcctacaagaacgtggtcggrggccgcargtccgcctggagggtcatctckagcattgagcasaagaccgatacctcggacaagaagttgcagctgatcaaggactwtcgggagaaagtggagtctragctkaggtccatctgcaccacggtcctggaattgbtggataagtatttaatwgccaatgsmactaatccagagagtraggkcttctatctgaarwtgmakkgagmywhktkccggtatcttgctgaagwcgmttgtggtgatgaycgamamcaaacgatwgaaaattcccaaggagcctaccaagaggcattygrtataagcaagaaagagatgcaacctacacatmcgatccgsctggggctgrctcttwacttttctgtatkttactatgagatccttaataatcccgagcttgcctgcacactggctaaaacggsttttgatgaagccatcgycgagcttgatacactgaatgaagactsctacaaagacagcaccctyatcatgcagttgcttagagacaacttaacattwtggacatcagacagtgcargasaagaaygtgakscarctgaggrggctgagaamtaaaggcatscaggacmccamcytcyttcycytsargaraaccttkttacatcyscatyccttattscacttgsatttcctctagcaaggaagcccattcatgtgtakggggtcaactgtttatrgtmttttcacaytgcagctttgggaaaaytccatccyykggkttgygbtgwctccmccttcytggkgkscagttaytgykrwagaaaagtatcaatasctkmatttcatwtaammacgagtaacttycakacactkgtgwrgaggactgacarcacatttggbattkaagtaatctgaaccasytctgcaagkgactgkgttttgkattactgkgaagatatggaaatkgkagtgcattacaayttaaagygdttgtrwwaawammrnmwhrawdwvwacawdmmwwwhmwraamtttcttggsrgtkkyctttyakaagmaactyttccwtgytctwactacaaattcctttttagtaggaatccagaagtgttagattgaatgggaaagcgcttaatgcatccgggcttgggggtcacagattgaaatgtctcctgtgtmacattctggaggtwacatctgtctgtgacaacagggcgtttccttatgcattcttcatktghtgctgtttaagttgacaacttccttcccaataaaaattcactwacmmmwmmwrmmwwmrwarmwmwrrwattcactttaccttgtgacagaagtagcatgttgctgccagaatacaagcattgctttgggcaaattaaaatgcatgtcctttcttaatacaytaggaaggagaaataaagtacacaagkccaagtytaaactttagtacttttccatgcagatttgtgcacatgtgagggggtatccagtttgtccagtgattgttctttagagagttggaccactatattgtgtgtttgctaatcattgactgtagtcccaaaaaagccttgtgaaaatgttatgccctatgtaacagcagagtaacataaaataaaactacattttwtaaaammawwwawwawrrmwwwrwaamagttgcatacccatattttaagaacagacaaatttactactttttgaagtttgttgctatttctctttatgtaacatataatggtgatatccatatttctgcattgtggtacacttgtctagggtgcctggcactgtaaaattggactatatttctccagatagcctcatgggttgtcttcctcagatgtaatgataactggttaggtgtcatgtgtaataaagtgaacatttgaaaactagaaaaaaaaaaaaaaaa

SEQ ID NO: 2227 - DNA, 4147 bp, Rattus norvegicus
ttggaaggagcgggagttcaagtcgagtgggaacggggcttagagtagtgggtggggggccaaaagctggggctgacacccgtgcacctgagctccactcgagcatcgccggtgacagctctccaggtccagtggagggcaacggggggaggaggggaggaggaggaggaggcgggagcagcatccggagccgagctgcagcagcgccgccttttgtgctgcggccgcggagcccccgagggccttggatcccctggaactggagttataggggttgtgagcatcatgtggatgctgggaatggaaccccagtcatctcgaagaacacccaggctggcctgaaactcactgtgaagccagagatgaccttggacttctgagcctctcacctccattcctgagtgctgggactgctgggcccgctactcagcacacctggctccagaggccatggcctgcctccatgaaacccgaacaccctccccttcctttggaggctttgtgtctactctaagtgaggcctccatgcgaaagctggatccagacacttcagactgcacccctgagaaggacctgacacctacccaatgtgtacttcgagatgttgtgcctctcggtgggcagggtggaggagggcccagcccctccccaggtggagagcctcctccagagccttttgccaatagtgtcctgcagctacatgagcaggatacaggtgggccagggggagccaccgggtcacctgagagtcgagcatctagggttcgagctgatgaggtacgtctgcagtgccagagtggcagtggcttccttgaaggtctttttggctgcctgcgccctgtctggacaatgattggcaaagcctactccacagagcacaagcaacagcaggaagacctttgggaagtcccctttgaggaaatcctggacctgcagtgggtaggctcaggggctcagggtgccgttttcctgggacgctttcatggggaggaggtagctgtgaagaaggttcgagacctcaaggagaccgacatcaagcatcttcgaaaactgaagcaccccaacatcatcactttcaagggtgtttgcacacaggccccgtgctactgcatcctcatggagttctgtgcccaaggacagctgtatgaggtgctcagggcgggccgccccgttaccccctccttgctggttgactggtccatgggcatcgctggaggcatgaattacctacacctgcacaaaatcatccacagagacctgaagtcacccaacatgctaatcacatacgacgatgtggtgaagatctcagactttggcacttccaaggagctgagtgacaagagcaccaagatgtcctttgcagggacagtagcctggatggctcctgaagtgatcagaaatgaacctgtgtctgagaaggttgacatctggtcctttggggtggtgctttgggaattactgactggagagattccctacaaagatgtagactcctcagccatcatctggggtgtgggaagcaacagtcttcacctgcctgtaccctctagctgcccagacggctttaaaattctgcttcgccagtgctggaacagaaaacctcggaaccgcccatcattccgacagatcttgctgcacctggacatcgcctcggctgatgtgctctctacaccccaggagacttactttaaatcccaggcagagtggcgggaagaagtaaaactgcactttgaaaagattaagtcagaagggacctgtctgcaccgcctagaagaggaactggtgatgcggagaagggaggagctcagacatgccctggacatcagggagcackatgagcgcaagttggmgagagctaacaacttgtacatggaactgaatgccctcatgttgcaactagaactcaaagagagggaattgctcaggcgagagcaagctttagaaaggaggtgtcctggtctactgaagtcacacacgtcccgaagcctcctacatggaaacacgatggagaagctcatcaagaaaaggaatgtgccacagaaactgtcaccccatagcaaaaggccagatattctcaagacagagtctttgctacctaaactagatgcagccctaagtggggtggggcttcctggktgtcctaaggsccccccttcacctgggaggagtcgtcgtggcaagacccgtcaccgaaaggccagcgccaagggcagctgtggagacctgcctgggcttcgtgcagctttgccaccccatgagcctggaggactakgaagcccaggaggcctasgagtgggccctacagcttgggatgcctsyccccctgctctccgtggactccaccatgaccttctacttcggaagatgtcttcatcatccccagacctgttatcagcagcactgggagcccgaggccgaggggcaacagggggagctcgggatcctggctcaccacctccaccccagggtgatactcctccaagtgagggatcagctcctggttccaccagcccagattcacctgggggagctaaaggggaaccacctccaccagtagggcctggagaaggtgtggggctgctgggaactggaagggaagggactacaggccggggaggaagccgggctgggtaccagcacttgacccccgctgcgctgctgtacagggctgctgtgactcgtagtcagaaacgtggtatctcatctgaagaggaagaaggagaggtcgacagtgaagtagagctacccccaagtcaaaggtggcctcagggcccgaacatgcgtcagtcactatctacgttcagctcagagaacccatcagatgtggaggaaggtacagctagtgagccttccccaagtggcacaccggaagttggcagcaccaacactgatgagcgaccagatgaacggtctgatgacatgtgctcacagggttcagaaatcccactggacctacctacttcagaggtggtccctgaacgtgaaaccagctccttgcccatgcaacaccaggatgaccagggccccaatcctgaggactcagactgtgacagcactgaattggacaactccaacagcattgatgccttgcsgcccccagcctcccttcctccwtkwwwkwywytyttwttyyhykyasrtagagaaatatttatataaataatatatatgcgccacataawmaamarawaramggggctttcttagccgtaagtcaggmttcagagtgaacgacgcccctgaccaattaagttctagggacactggcagctgtggaaatgactccaagtactaccctagagctgtaaggaaaggacaccggtcccttcttgcttcaccccattccttatgttgaacaagcaagtaggcatagaaaagccaggcttgtctctacactgtctgtccctaaacatgkkkkkywdkwwkwkkwtycacttaaaactgcacttttattttccgtttactgtttacacattttgcacttgggaggagggaaactaargctgggtcctargtcctccctctgmggtkkckcmgstskmrawstaryksatyycyykgktscwgkwwytckgcmmragccctggctttgggcccagaggcaagttagaagattaatagcatgtgatggctcaggctgaagaactgggtgctggttaagtccccgctgttatctggtgcctggtaggggtggggactgtcatattgtamcccctgtgaacaaccctgaaatataaccactccatgcaggcccaactgkcgagggttttcttggtgaatgagtggagtggtaatacatggattaagtcttggatttaagattttacctgaggaatttggataagtwactttctamstyrwswtaaatggcagcaggtaaacttttctaaatgatttcaggacaagaacacaaggtctcmsaacacctgtggagaaaactaaatgattactagactttaaaattaaagtatgcacgaggcagtgattctcaagcttbcaatcgacaccttcctgtsccagctccataaatgcactgtacaatgctgctgtacaatcccagggtaagtgtgactgtcagtcttcagaggccacccaggatcatgggggggaaaagattgagggcaaattacaaaaaaaaaataaaaaa

SEQ ID NO: 2228 - DNA, 2422 bp, Rattus norvegicus
cacggcgctccttagggccaccgctcggcgcgccgggacagaccctccccactcctgcctgcaggatcggaacgtcaattaacggctgacactgccccccacctcttcccacccatctgggctccagcgaggaacggatctcggggtacaccatgatcttgccatttttagtactggccatcggmmcctgccttaccaactcatttgtgccagagaaagagaaagaccccagttactggcgacagcaagcccaagagaccttgaaaaatgccctgaaactccaaaaactcaacaccaacgtggccaagaacatcatcatgttcctgggagatggtatgggcgtctccacagtgacagctgcccgcatccttaagggccagctacaccacaacacgggcgaggagacmmggctggagatggacaagttcccctttgtggctctctccaagacgtacaacaccaacgctcaggtccccgacagcgcsggcactgccactgcctacytgtgtggcgtgaaggccaacgagggcaccgtgggagtgagcgcggccactgagcgcacgcgatgcaacaccactcaggggaaygaggtcacgtccatcctgcgctgggccaaggatgctgggaagtccgtgggcatcgtgaccaccactcgggtgaaccacgccactcccagtgcagcctatgcgcactcggccgatcgggactggtactcggacaatgagatgcssccagaggctctgagccagggctgcaaggacatcgcctatcagctaatgcacaacatcaaggacatcgatgtgatcatgggtggyggccggaagtacatgtaccccaagaacagaactgatgwggaatatgaactggatgagaaggccaggggcaccagactggatggcctsgacctcatcascatttggaagagcttcaaacctagacacaagcactcccactatgtctggaaccgmactgaactgctggcccttgacccctccagggtggactacctcttaggtctctttgagcccggggacatgcagtatgagttgaatcggaacaacctgactgacccttccctctcggagatggtggaggtggscctymggrycctgwcrmmkwatsssaragscttyktcttgmtrgwsswaggaggcaggattgaccacgggcaccatgaaggcaaggccaagcaggcgctgcatgaggccgtggagatggatgaggccatcggaaaggcgggcaccatgacttcccagaaagacacgttgactstggttactgctgatcactcccacgttttcacgtttggtggctacacccccaggggcaactccatttttggtswgkmdsccatggkgwgbgamasgsacaagwagccctkcrsakccatcctstatggcaacgggcctggttacaagswsgwggacggtgaacgggagaacgtctccatggtggattatgctcacaacaactaccaggcccagtccgctgtccccctgcggcacgagacccacggtggggaagatgtggcggtctttgccaagggccctatggctcacctgcttcacggcrtccatgagcagaactacatcccccacgtcatggcgtatgcctcctgcattggagccaaccttgaccactgtgcctgggccagctctgcgagcagcccctccccaggggccctgctgcttccactggctctgttccccctacgcaccctgttctgagggcccaggtcccacaagagcccacaatgsacagccggctcccctccctttgtggcctgccacctggccgcccacactcaacggggaggcccaggcaacctygagcaggaacasaagtttgctacctgcctcacttccgcccggaaccctccgtgggtcggattcctggctctgccgttgtttctctattcackgccttttggccagcagggtgggtttctctcttgggccggcaggacacaractgcgcagattcccaaagcacskyaykwkkctaccaaatatactstccagaccctgyaaccatcatggaacattccagatmtgacsttskcwcsmskaccccttythtmtggaacactgggtcccatagtcacagccagtccctcaacccaaccctcchtggagggaagaccaggtctgctcasggtgagactcccaggaagccacctccggggttggytgyctacccakggtggccaggctgggaagaacaacccagccggacaggacgcacacactccccacccagctscagagactygccaacccttcactgaagcgactcccctgtttggaatagcaaaaaaaaaaaraaaraaaaaaaagaaaaaaattttaatttctctttttggtgttggttaaaagggaacacaagacatttaaataaaatgttccaaataaaaaaaaaaaaa

SEQ ID NO: 2229 - DNA, 1313 bp, Rattus norvegicus
cacgaggagagcctggtgcggcgcascacctcagccccctgcggcggctccctcccggcctttcctcctacgagcagcatgaaagccttcagtccggtgaggtccgttaggaaaaacagcctgtcggaccacagcttgggcatctcccggagcaaaaccccggtggacgacccgatgagtctgctctacaacatgaacgactgctactccaagctcaaggaactggtgcccagcatcccccagaacaagaaggtgaccmagatggaaatcctgcagcacgtcatcgattatatcttggacctgcagatcgccctggactcgcaccccactatcgtcagcctgcaccaccagagamytsgrcasrassaaacgtccaggacgccgctgaccaccctgaacacggacatcagcatcctgtccttgcaggcgtctgaattcccttctgagcttatgtcgaatgacagcaaagtactctgtggctaaataaatggcatttggggactttttcctttttttttttttttwttttwaytttytytttttyttttgcacadcaagaagtctacaggatckkyyraramkgtkgtttkgttctgctttgttatcaaccatttcaccaggaraacaagttgaakggmcctttttaaaaagaaaacggaaggaaaactaagagkgatcatyyccccaggkgwykmsggcytggackgkgataaccgttwtttatgaragwcttcaakgccctttytamagycggaaggttttctttawawrcttatycccaccakggggagcgaaaatgywmrwrmmararaaaahmmmmvsswmktgcccaatctaagcagactttgccttttttcaaaggtggagcstgaataccasaaggacccagtattcggttacttaaatgaagtctttggtcagaaatggcctttttgacacgagcctactgaawgctgtgwawawawttayatataaatatatatatayatatattgagtgaaaccttgtggactctttaattagagttttcttgtacagtggcagagataactttctgcattgaaatgtaatgacgtacttatgctaaactttttataaaagtttggttgtaaacttaacccttttatacaaaataaatcaagtgtgtttgtcgattgctcgctttatttcagacaaccagtgctttgatttttttttatgctatgttataactgaacccaaataaataccagttcaaatttatgtagactgtattaagattataataaaatgtgtctgacmwmaaaaaaaaaaaaaaammtttgcgcctcgtg

SEQ ID NO: 2230 - DNA, 5956 bp, Rattus norvegicus
cgcccgggcaggtgtctccttagatagcccggaacgctaccccgcacgaatgatatcccacattgtgtcctgcatccgggataaccttcctgacacgtgtccgccgacactgctgcaaccgcggctggagccacggcgccggtgccctgtgctttcccaggttatgcactgcaggagcgcttaccgcttctgtgacttctttgcgggccagggaccgagaaagcatctgtgccagcgcgaggtgcaggatggagagcagggcgctgctagctgtcgctctgtggttctgcgtggagacccgagccgcctctgtgggtttgcctggcgattccctccatccacccaagctcagcacacaaaaagacatacttacaattttggcaaatacaacccttcagattacttgcaggggacagagggacctggattggctttggcccaacactccgcgtgactctgaggaaagggtgttggtgactgagtgtggcgacagtatcttctgcaagacactcacagttcccagagtggttggaaatgatactggagcctacaagtgcttctatcgggacaccgatgtctcctccatcgtttatgtctatgttcaagatcacaggtcaccattcatcgcctctgtcagtgacgagcatggcatcgtgtacatcactgagaacaagaacaaaactgtggtgatcccatgccgagggtcgatttcaaacctcaacgtgtcactttgtgctaggtatccagaaaagagatttgttccggatggaaacagaatttcctgggacagcgagaaaggctttactatccccagttacatgatcagctatgccggcatggtcttctgtgaggcaaagattaatgatgaaacgtatcagtctatcatgtacatagttctggttgtaggatataggatttatgatgtggtcctgagcccccctcatgaaattgagctatctgccggagaaaagcttgtcttaaattgtacagcaagaacagagctcaacgtggggcttgatttcagctggcaattcccgtcctcaaagcatcagcataagaagattgtaaaccgggatgtgaaatcccttcctgggactgtggcaaagatgtttttgagcaccttgaccatagacagtgtgaccaagagtgaccaaggagaatacacctgcacagcgtacagtggactgatgaccaagaaaaataaaacatttgtccgagttcatacaaaaccttttattgcttttggtagcgggatgaaatctttggtggaagccactgtgggcagccaagtccgaatccctgtgaagtatctcagttacccagctcctgatatcaaatggtacagaaatggacgacccattgagtccaattacacaatgatcgttggtgatgaactcaccatcatggaagtgagtgaaagagatgcgggaaactacacggtcatcctcaccaatcccatttcaatggagaaacagagccacatggtctctctggttgtgaatgttccaccccagatcggtgagaaagccttgatctctcctatggattcctaccagtatggcaccatgcagacgctgacatgcacagtctatgccaaccctcccctgcaccacatccaatggtactggcagctagaagaagcatgctcctacaggcccagccaaacaaacccatatacttgtaaagaatggagacacgtgaaggatttccaggggggaaataagatcgaagtcaccaaaaaccaatatgccctaattgaaggaaaaaacaaaactgtaagtactctggtcatccaggctgcctacgtgtccgcattatacaaatgtgaagccatcaacaaagcaggacgaggagagagggtcatctccttccatgtgatcaggggtcctgaaattactgtccagcctgctacccagccaaccgagcgggagagtatgtctttattgtgcactgcagatagaaacacgtttgagaacctcacgtggtacaagcttggctcacaggcaacatcggtccacatgggcgaatcactcacaccagtttgcaagaacttggacgctctttggaaactgaatggcaccgtgttttctaacagcacaaacgacatcttgattgtggcattccagaatgcctccctgcaggaccaaggcaactatgtctgctctgctcaagacaagaagaccaagaaaagacattgcctagtcaagcagctcgtcatcctagagcgcatggcacccatgatcactggaaatctggagaatcagacaacaaccattggtgagaccatcgaagttgtttgtccaacatctggaaaccctacccccctcattacatggttcaaagacaatgagacccttgtagaagattcaggcattgtactaaaagacgggaaccggaacctaactatccgaagggtgaggaaggaagacgggggcctctacacctgccaggcctgcaatgtccttggctgtgcaagagcagagacactcttcataatagaaggcgtccaggaaaagaccaacttggaagtcattatcctcgtcggcactgcagtgattgccatgttcttctggctccttcttgtcattctcgtacggaccgttaagcgggccaatgaaggggaactgaagacaggctacttgtccattgtcatggatccagatgaactgcccttggatgagcgctgtgaacgcttgccttatgatgccagcaagtgggagttccccagggaccggctgaaactaggaaaacctcttggccgtggtgcctttggccaagtgattgaggcagatgcctttggaatcgacaagacagcgacttgcaaaacagtggctgtcaagatgttgaaagagggagcaacacacagcgagcaccgagccctcatgtccgaactcaagatcctcatccacattggccaccatctcaatgtggtgaacctgctgggtgcctgcacgaagcccggagggcctctcatggtgattgtagaattctgcaagtttggaaacctatcaacttacttacggggcaagagaaatgaattcgtgccctataagagcaaaggggcacgcttccgctctgggaaagactatgttggggagctctccgtagacctgaagcggcgcttggacagcatcaccagcagtcagagctctgccagctcaggttttgtggaggagaaatccctcagtgacgtagaggaagaagaagcttctgaagaactgtacaaggacttcctgaccttggagcatctcatctgttacagcttccaagtggctaagggcatggagttcttggcatcaaggaagtgtatccacagggacctggcagcacgaaacattctcctatcggagaagaacgtggttaaaatctgtgactttggcttggcccgggacatttataaagacccagattacgtcagaaaaggagatccccgactccctttgaagtggatggctccggaaacaatttttgacagaatatacacaattcagagtggtgtgtggtcttttggtgttttgctctgggaaatattttccttaggtgcttccccatatcctggggtcaagattgatgaaaaattttgtaggagattgaaagaaggaacgagaatgcgggctcctgactacaccaccccagaaatgtaccaaaccatgctggattgctggcatgaggaccccaaccagagacccgcgttttcagagttggtggagcacttgggaaatctcctgcaagcaaatgctcagcaggatggcaaagactatattgttcttccaatgtcagagacactgagcatggaagaggattctggactctccctgcctacctcacctgtttcctgtatggaggaagaggaagtgtgcgaccccaaattccattatgacaacacagcaggaatcagtcattatctgcagaacagcaagcgaaaaagccggccagtgagtgtaaaaacatttgaagatatccctttggaggaaccagaagtaaaagtgattccagatgacagccagacagacagtgggatggtccttgcctcagaagagctgaaaactctggaagacaggaacaaattatctccatcttttggtgggatgatgcccagtaaaagcagggagtctgtggcctcggaaggctccaaccagaccagcggctaccagtctgggtatcactcagacgacacagataccaccgtgtactccagcgacgaggcaggacttttaaagctggtggatgttgcagggcacgttgactctgggaccacactgcgctcatctcctgtttaaaaggaagtggccctgtcccgtccccgcccccaactcctggaaataactcgagaggtgctgcttagattttcaagtgttgttctttccaccactcggaagtagccgcatttgattttcatttcagaagaaggacctcagacgcaagaagcttgtcctcaggcatttccagaaaaatgcccatgaccaagaatgtgttgaatatactctcttttccattggtttaaaaatcctatatattgtgccctgctgcgggtctcactaccagttaaaacataagacgttcagacacgcggctctatcctccaagaagtacccatacccaggcaatggagccctctgtgaaactggataaaatgggcgatgttagtgctttgtgtgttgggatgggtgacatgtcccagggctgactctacctaaaaggctttgtggaggatgtgggctatgagccaagtgttaaatgtgagatgtggactggtaagaaggaaggagcaagctcgctcagagagcggttggagcctgcaaatgcattgtgctggctgtggtggaagtgagcatgttgcctgtcacgaaaccccaaggcggctgtcggggtttggttttggaaggttgcttgctctcacggttgggctactgccaattccctgtgctgtttcctaccctaatcaaattccgtccggactcttacgtgtctcctggcctagccccaggaaggaaatgacgcagcttgctcctcatctcccaggctgtgccttaactcagaatactaaaagagagggactttggccgaggctccgctccttgtcatgctgaagaactgtgagaacacaacagaaactcagggtttctgctgggtggatacccacttgtctgccctggtggcagtgtctgagggttttgtcaagtggcgacggtaaaggctcagacaggatgtatccctttgttcttcctctaactccacttctgtcttgccacacacccccccctccccagtgctcagtattttagctttgtgsccacgtgatggcagaaggtcttaattggttgkttttgctctccagataaaatcactagtcagatttcgaaattactttatasccaaggtctgataacatctactgtatcgtttrgaatttaacatataaagcygdsdckrstkdtttttttttttgcccttgggcatatgtttttcaaaagagaaactacttttcatttggtaccatagcgtgacgagcagggsmmaatgmctgtaaaacatgctgtggcacatatatttatagtctgkyaykwsgaacaaatgtaatatattgaarctttatattatatataaggaactttgtactatccgcatttcgtatcagtattatgtagcaygacaragactgtgaggtctgagcagctggtggctcaggacgttgagaaactcgaaggaatcctttcktgaggatgmgcagctatccmtacccatctctctcmcctcaaacggaggagaaaggggaatcagagataatgtgagtgwgtccttgttctctgttcttaggaggaatgttcttaccaactgttcatacgctttataaaccaataaatgtattyygagtwaararaaaaaaaaaaaaaaaaaaaaaaaaaaaaaatggaagcggccgcaagcttattccctttagtgagggttaatttta

SEQ ID NO: 2231 - DNA, 2471 bp, Rattus norvegicus
gtcgacgtgtcgaaaggatgctcaggatatgaatgagccagcggacgcgtgaatggaggtggatggaagcgtgaagtacaaggcggggctccagctgggtgacctcgaggcagacaggccggggctccctcccctctcctcccagcctcccactccgctcccctccccgcggcgcgcagaccttccgagccctcccgagctaccgcgggcaacagagacgggaccacgcagccaccgagcggacagcgcctcctcaggagggggctaccccgccgcgtctccagctctgccctaaggcgaagtcccgcgagcgaggtccagggctcactagtaatgacacgggacactgactggagggccggcatctgggtgtaccaggctctgggtgaagtagttcccaaatcttagagctcaatactcctcatcgtgacactgaaaggaagtttgttctgggaccataaagacctgagtgcaagaccagggcctttgaaaggagtgggctgagggcttgtgggagtttctcttcctccacagagcccaggatgctcctcagctgaagtggctcatggaaccctcagccacgcctggggcccagcccggagtccccactagcagtggggaacccttccacctgcctccagactatgaggacgagttcctccgctacctgtggcgcgattatctctatccgaagcagtacgagtgggttctcatcgcggcctacgtggccgtgtttctcatagccttggtgggcaacactctggtctgcctggctgtgtggcggaaccaccacatgaggacagtcaccaactacttcattgtcaacctgtccctggcagatgtgctggtgactgccatctgcctgcctgccagcctgttagtggacatcaccgaatcatggctcttcggccatgccttgtgcaaggtcatcccctatctccaggccgtgtcggtgtcagtggcagtgctgactctcagcttcatcgccctggaccgctggtatgccatctgccaccctctgctgttcaagagcacagctcgccgtgcccgtggctccatcctgggcatctgggctgtgtcgctggctgtcatggtgccccaggccgctgtcatggaatgcagcagtgttctgcccgagctagccaatcgcacacggctcttctctgtctgtgatgagcgctgggcagatgaactctaccctaagatctaccacagctgcttcttctttgtcacctacctggccccgctgggcctcatgggcatggcctatttccagatcttccgcaagctctggggcccccagatcccgggtaccacatcggccttggtgcggaactggaagcgaccctcagagcaactggaagctcagcaccagggcctgtgtacagagccccaaccccgggcccgagccttcctggccgaggtgaagcagatgcgagctcggaggaagactgccaagatgctgatggtggttctgctggtttttgcactctgttatctgcccatcagtgtcctcaatgtccttaaaagagtgtttgggatgtttcgccaagccagcgaccgggaagctgtctacgcctgcttcaccttctcccactggctggtgtacgccaacagtgcggccaaccctatcatctacaacttcctcagtggcaaatttcgggagcagttcaaggctgcattctcctgctgcctgcctggtctgggtcccagctcctctgccagacacaagtccttgtccttgcagagccggtgttctgtctccaaagtctctgagcatgttgtgctgaccacagtcactacagtgctgtcctgagtggggctggccaggctctgggaggcttgatcctttgcctggggctcaccccacccccacactcatggaaagactgctgctgctcagtccgatccctcaactccagtcctagctttctgcctgagtgactccgccagagtcattccctctcttgaggttgcatcccctaagctgagttgataggggcttaagcatgctcaagagagcagagagcgttgtaaaccgtctagtgcytgtggacgtggttactgtccctgtctcgtatggccytaccswacagtgtcacttcaccctatcagagcttggctttctccccaaagacctgtctcstactcaattataggccctccctggctggagtccrctccaagggtccccacaggcatatycacctggcctgaaggccaccagaagtccggactgcacatrgccagctgcaccaatgtgtccctgtgaactaatttgcgttcagcccttctcagtgagctctgaagctaggtccaccctctccaggtgtggactgcacacagcacaggctggatctcgttggcattgtggagtgcttaaacactctccatgcggccgttcggcatggaggccaacagcccgtggcaactgtaattaaaagcctggtaccgaaaaaaaaarwmramaa

SEQ ID NO: 2232 - DNA, 10705 bp, Rattus norvegicus
aaaaaaggaaaaccaaaattctcctaaggtccaacgcaagctccccactacccgaacacgcccagaggaaccctggggcctctgggacttggttagcaggtattcatggtagcctggaccattattccgaggtagtcttcagaagaggatctgggaaagcctttggattatattgaaactcatccaagatggccaagtacgggcaccttgaagccagccctgatgatgggcagaatcagttcagtgatatcattaagtccagatctgatgaacacaacgatgtacagaagaaaacctttaccaaatggataaacgctcgattttcaaagagtgggaaaccacccatcaatgatatgttctcagacctcaaagatgggagaaagctcttggatcttctagaaggcctcacaggaacatcattgccaaaggaacgtggttccacaagggtgcatgccttaaataatgtcaaccgggtgctgcaggttttacatcagaacaatgtggagctggtgaatatcggaggcactgacattgtggatggaaatcccaagctgacgctgggtttgctgtggagtattattctgcactggcaggtgaaggatgtcatgaaagatatcatgtcagacctgcagcagacgaacagcgagaagatcctgctgagctgggtacggcagaccaccaggccctacagccaagtcaacgtcctcaacttcaccaccagctggacagatggactcgcattcaacgccgtgctccaccggcacaaaccagatctcttcagctgggacagagtggtcaaaatgtccccaactgagagacttgaacatgcttttagcaaggcccatacttatttggggattgaaaaacttctggatcctgaagatgttgccgtgcagctccctgacaagaaatccataattatgtatttaacgtctctgtttgaggtgcttcctcagcaagtcactatagacgccattcgagaggtggagacgctccccaggaagtacaagaaagaatgtgaaggggaagaaattaatatccagagtgcagtgctgacagaggaaggccagagtccccgagctgagacgcccagcacagtcaccgaggttgacatggatttggacagctaccagatagcactagaggaagtactgacatggctgctgtctgcggaggacacgttccaggagcaagatgacatttctgatgatgtcgaggacgtcaaagagcagtttgctacccatgaaacatttatgatggagctgagtgcgcaccagagcagcgtggggagtgtcctgcaggctggcaaccaactgatgacacaaggcactctgtcggatgaggaggagtttgagattcaggagcagatgaccttgctgaacgccagatgggaggcgctccgggtagagagcatggagagacagtcccggttgcatgatgccctgatggaactgcagaagaaacagctgcagcagctctcaggctggctgaccctcacagaggagcgcattcagaagatggaaagcctcccagtgggtgacgacctaccctccctgcaaaacctgcttgaagaacataaaagtttgcaaagtgacctcgaagctgagcaggtgaaggtgaattccttaactcatatggtggtgattgtggatgaaaacagtggggagagcgccacagctgttttggaagatcagttacagaaactgggtgagcgctggacagctgtatgccgctggactgaagaacgttggaacaggttgcaagaaatcaatattttgtggcaggaattattggaagaacagtgtcttttggaagcttggctcaccgaaaaggaagaggctttgaataaagtccaaactggcaactttaaagaccagaaggaactcggtgtcagtgtccggcgtctggctattttgaaggaagacatggaaatgaagaggcagactctggaccaactgagtgagattggccaagacgtgggccaattgctcagtaatcccaaggcatctgagaagatgaacagcgactctgaggagctaacccagagatgggactctttggttcagagactagaagactcttctaaccaggtgactcaggctgtagcaaagctcggcatgtcccagattcctcagaaggatcttttggagaccgttcatgtaagagaacaaggaatgataaagaagcctaagcaggagctgcctcctcctcccccaccgaagaagagacagatccacgtggatgtggaggccaagaaaaagtttgatgccacaagtgcagaactgcagagctggattttgagatcaaaggctgccctccagaacacagagatgaacgagtataagaagtcgcaggagacctcgggagtgagaaagaaatggaagggattagaaaaagaacaaaaggaaaagatcccccagctggatgaactgaatcaaaccggacaaatccttcaggagcaaatgggaaaagaaggccttttggctgaagaaataaacgacgttctggaaagggttttgttggagtggaagatgatctctcagcagctggaagatctgggaaggaagatccagctgcaggaggatataaatgcttattttaggcagcttgatgctctcgaaaagaccatcagggcgaaggaagagtggctgagggatgcatccttttctgaatcaccccagcggtctttgccaagcttaaaggattcctgccagagggaactgacagacctccttggccttcaccccagaattgagatactgtgtgcaagctgttcagccctgaggtctcagccctctgtcccaggttttgtccagcagggttttgatgaccttcgacgtcactaccaggctgtgcagaaggctttagaggaataccaacaacagctagaaaatgagctgaagagccagcctgaacctgcgtatttggacacactgaacactctgaaaaaaatgctaagcgagtcagaaaaagcagcccaggcctctctgagtgccctgaacgatccctcagcggtggagcaggccctgcaggagaaaaaggcccttgatgaaacccttgagaatcaaaaacctacattgcataaactttcagaagaaacgaaggctttggagaaaaatatgcttcctgatgtggggaaaacgtacagacaagaatttgatgatgcccaaggcaaatggaataaagtaaagaccaaggtttccagagatttacgttcgcttgaggaaatcatccccagactcagagattttaaggctgattcagaagtcatcgagaagtggacgaatggcgtgaaagacttcctaatgaaagagcaggctgcccaaggagataccactgccctgcagaggcagcttgaccaatgcaccacatttgccaatgaaatcgaaacaatcgagtcatctctgaaaaacctgagggacatagagactagccttcagaggtgtcccgtcactggagtcaagacatgggtacagacaagactagcggattaccaatcccaactggagaaattcagccaagagattgatattcaaaagagcaggttgtctgacagtcaggagaaagccatgaacttgaagaaggatttggctgagatgcaggagtggatggctcaggccgaagaggactatctggagagggacttcgagtacaagtctccagaagaacttgaaagtgcagtggaggagatgaagagggccaaagaggacgtgctgcagaaggaggtgagggtgaaaattctcaaggacagcatcaagctcgtggctgccagggtgccctctggtggccaggagctgacatcggagttcaacgaggtgctggagagctaccagcttctctgtaataggattcgagggaagtgccacacactagaggaggtctggtcgtgttgggtggagctgcttcactatctggatctggaaaccgcgtggttgaacactttggaggagcgcatgcagagcacagaggccctgcctgagagggcagaagctgttcacgacgctctggagtctcttgagtctgttttgcgtcatccagcggataatcgcacccagattcgggaacttgggcagactctgattgatggtgggatcctggatgacatcatcagcgagaagctggaggcttttaacagccgctatgaagagctgagtcacttggcggagagcaaacagatctctttggagaagcaactccaggtcctccgcgaaactgaccacatgcttcaggtgctgaaggagagcctaggggagctggacaagcagcttaccacatacctgacggacaggattgatgccttccaactgccccaggaagctcagaagatccaagcagaaatctcagcccatgagctcaccctggaggagctgaaaaagaatgtccgccctcagccccccacctcccctgagggcagaaccacaagaggagggagtcagatggacctgctccagaggaaactccgagaggtttccaccaaattccagcttttccagaagcccgcgaatttcgagcagcggatgcttgactgcaagcgcgtgctggatggcgtgaaggccgagctccacgtcctcagtgtgaaggatgtggaccccgacgtcatccagacccacttggacaagtgcatgaaactatataaaacgttgagcgaggtcaagcttgaagttgagactgtcatcaagacagggaggcacattgtccagaagcagcagacggacaacccaaaaggcatggatgagcagctcacttctctgaaagtcctctacaatgacctgggtgcacaggtgacagaagggaagcaggacctggaaagagcctcacagctgtccaggaagttgaagaaggaggctgccatcctctctgaatggctctctaccacagaggctgaactagtgcagaaatctgcctcagaaggggtgatcggtgacctggacacagaaatctcctgggctaaaaacattctcaaggatctggaaaagagaaaagttgacttaaacaccatcacagagagtagtgctgcccttcaacacttggtggtgggcagtgagtctgttttagaagataccctatgtgtgctcaacgctgggtggagccgagtccgcacgtggaccgaggactggcgtaataccttgctgaaccaccagaaccagctggaggtctttgatggacatgttgcccacatcagtacctgtctctatcaagccgaagctctattggatgagatcgaaaagaaaccggcgagtaaacaggaagaaatcgtgaagcgtttactgtcagaactgagtgatgccagcatccaggttgagaatgttcgggaacaagccatcgtcctggtgaatgctcgtggaagctccagcagggaacttgtggaaccaaaattagctgaactgggcaagaactttgaaaaggtgtcccagcacataaacagtgcccaaatgctgattggtcaggatcctgctggaactgttgaagctgttgggcctttctctgacttggaaagcttagagagtgacatagaaaacatgttgaaagttgtggaaaagcacttggaccccagtaatgatgagaagatggatgaggagcgagcccagattgaggaagttctacaaagaggggagcatttgttacatgaaccaatggaggacagtaagaaagaaaagatccgtttgcagttactacttttgcatacacgttacaacaaaatcaaggcaatcccgcagagaaaaacaattccgctttcttctggaattatgtcatctgccctccctgcggattatctggttgaaattaataaaattttgctcactctagatgacattgaattatcgcttaatattcctgaactaaacaccactgtctacgaagacttctctttccaggaagactctctgaagagaatcaaagatcagctggacagactcggagagcagctcgcagcagttcatgagaagcagcccgatgtcatcctcgaagcctctggtcccgaagccattcagatcagggacatgctctctcagctgaacgcaaagtgggacagagtgaataggttatacagcgaccggagagggtccttcgccagggctgtggaagaatggaagcagttccactgtgaccttgatgacctcacgcagtggctgtctgaagctgaggacctgctggtaggcacttgtgctccagatggcagcctggacctggagaaagctaggacacaccagctggaactggaagacggcctcagcagccaccagccctgcttgattgatgtaaaccaaaagggagaagacattgtacagagactccgcccctcagatgcaagctttctgaaggataaactggccagtttaaaccagcgctggagtgctcttgtagctgaggtgaaggatctgcagcccaggctaaaaggagaaagtaagcaggtgtcggggtacaggaaacggctggatgaggtcgtctgctggttaacaaaagtggagaactcggtgcagaagagatcaacccctgacccggaagaaaacccgtgggaattaacagatttagcccaagagatggacgctcaggctgaaaacattaagtggctgaacagagccgaactggaaatgctttcagacaaaaatctgagtttgtgcgagagagataatctttcagaaagcttgaggaatgtaaatacaatgtggaccaagatatgcagagaggtgcctagcctactgaagacacgcacccaagacccctgctctgccccacagacaaggattgctgctcatcccaatgtccaaaaggtggcgctagtatcatctgcatcggatgctcctctgcgtggccccgagatctcagttcctgctgatttggataaaaccatcaccgaactggctgactggctggtgttgatcgaccaaatgctgaagtccaacattgtcactgtgggggacgtgaaggagatcaataagacagtttcccggatgaaaatcacaaaggctgacttagaacagcgccatcctcagctggattttgtattcacattggcccagaatttgaaaaacaaagcttccagttcagatttgagaacagcaatcacgggaaaattggaaaagctgaagacccagtgggagagtacccagcatggcgtggagctgcggcggcagcagttggaggacatggtcgtggacagcctgcagtgggacgaccacagagaagagacggaagagctcatgaggaaacacgaggcccgcttctacatgcttcagcaggcccgccgggacccgcttagcaaacaagtttctgacaatcaactcttgcttcaagaactgggttctggcgatggtgtcatcatggcatttgataacgtcctgcagaaacttctggaagaatacagtagtgatgacaccaggaatgtggaagaaaccacagagtacttgaaaacgtcatggatcaatctcaaacaaagcattgctgatagacagagtgccttggaggctgagctgcggacagtgcagacgtctcgtagagacctggagaactttgtcaagtggcttcaggaagcagaaaccacagcaaatgtgctggccgatgcctctcagcgggagaatgctcttcaggacagtgtcctggccaggcagctcagacagcagatgctggacatccaggcagaaattgatgcccacaatgacatatttaaaagcatcgatgggaacaggcagaagatggtgaaggctctggggaattctgaggaggccacaatgcttcagcatcgcctggatgacatgaaccaaagatggaatgatctgaaggcaaaatctgccagcatcagggcccatttggaggccagtgctgagaaatggaacaggttgctggcatcgctggaagagctgatcaaatggctcaacatgaaagacgaagagcttaagaagcagatgcccattggaggggacgttcccgccttacagctccagtatgaccactgcaaggtgctgagacgtgagctaaaggagaaagaatattctgtgctgaacgccgtagatcaagctcgagtgtttctggctgatcagccgatagaggcccctgaagaacccagaaggaacccacagtcaaagacagagttgactccggaggagagagcccagaagatcgccaaggccatgcgcaaacagtcctctgaagtcagagagaagtgggagagtctaaatgctgtgactagcacctggcaaaagcaagtaggaaaggcgttagagaaactccgagaccttcagggagccgtggatgacctcgacgcggacatgaaggaggtggaggccgtgcgcaatggctggaagcccgtgggggacctgcttatcgactcgctgcaggatcacatagagaaaaccctggcgtttagagaagaaattgcaccaatcaatctaaaagttaaaacaatgaatgacctgtccagtcagctgtccccactcgacctgcatccgtctccaaagatgtctcgccagctggatgacctcaatatgcgatggaaacttctccaggtttcggtggaggatcggctcaagcagctccaggaagcccacagagattttgggccatgttcccaacactttctgtccacttcagtccagctgccgtggcagagatccatttcgcataataaagtgccctattacatcaaccatcaaacacagacaacctgttgggatcatcctaaaatgactgaactctttcaatcccttggtgatctgaataatgtacgtttctctgcctaccgcacagccatcaaaatccgaaggctgcagaaarcactatgcttggatctcttagaactgaacacaacaaatgaagttttcaagcagcacaaactgaatcaaaatgatcagctcctgagtgtcccagatgtcatcaactgtctgaccacaacttacgatgggcttgaacaactgcacaaagacttggtcaatgttccactctgcgtcgatatgtgtctcaactggctgctcaacgtatatgacacgggccggactggaaaaattagagtacagagtctgaagattggattgatgtctctctccaaaggcctcttagaagaaaaataccgatgtctctttaaggaggtggcagggccaacagagatgtgcgaccagcggcagcttggcctgctacttcacgatgccatccagatcccgaggcagctgggggaagtagcagcctttgggggcagtaacattgagcccagtgtccgaagctgtttccagcagaataacaacaagccagaaatcagtgtgaaggagtttatagactggatgcggttggagccacagtccatggtgtggttgccggttctgcaccgtgtggcagctgcagagactgcaaaacatcaggccaaatgcaacatctgcaaagaatgtccgatcgttgggttcaggtacaggagcctaaagcatttcaactatgacgtctgccagagctgcttcttttccggaagaacagccaagggccacaaattacattacccaatggtggaatactgtataccaacaacatctggggaagacgtgcgagatttcacaaaagtactgaagaacaagttcaggtccaagaagtattttgccaaacacccccggcttggctacctgcctgtccagaccgtgctcgaaggagacaacttagagactcctatcacgctcatcagtatgtggccagagcactatgacccctcccagtcccctcagctgtttcatgatgacactcactcaagaatagagcaatacgccacacgactggcccagatggaaaggacaaatggatccttcctaactgacagcagctctaccacgggaagtgtggaggacgagcatgccctcatccagcagtactgccagacgctgggcggggagtctcctgtgagccagccacagagtccagctcagatcctgaagtctgtggagaaggaagagcgtggggaactggagcggatcattgctgacttggaggaagagcaaagaaatctgcaggtggagtatgagcagctgaaggagcaacacctaagaaggggtctccccctgggctcccctccagactccattgtatcccctcaccacacgtccgaggactcggaactgatagcggaagctaaactccttcggcagcacaaagggcggctggaggcgaggatgcagattctggaagatcacaataaacagctggagtctcagctgcatcgcctcagacagctcctggagcagcctgactctgattcccgcatcaatggtgtctccccctgggcttccccacagcatccttcattgagctactcgcttgaccccgacccaggcccacagtcccaccaggcagcatctgaggacctgctggccccgcctcatgacaccagcacggacctcacagatgtgatggagcagctcaacagcacgtttccctcctgcagcccaaatgtccccagcaggccacaggcaatttgaagcatttatccagccaaccaacgtttcccgaccttcagtattgccctcttctgcaaatgccaaccccattcaacctgatgctccgtggctcccagacacttgcctttgagtgctgaccaggtgttctactgagggaatcaaacaccgactatccaaagagaaaaggatgctttgtttttataataacgtatattattgtttccttcttccctttctatgcaactgtaaattaatgaacagagaaggatttgaggtgt

SEQ ID NO: 2233 - DNA, 3114 bp, Rattus norvegicus
tgctcatggggcaggcggagacaagcttgcagcactgagccgaaccggaccagtccgtgatgtccagcaccaaattggaggattccctccctcgtcgcaactggtcatctgcttcggagctgaatgaaactcaagagccgtttttaaaccccacagactatgacgacgaggaattcctgcggtacctgtggagggaatacctacacccgaaagaatatgagtgggtcctgatcgcagggtatatcatcgtgttcgtcgtggctctcatcgggaacgtcctggtctgcgtggcagtgtggaagaaccaccacatgaggacagtcaccaactacttcatagtcaacctctccctggctgatgtgcttgtgaccatcacctgccttccagccacccttgttgttgacatcaccgagacttggttctttggacagtccctctgtaaggtcatcccttatttacagactgtgtcagtgtctgtgtctgttcttacattgagctgcattgccttggaccgatggtacgccatttgtcaccctttgatgttcaagagcacagccaaacgggctcgaaacagcatcgttgtcatctggatcgtctcctgcatcataatgattcctcaagccattgtcatggagcgcagcagcatgctccctggcctagccaataagaccaccctctttacagtctgcgatgaacgctggggaggtgaagtttacccaaagatgtaccacatctgcttctttctggtgacgtacatggcacccctgtgtcttatggtattggcttatctccaaatattccgtaaactctggtgcagacagattcccggaacttcttctgtggttcagagaaaatggaagcagccgcagccggtttctcagccccgggggtccggacagcagagcaaggcccggattagcgctgtcgctgctgagataaagcagatccgagcacgaaggaaaacagcccggatgctcatggttgtacttctggtctttgcaatttgctatctaccaatcagcatcctcaatgtgctaaagagagtgttcgggatgttcacacacaccgaagacagagagactgtctacgcctggttcactttttctcattggcttgtgtatgccaatagtgctgcaaacccaattatttataattttctcagtggaaaatttcgagaggaatttaaagctgccttttcttgctgtcttggggttcatcgtcgtcaaggagatcgcctcgccaggggacgcacaagtacagagagcaggaagtccctgactactcagatcagcaactttgataatgtatcaaaactctcagagcacgtggcgctcaccagcataagcacactcccagcagccaacggggcaggaccgcttcaaaactggtatctacaacagggagtgccatcttcactcctgtccacctggctggaggtctgagggaagagacccgagcatccttatggaatctcacccatgtcttctcaaagagataatggtttacaaaaaaattgccactgtgttcttagtgtgatgttaaagaagatggactttaaggcacttatgcgctttatgcgtaacccggatgacttgaggttttatttactgaagtttctgtttcgtggaagccattcatgttcaagaataattattgcctggaagaaaactgataagtaaaacacatacataaatgatgaactggggatagaaccatgaaccctgtgtgtacttctcagcattagggcccatgaatctggagagatttggattaatgtggtgaccttcatagtacaaatgattagaaaataaaacaggaggccccaaatcatatcaatgttgttggggtgcttaactacttcattatgtactaatgacacaaattagaagacgtcataggaaggttttgctttggaactgagctatactgaacattggacattgaccgacctttatttcctttgtatttcaagccttcaatgtgagatgtcaacgtcattagttttgtcactaataagatggtgtaataattttaccaaatatatttgagatgaatgatttatggatttttataatgtcatgaaaaccgtaatattttgagttcattcctttggggttaaatattaacccaagtttatgagagggggaaaaaacatgatttctaaattttccacaatgtggaataataaagctgttataaactattgataagttcagtgtaaaaatgttaggcacagtactaccccggttcaccccagtgtacattaattcaggaagaataattaactatgtttataagtgacaatctaaatgtgtctagagttgttactaatcataatggaaatgagggctattagcactttgatacattgtaacaatatcaggcttgcattagctgtgaattgtaacaggaattaactgcatttcaagaaacatggctagtccttacaattggaaacctttcagtgggacttaactttcaacagctctcactcttctacatcctgtcataggcaaaagcgtaaattccattagattattttcaaatagtttccacattgcttgaggcaaactaatgggaattttaggatcattatataagtaggagagtattcatttaacatcctctccatcattttatgcacagaagaaaacaacataaacctgaaaatcactgttagttctcgaagttcaaagggaatgcttttctacgctcttctgctattgaaaagggggacagaagactcccccaacttgccacgtatttctattcttttaaattttctttatagactttggagttagaaaaatctgggtttttcatgaaatatgtttttattattgtatccatgtatgtatgtatcagcatgccagttgttcaatagttatttacttaaaataattatatctttatgcttgattgtactgtgtcttcatgaagatctttttcatataaaaatgtgattatatgtctcccaatgtgaaggttaaattatgtaatttttaggtaaaataatcgcatccatgttgtcttgttgtaccatgtgaaaaattatgttgtcgttcaatacataaattggatatttgctcatgaaaaaaaaaaaaaaaaaaaaaa

SEQ ID NO: 2234 - DNA, 1582 bp, Rattus norvegicus
catgacttccaagccgcattccgactggattccctacagtgtcctagatgatgagggcagcaacctgaggcagcagaagctcgaccggcagcgggccctgttggagcagaagcagaagaagaagcgccaagagccgctgatggtacaggccaatgcagatgggcggcctcggagccggcgtgccaggcagtcagaggagcaagcccccctggtcgagtcctacctcagcagcagcggcagcaccagctaccaagttcaggaggccgactcacttgccagtgtacagccgggagccacccgcccaccagcaccagcctcagccaagaagaccaagggagcagctgcatccgggggccagggtggggcccccaggaaggagaagaaggggaagcataaaggcaccagcgggccagcaactctggcagaagacaagtctgaggcccaaggcccagtgcagatcttgactgtgggacagtcagaccacgccaaggatgcaggggagacagcagccggcgggggcgcacagcccagcgggcaggacctccgagccacgatgcagaggaagggcatctccagcagcatgagctttgatgaggaagaggatgaggatgaaaacagctctagctcctcccagctgaacagcaacacccgccctagttctgccacgagcaggaagtccaccagggaggcagcatcagcccccagcccagcagccccagagccaccagtggatattgaggtccaggatctagaggagtttgccctgaggccagctccacaagggatcaccatcaaatgccgaatcactcgggacaagaagggcatggaccggggcatgtaccccacctactttctgcacctagaccgtgaagatggcaagaaggtgttcctcttggcgggcaggaagagaaagaagagtaaaacttccaattacctcatctctgtggacccgacagacttgtctcggggaggcgatagctatatcgggaaattgcggtccaacctgatgggcactaagttcaccgtttatgacaatggcgtcaaccctcagaaggcatcatcttctacactggaaagtggaaccctgcgccaggagctggcagccgtgtgctatgagacaaatgtcctaggcttcaagggaccccggaagatgagtgtgatcgtcccaggcatgaacatggttcatgagagagtctgtatccgsccccgmaatgaacacgagacgctgttagcacgctggcagaacaagaacacggagagcatcattgagctgcagaataagacgccagtctggaatgatgacacgcagtcctatgttcttaatttccatgggcgcgtcacacaggcttccgtgaagaacttccagatcatccacggcaatgacccggactacatcgtcatgcagtttggccgggtagcagaagatgtgttcaccatggattacaactacccgctgtgtgcactgcaggcctttgccatcgctctgtccagctttgacagcaagctggcctgcgagtagaggcttccactgcctttagggcggccccgtctggagtggagcctgcctgcacctgcccgggcg

SEQ ID NO: 2235 - DNA, 7872 bp, Rattus norvegicus
cctagaccctggccagtcaccggcgtcccctgtctcggtgttcccactctctgcaccctaagctgtacccctgcggctggcgaggggccgcggacccggctggagatgcgaatcctgcagagcttcctcgcgtgcgttcagctactgtgcgtgtgtcgcctggactgggcttatggatactacagacaacagagaaaacttgttgaagagattggctggtcctatacaggagcactaaatcaaaaaaattggggaaagaaatatccaatatgtaatagcccaaagcagtctcctattaatattgatgaagatcttacacaagtaaatgtgaatcttaagaaactgaaatttcagggttgggaaaaaccatccttggaaaacacgtttattcacaacactgggaaaacagtggaaataaatctcaccaatgactactatctcagtggaggactttcagaaaaggtcttcaaggcaagcaaaatgacttttcactgggggaaatgcaatgtgtcatcggaaggatcggaacacagcttagaagggcagaagtttccactcgagatgcaaatctactgcttcgatgcggaccgattttcaagttttgaggaaacagttaaaggaaaaggaaggttaagggctctatccattttatttgagattggagttgaagaaaatttggattacaaagccattattgatgggactgaaagtgttagtcgttttggaaagcaggctgccttagatccgttcatcttgcagaacctcctgccaaactccactgacaagtactacatttacaacggatcactgacatcccctccctgcacagacaccgtcgaatggattgtttttaaggatacagttagcatctctgaaagccagctggctgtattttgtgaagttctcacaatgcaacagtccgggtatgtcatgttgatggattacttacaaaacaatttccgagaacaacagtacaagttttccaggcaggtgttttcttcgtacactgggaaggaagagattcatgaagcagtgtgcagttcagaaccagaaaatgtgcaagctgaccctgagaattacaccagccttctgatcacatgggaaaggcctcgggttgtttatgacacaatgattgagaagtttgcggttctgtaccagccactggagggaaacgaccaaaccaagcatgagtttttaacagatggctatcaggacttgggtgccattctcaataacttaatacctaacatgagttatgtgctccaaatagtggccatatgctctaatggcctttatggaaagtacagtgaccaattgatagtcgacatgcctactgaggatgctgaacttgacctctttcctgaattaattggaactgaagaaataatcaaggaggaaaactatggaaaaggcaatgaagaagacactggcttgaatcccggtagagacagtgccacaaaccaaataaggaaaaaggaaccccaggtttctaccacaactcactataatcacatggggactaaatataatgaagccaagactaaccgatctccaacgagaggatctgaattctctggaaagagtgatgttctcaacacatccctgaatcctacttcccaacaggttgctgaattcaatccagaaagagaaatgtccttgccttctcagattggaactaacctgccaccacacagtgtggaaggcacctcagcctccttaaacagtggctctaaaactctccttgtcttcccacagatgaacttgtctgggactgcagaatccttaaatatggtttccataacagagtacaaagaggtgtctgctgacctcagtgaggaagaaaacttactgactgatttcaagctcgatagtggagcagatgattcgtcaggctctagccctgcatcctccactgtccccttttccacagataatctatcccatggatatacgtcttcttcagacacgcccgaggcggtcacgtatgatgtccttaggccagaatctacgagaaatgctctagaggattcggctccatcaggttcagaagaatcactaaaggatccctctcttgaagggagtgtgtggttccctggatccacagacctaacaacacagtctgagactggatctgggagagagggctttctccaagttaactccacggacttccaagttgatgaatcgagggagacaactgagacattttctccagatgctaccgcgtcccggggtccttcggtcacagatatggaaatgccacattattctacctttgcctaccccccgactgaagtaacatcacatgctttcactccgtcctccagaccacttgatttggctcccactagcaacatcctccattcgcagacaactcaaccagtatacaatggtgagacacctcttcaaccttcctacagtagtgaagtctttcctctagtcacccctttgttgcttgacaatcagaccctcaacactacccctgctgcttcaagtagtgattcggccttgcatgctacgcctgtattccccagtgttggtgtgtcatttgactccatcctgtcttcctatgatgatgcacctctgctcccattttcctctgcttccttcagtagtgacttgtttcaccatctgcatacggtttctcaaacccttccgcaagttacttcagctgctgagagggatgagctgtctttgcatgcttctctgctggtggctgggggtgatttgctgttagagcccagccttgttcagtattctgatgtgatgtcacatcaggtcactattcatgctgcttcggacacattggaatttggtagtgagtctgctgtcctttataaaacgtctatggtttctcaaatcgaatcacccagcagtgatgtcgttatgcatgcatattcgtcagggcctgaaacttcttatgccattgagggctcccaccacgtgctcactgtttcttccagttctgcaatacctgtgcatgattctgtcggtgtagctgatcaggggtccttacttatcaatcctagccatatatcactgcctgagtcctcatttattactccaactgcatcattactgcagcttcctcctgccctctctggtgatggggagtggtctggagcctcctctgatagtgaattgcttttacctgacacagatgggctgagaactcttaacatgtcttcacctgtttctgtagctgattttacatacacgacatctgtgtctggcgatgatattaagccgctttctaaaggtgaaatgatgtatggaaatgagaccgaactgaaaatgtcttctttcagtgacatggcatacccttctaaaagcacagtcgtgccaaagatgtctgatattgtaaataagtggagtgaatctttaaaagaaacctctgtttccgtatctagcataaacagcgtgtttacagagtctcttgtttatcccataactaaggtttttgatcaggagattagtcgagttccagagattatcttcccagttaaacctacacacacagcatctcaagcatctggtgacacttggcttaaacccgggcttagcacaaactcagagcctgcgctctctgacactgcttctagtgaagtatcacacccttcaacacagcccttgctctatgaggccgcatctccttttaatacggaagcattgctgcaaccttcctttccggcttctgatgttgacaccttgcttaaaactgcccttccctctgggcctcgtgatccagtgctgactgaaacccccatggttgagcaaagtagctcttccgtatctcttcccctggcatcagagtctgcttcaagcaaaagcacgctgcactttacatctgtaccagttctcaatatgtcaccttctgatgtgcaccccacttcacttcaacgcttaacagttcctcactcgagggaggaatattttgaacaaggtttgcttaagagcaaaagtccccagcaagtcctgccgtccttgcacagccatgacgagtttttccaaactgcacatctggacattagccaggcctaccctccaaaaggaaggcatgcatttgctactcctattttatcaatcaatgaaccacaaaatacacttataaacaggcttgtgtattctgaggacattttcatgcaccctgaaatttctattactgataaggcacttactggtctaccaacgaccgtttctgatgtacttatagctactgaccattctgttccattaggaagtgggcccatttccatgacaactgtttctcccaacagagatgattctgtgaccacaaccaagttgcttcttccttctaaagctacttctaagccgactcatagtgccagatctgatgccgatttagtaggaggtggtgaagatggtgatgactatgatgatgatgattatgatgacatagatagtgatcgctttcccgtaaataagtgtatgtcatgttcaccctatagagaatcacaggaaaaggtaatgaatgactcggacacccaagaaagcagtcttgtggatcagagtgacccaatttcacatttgctctctgagaataccgaagaagaaaatggaggcacgggtgtaactagggtggataaaagtcctgataagtcaccaccaccaagtatgctaccccagaagcacaatgatggaagagaggaccgtgacattcagatgggtagtgctgtccttcctcacaccccaggatctaaagcatgggcagttttgacaagtgatgaagagagtgggtcagggcaaggcacctcagatagccttaatgataatgagacttccacagatttcagtttcccagatgttaatgaaaaggatgctgatggtgtcctggaagcagatgacacaggcatagctccgggatctccacggtcctccacaccatctgttactagtgggcattcaggagtatccaacagttcagaggcagaggccagtaatagtagccatgagtctcgtattggtctagctgaggggttggagtctgagaagaaggcggttataccccttgtgatcgtgtctgccctgacttttatctgtctagtggttcttgttggtattctcatctactggagaaaatgcttccagacggctcacttttatttagaagacaatacatcccctcgagtaatatctacaccaccaacacccatctttccaatttcagatgatattggagcaattccaataaagcattttccaaagcacgtagcagacttacatgcaagtaatgggttcactgaagaatttgagacactgaaagagttttaccaggaagtgcagagctgcactgttgacttaggtattacagcagacagctccaatcacccagacaacaagcacaagaacagatatgtcaacatcgtagcctatgatcatagcagggttaagctcacacaacttgctgaaaaagatggaaaactgactgattacatcaatgccaattatgttgatggttacaacaggccaaaggcttacattgctgcccagggtccactgaagtccacagcagaagatttctggagaatgatatgggagcataatgtggaagtcatcgttatgataacaaacctcgtggagaaaggaagaagaaaatgtgaccagtactggcctactgatggcagtgaagaatacgggagcttcctggtcaaccagaagaatgttcaggtgcttgcttattatactgtgaggaatttcaccctaagaaacacaaagataaaaaagggctctcagaaaggaagatccagtggacgcctagtcactcagtatcattacacccagtggcctgatatgggtgttcccgagtactccctacccgtgctggcctttgtgaggaagactgctcaggccaagcgacatgcagtcgggccagttgttgtccactgcagcgctggcgtggggagaacgggcacatacattgtactagacagtatgctacagcagattcaacacgaaggaaccgtcaacatatttggtttcttaaaacacattcgttctcaaaggaattatttggtgcaaacagaggagcaatacgtcttcattcacgacacactggttgaggccatactcagcaaagagacagaggtgcctgacagccacatccattcctatgttaatacactcctcatacccggaccatcaggcaagacaaaactagagaaacaattccagcttctgagtcagtcaaatattcttcagagtgactactccacggccctgaagcagtgtaacagggagaagaacagaacatcctccatcatccccgtggaaagatcgagggtgggcatttcatccctgagtggggaaggcacagactacatcaatgcatcctatattatgggttattaccagagcaatgaattcatcatcacccagcacccccttctacacaccatcaaggacttctggagaatgatatgggatcataatgcccagctggtggttatgattccagatggtcaaaacatggcagaggatgaatttgtttactggccaaataaagatgagcccataaattgcgagagcttcaaagtcacgcttatgtctgaagaacacaaatgtctttcgaatgaggaaaaactgatagttcaagacttcatcttggaagcgacacaggatgattatgtgctggaagtaaggcattttcagtgcccgaaatggccaaatccagatagtcccattagtaaaacatttgaacttataagtattatcaaagaagaagctgctaacagagatgggcccatgattgttcacgatgagcatggaggagtaacagcagggacattttgtgctctcacaacccttatgcaccaactagaaaaagaaaactccatggatgtttaccaagtagccaagatgatcaatttgatgaggccgggagtcttcactgacattgagcagtaccagtttctctacaaagtggtcctcagcctggtcagcacaaggcaggaagagaatccatccacctccctggatagtaatggtgcagctttgcctgatggaaatatagctgaaagcctggagkctttagtctgacgcagaaagggtgtaggacmaccctcatccaagcagtgtctctttctaaacttagaaaaatgagtccagttctgttatcygwktrcttcccatgacctgacggtaactcattctgctgccaaattgacaccattaacaacgtgtgcctttttgaaagacttcttgtaatccacttattatgtttgaactaaaatgattgaattttacaatgtttctaagaattgaattgtggcatttttttccatattgattttaacaacaacaacaaaaaaaatttgtagataataggaaacaccaaccttgggagatatttgttcttaagtgtcaartttttagctgtatttgtagcaatcatcagktttgmtagaaatataacttttaatrtmgtagattgtaagtaaaccactttatccccgatgatattcaacattttacaactgcagtattcacctgaagtaggagtgmcagtaacttatgtwaatactgccctggtgtctccatggaccaaatttatatttataattgtagatttttatattttactactgtgtgagttttctagtggtgtacttgagtttaattagcttactctctggtcttaacttactctaaatgycttctaaaactgtactgtgttatccaagaaactaaccttctttctgcatgtcattttaacttttgtgaaaataggaaaccacttgttttaaaagatgtttttatgagaataacaccttaccaaacattccttaaatggtttttatctgagaagttgcaaaaataaatataaatattgccattaaaaaaaaaaaaaaaaaa

SEQ ID NO: 2236 - DNA, 2622 bp, Rattus norvegicus
gcgcggatcgcgcgtcccctccgttctgcatccccaaacttcagccgcagctctgtttcaacccatcggctgcttgcttcaaatcagacagcaccgcgacccagacacccgagtccgcggagtgaaagcacaacgccgagtaggaccagaccaggaaaatagactcgkgaagcagcaactctggattgggagggcagaagccaacaagtgagaaggcgcggcgtttccggggcgctgtgcgaaagctagagcakgcgccagagaagacagctcgagctcagaacccgagaccaagcctctctcccggaggcagctcagctcctatcttctctaggcccgctgcagcgtgcgctgggcttcgttttatgcgggtacgagccacgtccccggggaatatgcagcgtgcgtggatcctgctcaccttgggcttgatggcctgtgtgtcggcagagacgagagcagagctgacatctgataaggacatgtaccttgacagcagctccattgaggaagcttcaggattatatcctattgatgatgatgactattcttctgcctctggctcaggagcttatgaagacaaagggagtccagatctgacaacatcccaactgattccaaggatctycctcactagtgctgctcccgaagtggaaaccatgacgttkragacacaaagcatcacacccactcagaccgagtcacccgaagaaactgacaagaaggagtttgaaatctctgaggcagaagaaaagcaggaccctgctgtaaaaagcacagacgtgtacaccrvgarrcattcagacaatctgttcaagcggacggaagttctagcagctgtcattgctggcggtgtgattggctttctcwwtgccattttcctcatcctgttgttggtgtaccgcatgcggaagaaagacgaaggaagctacgaccttggagaacgcaaaccgtccagcgcagcttaccagaaggcacccactaaggagttttatgcataaaactcccacttagtgtctctatttaagagatcactgaacttttcaaaataaagctttagcatagawwawwraawawmwwwrwwawmwrwtttgttcattacagagccatgctggccctttaatgatgaagatcccattgtatttaaaatttttcatatatttctttagaatgacttaaaagtaaaaatttaacatctgcagtgttctgtgaawarmarwrrmaaaawattttgttacaaaaacccttgacattcatggaattgatttgaacatctatgtgcaaatacaaaatgattgtgtttgtsctytggttcaaagatgactgstgktcccctcatcagcagatctycagttgaccttaccsasdhgrbctktgytaatttatcksttgttcctcttctmtgccctcccttcttgtctcctcccttaaaaacaaaaccytatgccttttgtagctgtcatggtgcaatttgtctttgaatgattacaataatggtaatttastgyatmtgtgatytttttcaattatgtaaacyytaacctsctctttatgtaattwttttaaatgtcagactacccattttacacttgctttaatttccattccctgtagcttcaggcagatttgcaaaggcaaattmtaaaattggattattamtacgaaactgttagtcctagttatctaarcagtcttctcttggaggatttgacatcmytgacaagcctyagcaaacccmaagatkctaacagtatttgagaagttgywacagactcctktggccactgtacttgctagtttacaatwtgaaggkacaaggamgagtttaaaggaaaaaaaagatcagtttttgttcttaaaaatgcatttaagttgtaaacatctttttaagcctttgaagtgcmtatgattctatgtaacttgktgcagactggtgttaatgagtatatataacagtttttaaaaagttggtattttataagcmcagacaattytaatggtaacttttgtagtcttatgaatagacataaattgtaatttgggaacaagyaaamtactgaataaatcacawggcctaawwwwrraaawrwmamwrwwawaaawwwrwaswktkstkrycrmawgtacwgcttccctttgctatgactgactgtctgttctcagtgactatgtgggtttgatttccgagtatccatggtgtctgtaagaccaaagagcccctcagttaggctgtttattacaagatttacctctggattggccagaggaaatgtatgcgttatcctgcatgtgtctgggtgcagggatagaatgactgccakgggatttcaaggtttgcaaactgtgtagtgtagctattgacaatattgagacagatgccttcttttgcaatttactcttaaaaagtataaattccaaagmassarrgggacctttctagaagtakataactggggatcagccctatagaattgcttaactgtcaaagctcccttgcagaagaaccctgtgagtgacaaccacagccactccatgggcctggagggaagggtgtggaggctctgcatgttaaaacgacaacctggctgcttasgatggatgtttctagaaaaaataatgcca

SEQ ID NO: 2237 - DNA, 2378 bp, Rattus norvegicus
agcctcagagcacsgkctgtcatcaatccagtccttgcgtgtctgccggcgccccttccgctgcagtcaccgaactgctgtctagagagagcccagcgtcagtaccatgagagtctggcttgcgagcctgttcctctgcgccttggtggcgmactctgaaggtggcagtgaacttgragcttctgatgaatcaaactgtggctgtcagaacggaggagtatgtgtgtcctacaagtacttctccagcattcgaagatgcagctgcccaaagaaattcaaaggggagcactgtgagatagatacatcaaaaacctgctatcatggaaatggtcaatcttaccgaggaaaggccaatactgacaccaaaggccggccctgcctggcctggaattcacccgctgtccttcagcaaacctacaatgctcacagatccgatgctcttagcctaggcctggggaaacacaattactgcaggaaccccgacaaccagaggcgaccctggtgctatgtgcaaattggcctaaagcagtttgtccaagaatgcatggtgcaggactgctctctcagcaaaaagccttcttctactgtagaccaacaagggttccagtgtggccagaaggctctaaggccccgcttcaagatcgttgggggagaattcactgtcgttgagaaccagccctggtttgcagccatctacctgaagaataagggaggaagccctccctcctttaaatgtggtgggagcctcatcagtccttgctgggtggccagcgccacacactgcttcgtgaatcagccaaagaaggaagagtacgttgtctacctgggtcagtcgaagcggaactcctataaccccggagagatgaagtttgaggtggagcagctcatcttgcacgaagacttcagcgacgaaactctggccttccataatgacatagccttgctgaagatacgtaccagcacgggccaatgcgcacagccatccaggaccatacagaccatctgcctgcccccgaggtttggtgatgctccgtttggttcagactgtgagatcactggcttcggacaagagagtgccactgactatttctatccgaagracctgaaaatgtcagttgtaaagattatttctcacgaacagtgcaagcagccycactactatggctctgaaattaattataaaatgctgtgtgctgctgacccagagtggaaaacagattcctgctcgggagattcaggaggacctcttatctgtaacatcgatggycgcccaactctgagcgggattgtgagctggggcagtggatgtgcagagaaaaacaagcctggtgtctacacgagggtctcatacttcctgaactggattcagtcccacattggagaagagaatggcctagccttctgatggtccccaggcarctgggggaagaaacggatgggtcgccactcccacgctgaccgwcctctgcagcagggtcatctccatcatgtggagggaagagctgaagaaaacaggctctgcactgattctttgcttgtgctgtccaccagggtgaaccccaatagtattaccctcagacacaggtctgggtgctggccatccasacsaksctgaccaggatggaaatcaatcctgactcaagatgaatagatggggagttgtctttttatggactaaagccatctgcagtttaaaaacccaagtgtaggaggagagttggttcccctaatgggtcattcatgaggtctgctgttgggaaataaatgatttcccaattaggaagtgtaacagctgaggtattctgagggtgcttgtccaatatgagcacagtagtgtgaagagtagagacaytaatggcttgagggaacagttcttgcatcccatgagtggatcaggaaatattgtgtgcgtgtgcatgtgcatgtgtgtatgtgtgcgtgtgtgtgygtgtgtgtgtgtgtgcgtgtgtgtgtttgctcactgtgcacaggttgtgagtataaatctgagcaaagctggtgtattcctgtatctaactgcaagtctaggtatttccctccctccagactgtgatgcggsscatttggtcttccgtratrctccacttgaatgtattattcccggcatgacccgtgaccagcagctaatgtctgcttcactttttatataratgtccccttcctggccagttaccatttttttttttttttttactaattagcctagttcatccaatcctcactgggtggggtaagggccactcatatacttaatatttaataattatgttctgccttttttatttawatctatttttataattctatgtaaaggtgatcaataaaatgtgattttttctgaaraaaaaaaaaaaaaa

SEQ ID NO: 2238 - DNA, 825 bp, Rattus norvegicus
ggatccgtatgaccatggaaacagttgaatcacagcaggatcgaagtgtaacacattctgtggcagagcatagctccttgcatatgcagactggccaaatttctgtccctactctagctcaggatgaggagactgaccttgccccaagtcacatggctgctgccacaggtgacatgccaacttaccagatccgagctcctactactgctttgccacaaggtgtggtgatggctgcctcaccagggagtctgyacagtccccagcaactagcagaagaagcaactcgaaagcgggagctgaggctgatgaaaaacagggaagctgcccgggagtgtcgcaggaagaagaaagaatatgtcaaatgtcttgaaaatcgtgtggctgtgcttgaaartcaaaacaagaccctcattgaggaactcaaggccctcaaagacctttattgccataaagcagagtaactgtgtttgacttggacctggttgactgtgaactctaatcggggcaggcgatgcagcatcctcgtaatggccatatggacttgtagatgggtctcttaacccttgcttaagaatacagtctgctgtagrgtgtgaattgggaaywctgttccacgggtcggaatgcagctctcctcccattaccaagcttgctctattgccaatagcatgcaacatacgttttgtttgcccttctgcttctacttttttcagggaagctgctaaagaatgtcgacgtcgaaagaaagagtatgtgaagtgtctggagagccgagtcgcagtgctggaagttcagaacaagaagcttatagaggagcttgaaacc

SEQ ID NO: 2239 - DNA, 1497 bp, Rattus norvegicus
  misc_feature (1190)..(1190): n is a, c, g, or t
  misc_feature (1487)..(1487): n is a, c, g, or t
gtggcggtctgwrcgagcgcgcccttgcttcaaagcggtmrcgmbkctagcgcctccggctaggctccaacccttctctaccctacgtctcaatagccrcaccgcagtctycggcctcaagcgacccaggctatcttccagtcccgggactccgggtactgcggtycccagaaccgcccgtccagggaccaacccaagytccgcaggccgcggcggccgccaatgggggtggarggctgcaycaaatgcatcaaatacctgctcttcgtcttcaatttcgtcttctkgstggctggrggtgtgatcctaggtgtrgctctgtggttgcgccatgatccacaraccaccaccttgctctacctggaactgggagacaaaccagcacctagcaccttctatgtgggcatctacattctcattgctgtgggagctgtgatgatgtttgtaggcttcctggggtgctatggggccatccaggagtcccagtgcctgctggggacgttcttcacttgccttgtgatcctgtttgcctgtraggtagctgcgggcatctggggctttgtaaacaaagaccagatcgccaaggatgtgaagcagttctacgaccaggcccttcagcaggctgtgatggatgatgatgcyaacaatgccaaggcagtggtgaagaccttccaygagaykstcaactgdtgwggctccaatamgskgacsasactgaccaccrcsgtgytgaggaacagsytgtgtccctcaagcagcaactcattcactcagcttctgaaggaagactgscatcagaaaatcgatgagctcttttctgggaagctgtacctyatyggrattgcagccattgyrskagstgtcattatgatcttcragatgattctragcatggwgctgwgctgwggcathcggaacagctycgtgwactraggmcmttcgctthgcaccagakrgtccctgkaatgaccagmggscaccttgggggscatggcctgwgkatatactawttctgdattactctgcyamamwwarmmwwwwwamwwdwrarwmwwwwhwgbtctgaacttttyctgtcacmttttggrgcsgacaccacacataggtggmgtatgwggsgacgtagaggtggagstgsscmtarctkscarsgscmtrkacttytkggacccsykgrgagkthtgsctgntgagccaaacctyctycatagmtayttgtccagaggccacatagccaagmtagaaggccatgtccacccactbtgcccactgtgkktcacatcgctccyatctttttaatcmktgtccctttcctgcctccatttcaaragctgggtttgwaagcacthttawgccttcaatgcacttattctttytaamgtgtmaccttcaactgtaattaaatcttgaaacagtcatttaawaaarrarraaaaaawmarrmawrhwwwwrrrraaaaaaaaaaaaaaaaaaaaaaaaaaaaaanaaaaaaaaaa

SEQ ID NO: 2240 - DNA, 2080 bp, Rattus norvegicus
gtgagaggtagggagggaacccatggaatacaagcctgccggcttctgatggatctgggattctgctttgcagcgtgaagagtaaggatgtccatgaacaagggcccgaccctgctggatggagacctccctgaacaggagaatgtgctccagagagtcctgcagctgcctgtggtgagcgggacctgtgagtgcttccagaagacctataacagcaccaaagaagcccaccccctggtggcctctgtgtgcaatgcctatgagaagggtgtacagggtgccagcaacctggctgcctggagcatggagccggtggtccgccggctctccacccagttcacagctgctaatgagttggcctgcagaggcctggaccacctggaggaaaagatcccggctcttcaataccctccggaaaagatcgcctctgaactgaagggcaccatctctacccgcctccgaagcgccaggaacagcatcagcgtgcccattgcaagcacttctgacaaggttctgggggccactctggccggctgtgagcttgccttggggatggccaaggagacagcggaatatgctgccaacacccgagttggccgactggcctctggaggggctgatctggctttgggaagcatcgagaaggtggtagaatatctcctgccaccagacaaggtggagtcagccccttcttcaggacggcaaaagacgcagaaggctcccaaggccaaaccaagccttttgaggagggtcagcaccctggccaacactctttctcgacacaccatgcagaccacagcacgggccctgaagcggggtcactctctggccatgtggatcccgggtgtggcacccctgagcagcctggcccagtggggtgcatcggcagccatgcaggtggtgtcccggcggcagagtgaggtacgggtgccctggttgcacaacctggcagcctccaaggatgagaaccatgaagaccagacagacacagagggagaggagacagatgaggaggaagaagaagaagagtcagaggccgaggagaacgtgctcagagaggtaacagccctgcccacccctctcggcttcctgggtggtgtggtacacaccgtgcagaagactctgcagaacaccatctcggcggtgacatgggcacctgcggctgtgctgggcacggtgggaaggatcctacacctcacaccagcccaggctgtctcctccaccaaagggagggccatgtccctatccgatgccctgaagggtgttacggataacgtggtagacactgtggtacactatgtcccgcttcccaggctgtccctgatggagcccgagagcgaattccaagacatcgataatcctccagcagaggtggagcgcaaagggtcggggtcgcggcccgccagcccagagtccacggcgcgcccgggccagccccgcgcagcttgcgcagtgcggggtctcagcgcgccctcttgccccgatctggatgacaaaaccgagacatcagcgcgtcctggcctcctggctatgcccagagagaagcctgcgcgcagggtcagcgacagcttcttccggcccagcgtcatggagcccatcctgggccgcacgcagtacagccagctgcgcaagaagagctgagtagcctgcgcccctaaccgccctggcgccaccctcaccggaagtcgcttctctccccaaggaaacagaaaccacacttccaagtgggccactccttcaggttggcctcttgggagcccgagtcacaaccccacgatgttctcgagacccacatcatttctaaggcatccttggggcttgaccatcacagtcaggttttaaggggcaccgagcggctgtcgactctttcctctctcgtgggctgaatctctcatggcttttttttttttttttttttaactataaaagcaattgcttaattggatttctcacttctttaacaaaacttggcctgactagttctaaaaatgtagatcccttctctgtcgacacgtatttattgccaaaaagtagtgcgtcagttgactgttttctctttcttttctcttgtttttctcct

SEQ ID NO: 2241 - DNA, 1556 bp, Rattus norvegicus
gcggccgccgcmtccgccccgcgcgtcccgggcctgtccgtcagtccgtcggtccgcgtggagccgctcgggcgccgccgtgttccggatccccgcaactgcagtgccgctatcctggccgggacgcctgggcaagttctccagagttaaaagcgaagttcgggcgcggcgcargccgagctgcctctgtgcgcccccggcgtccccagtgcgtccagccccgccgggggygccggtgacccttsmgtgccaghcatgtcgtccatcctgcccttcacccccccgatcgtgaagcgcctgctgggctggaagaagggsgagcagaacgggcaggaggagaagtggtgcgagaaggcggtcaagagcttggtgaagaagctcaagaagacggggcagttggacgagctggagaaggccatcaccacgcagaacgtgaacaccaagtgcattaccatccccaggtcactggatggccggctgcaggtatcccatcggaaggggctcccccatgtcatctactgccgcttgtggcggtggcccgacctgcacagccaccmysagyyacgggccmtsgwgctctgtgagttcgccttcaacatgaagaaggatgaagtgtgtgtaaatccttaccactatcagagagtagagacaccagtgctacctccagtgttggtgccacgccacaccgagatcccggccgagttcccccctctggatgactacagccattccatccccgagaacactaacttccccgctggcattgaaccccagagcaatattccagaaaccccacctcctggctacctgagtgaagatggagaaactagcgaccaccagatgaaccacagcatggacgcaggctctccaaacctctccccgaatccgatgtccccagcacacaataacttggacctacagccagtcacctactgtgagccggccttttggtgctccatctcctactacgagctgaaccagcgagttggggagacattccacgcttcacagccgtccatgacagtagatggcttcactgatccctccaattcagagcgcttctgtctgggcctgctgtccaatgttaaccggaatgcagccgtggagcttacaaggcggcacattgggaggggtgtgcggctctactacattggaggggaggtctttgcagagtgcctcagtgacagtgctattttcgtccagtctcccaactgcaaccagcgctatggctggcaccctgccactgtctgcaagatacccccaggctgcaacctgaagatcttcaacaaccaggaatttgctgccctcctagctcagtctgtcaaccagggctttgaggctgtctaccagttgactcgcatgtgcaccatccgcatgagcttcgtcaaaggctggggagccgagtacaggagacagacagtgaccagcaccccctgctggatcgagctacacctgaatgggcccttgcagtggcttgacaaggtcctcacccagatgggttcccccagcatccgctgttccagcgtgtcttagagacactgggagtaaagggatcg

SEQ ID NO: 2242 - DNA, 2278 bp, Rattus norvegicus
gtgttgtttggggagaaatgaaactgcagattgagttagtaccacacggccattggaagagatgaactatagtggtggaggtgtcgggacatggacatcaaggacagagttaaawkktkwywwwwkytkktcacggtggtgtgagcctttaatcccaagacacagcaggcataggcaggcgggtctttgagtttaaggttagcctggctggttccagggcaagccaaggagacttctgaaaagragcagtgggcaggcggacatgagggttgagattgggattagaagccagtargtgtctagtccaccgggccacagaccaggaaactgatgggtggaaaccargaggtgggggtggggtggagatcaggacagataccartgacctgtgccaagtcaatcaagcccccccagcagatgtgagggcagagtgaagcccggcgtaagagatgaaggcagtgacaggtgaagtgggatctgaaagsswsswgccraggtcatgtggaggtgccctgggcacagaaagttgggacactacctcactgtgccctctttttatctacgcagccctcttggccactgatatgagcccctacgggcttaacctgagcctagtggatgaggcaacaacgtgtgtaacacccagggtccccaatacatctgtggtgctgccaacaggcggtaacggcacatcaccagcgctgcctatcttctccatgacgctgggtgctgtgtccaacgtgctggcgctggcgctgctggcccaggttgcaggcagactgcggcgccgccgctcgactgccaccttcctgttgttcgtcgccagcctgcttgccatcgacctagcaggccatgtgatcccgggcgccttggtgcttcgcctgtatactgcaggacgtgcgcccgctggcggggcctgtcatttcctgggcggctgyatggtcttctttggcctgtgcccacttttgcttggctgtggcatggccgtggagcgctgcgtgggtgtcacgcagccgctgatccacgcggcgcgcgtgtccgtagcccgcgcacgcctggcactagccctgctggccgccatggctttggcagtggcgctgctgccactagtgcacgtgggtcactacgagctacagtaccctggcacttggtgtttcattagccttgggcctcctggaggttggcgccaggcgttgcttgcgggcctcttcgccggccttggcctggctgcgctccttgccgcactagtgtgtaatacgctcagcggcctggcgctccttcgtgcccgctggaggcggcgtcgctctcgacgtttccgagagaacgcaggtcccgatgatcgccggcgctgggggtcccgtggactccgcttggcctccgcctcgtctgcgtcatccatcacttcaaccacagctgccctccgcagctctcggggaggcggctccgcgcgcagggttcacgcacacgacgtggaaatggtgggccagctcgtgggcatcatggtggtktcgtgcatctgctggagccccctgctggtattggtggtgttggccatcgggggctggaactctaactccctgcagcggccgctctttctggctgtamgcctcgcgtcgtggaaccagatcctggacccatgggtgtacatcctgctgcgccaggctatgctgcgccaacttcttcgcctcctacccctgagggttagtgccaagggtggtccaacggagctgagcctaaccaagagtgcctgggaggccagttcactgmgtagctcccggcacagtggcttcagccacttgtgaatgtgcccamagctaggccaaaccattctgggctcragggttcaagggcatagagtctcaaactcagtgtgcctagggtgctgcatcctgtgggtccgcaacactgtcacagcactggggggaaagaggcaccaccggggacgagtacagttcgaacgttggtcacgagatggcacagatacaggggatgctccaaacaccagaggtggkattccccaggccggaagcttgaagagcatgcgcacaatgctgcaaccttagttctaagattggggatctccgcaagtagagcaaagttctggattcacgtcccacctctgtcgccacagtagactcttgcaactgttctgttcattttggtctctgamtsycccwasrrkctyaacaccttgtasscmcwcwrctttaamacccagggtccccaatacatctgtggtgctgccaacaggcggtaacggcacatcaccagcgctgcc

SEQ ID NO: 2243 - DNA, 2936 bp, Rattus norvegicus
aaaggaattccgcgcttggagcccactgagctcggacaggccaggggtacgctttgcccccaggcgccccacaagacagagcgggagccatggagcctccggccgccccctcggaaaggagcctgtctctctctcttccggggccccgggagggccaggccaccctgaagccgcccccccagcacctgtggcggcagccgaggaccccgatccgcatccagcaacgcggctacccggacagtgccgagcgctcagagacagagcgctcaccgcaccggcccatagagcgcgccgacgccgtggacactggcgaccggccaggcctgcggactacccgcatgtcctggccctcgtccttccacggcaccggtaccggcggaggcagcagtaggcgcttggaggcagaaaatgggccaacgccatcccctggccgcagccccctggactcgcaggcgagcccggggcttgtgctgcatgctggggccaccaccagccagcgccgcgagtccttcctctaccgctcagacagcgactatgacatgtcaccgaaggctgtgtccaggagctcgtctgtcgccagcgaagcgcacgctgaggacctcattgtgacaccatttgcccaggtgctggccagtctccgcagcgttcgaagcaacttctcactcttaaccaatgtgcccatccccagcaacaagaggtctccactgggtggcccaccctctgtctgcaaggccacactgtcagaggagacgtgccagcagctggcccgggagaccctggaagagctggattggtgcctggagcagctggagaccatgcagacctaccgctctrtymgcgagatggmctyrcacargtycaaaaggatgctgaaccgtgagctcacacacctgtcggaaatgagcaggtcaggaaaccaggtctcagagtacatttccaacacattcctggacaagcagaatgaagtggagatcccctcacccacacctcggcagagagccttccagcagcccccgccgtcagtgctgcgacagtcccagcccatgtctcagatcacagggctgaaaaagctggtacacactggaagcttgaacaccaacgtcccacggtttggagtcaagacagatcaagaggacctcttagcacaagaactggagaacttgagcaaatggggcctgaacatcttttgtgtgtcggagtacgctggaggccgctcactcagctgtatcatgtatacgatattccaggagcgggacctactgaagaaattccacatccctgtggacaccatgatgatgtacatgctgaccctggaggaccactaccatgccgacgtggcctaccacaacagcctgcacgcagcggatgtgctgcagtccacacacgtgctgctggccacgcccgcactggacgctgtgttcacagacctggagattcttgctgccctcttcgctgctgccatccacgatgtggaccaccctggcgtctccaaccagttcctaatcaacaccaattcggagctggcrttgatgtacaacgatgagtctgtgcttgagaaccaccacctggctgtgggattcaagctgctgcaagaagagaactgcgacatcttccagaacctcagcaagcgccagcggcagagcctgcgcaagatggtcatcgacatggtgctggccacagacatgtccaaacacatgaccctcctggctgacctgaagactatggtggagacgaagaaagtgaccagctccggagttctcttgctggacaactactctgaccgtatccaggtcctcaggaacatggtgcactgtgcagacctcagcaatcccaccaagcccctggagctgtaccgacagtggaccgaccgcatcatggctgagttcttccagcagggcgaccgagaacgggagcgtggaatggagatcagccccatgtgcgacaagcacacagcctctgtggagaagtctcaggtgggcttcatcgactacattgttcatccattgtgggagacatgggcagatctcgtccacccggatgcccaagacatcctggacacgctggaagacaaccgggactggtaccacagtgccattcggcagagtccttccccacccctggaagaggagccaggggggcttggccatccgtccctgcctgacaagttccaatttgagctcaccttggaggaagaggaggaagaggattccttggaggttccaggattgcctaccactgaggaaaccttcctggctgcagaggatgccagagctcaagctgtggactggtcaaaggtcaaaggcccgagcactacagtggtggaagtggcagagcgcttgaagcaggagaccgcctcagcatatggtgctcctcaggagtccatggaggctgtaggctgttccttcagccctgggacccctattctgcctgacgtgaggaccctatcctcctcagaggaggccccrggcctcctgggcctcccctccacggcggcagaggtggaggccccaagagaccatctggctgccacgagggcttgttctgcctgctctgggacctcaggagacaattctgccatcatctctrctccaggcaggtgggggtcaggcggagaccctgcctgatcctttttcccttcacccttgggtcctccctcctccccacacttcccactcaccacagaccgcctcagcgactcctggccctcctgagaaaaaagaaaacagaaaagtggggtttttttctcttttcttttttttaaccctttcccctctgcccttgtccacagggcctttttgttgaggtggggtatggggagccaggaactgaagtccccaaaaaaagggattttattttttgaattttaattgtaaagtttttagaaaaagaacaaaaaaaaaaaaaaaargaatkmaacacatcagctgtagatgctc

SEQ ID NO: 2244 - DNA, 3378 bp, Rattus norvegicus
  misc_feature (2712)..(2712): n is a, c, g, or t
caccgcccagcagaagacgcgtctcagccggtgtgtcgcggttccccgcggtgtgtgagtgagccagggcccggtcccctctccggccgccgtcatgggctgcacgttgagcgccgaggacaaggcggcggtggagcggagtaagatgatcgaccgcaacttgcgggaggacggagagaaagcggccaaagaagtgaagctgctgctgctcggcgctggagaatctggtaaaagtactattgtgaaacagatgaaaatcattcatgaggatggctattccgaggacgagtgtaagcagtataaagttgtcgtctacagcaataccattcagtccatcattgcaatcataagagccatgggacggttgaagattgattttggggaagctgccagagcggatgatgcccgacagttatttgttttagctggcagtgctgaggaaggagtcatgacttcagaactagcaggcgtgattaaacgtttatggcgagatggcggggtgcaggcatgcttcagcaggtccagggaatatcagctcaatgattctgcttcatattacctaaatgatttggatagaatatcccagaccaactacattccaactcagcaagatgttcttcggacgagagtgaagactacaggcattgtggagacccacttcaccttcaaggagctctacttcaaaatgtttgatgtaggtggccaaagatccgaacggaaaaagtggatccactgttttgagggagtgacagcaattatcttttgtgtggctctcagtgattacgaccttgttctggctgaggacgaggaaatgaaccgaatgcatgaaagcatgaaattgtttgacagcatttgtaacaacaaatggtttacagacacttcaatcattctcttccttaataagaaagacctttttgaggaaaaaataaagaggagtccattaacaatctgttatccagaatacacaggttccaatacgtacgaagaggcagctgcttacatccagtgccagtttgaagatctgaaccgaagaaaggacaccaaggaggtctacactcactttacctgtgccactgacaccaaaaacgtgcagtttgtttttgatgctgttacagatgtcatcattaaaaacaacttaaaggaatgtgggctttactgagaggatggcatagtaaaagctactacagggaggaatgttgagaccagacatcatctactgtctcttgggtcagcgacaagcatgacaggaccaaggaatggcaacagcatgcagaatctttagcacaatcttctgtattaggaaatgtttaattggcatgagaagagatgatcgagtcagacatgaaattggacaactgtaaagtatgaccggatcatcagggcaccgcttggactttaaatctcaatgtttagggcatattgaagtcgaggtgctgcattccagaacttaaacttgtagcttactgttccccgtctttttaacaaatgaccagtagttaatttctaaggtttttctcatcaagagaacaatacctaaaaactcttacttgtttgcaaaagaatcttctggggactcagtcttaactatgcacacaatgtagccggacatcttgaaatattcctcttagtaggaactgtttgtttttaactcttggaatggtcaggagtaatattccacagctaaaaatcttcctggttattgggactatactaatagagctttttggaatgaagtttatgttactgtcctgtttaaagtatcacaatggcttctaaacagcattcacttcggagagctgtacagtaagattctagctctcgtttcttaagcttacggttggagttaaccttgtttgtgctgattaccaaattactagatgaatactgatgtaatatgataaactgctcttgggtacagwyacacgywkkatagctgtcagtcagagacgcasactgctaaggtgagaagcagtgacttgctgctacagatctaccgaggtggccacactgatttgcctgctcgyctcargcgtgtgggttgwatgcggtggccccttgttttccatctttgtggccttttttgctaggagacgtctaagagtataacaactgtgcatgcctttcctttgtaaatgtgctgscaaatccctgcttgctgtcattgtcactgtatcgatggtaactgcatagcggcccttgctgtgttctttttctaagacttgcattctgggactctgttccaccttgtcacgtgtacagactttaatctgttacagctggcagcagtattaacgcggkgagtaaagagcccaggattgctcctgtttgkaamcgatccyttctggaarccctgccytytgkttcwtttwgmccctgctgagwgkwmtttavcctttgagagwgggtttaggtagaaaagkgtyttwraaagycyasttycytgmwgtwayaswgrywtmawakcyarggcygrgggcttwakgtcmagkctgtscaagkmatacaagtgtccgatktgtacaghttgcytgcgytgagagcttcagtcctcttgtacaramtgydtcaaakgwmattaaacactgmgkggrccastgarrramrrmgaaamararratgcattttgagcatttcagatcagtagtttgatcagwgscttttgaggtccagtctttgtggawtggatccgktcatckwkkgatgktacctycnaskcatttgmamraaggktkgtggkyaraacygstttkggaarswarccacsgkgrkcardgscttcattggsagctttwaccayttttaadtykwamgwgkstttgsrraawcattattatkcmgvcmgkawdactkktatyttwcmmatatttccatwgggcyaaraargkdtymyttgaargaaaaswrttgdwtthwatcagvgrtkgvstmaatycccrcagkgkrggggttaataagksttacyswcaawwwatwgktcckttgkkgtattctgkaawawaaraacatctgggaatkcgaacyagtggaataygttttcawaattkttcwatactttgggtttaataaaatggtgttgataatctaaawwaawarawmawmmaaatttaattttacttcagaatgcattttgtattttcatttgaatgtctattttttaaasctttctgttaattaaaaatagaagtccttcmswwmwwmrcmkmwmavhaaaaaaaaamwmramrrggggggccggtacccaattcgacctatagtgagtcgtattacaattcactgggcgtcgctttaaacgtcgtgactgggaaaacctggcgttaccaacttaatcgcctgtgagcaatccctttcgcagttgggtataagaagaggcgacgatgc

SEQ ID NO: 2245 - DNA, 3368 bp, Rattus norvegicus
gatcccccatcctagccaaagcaagagctttctggccatgcgggagatgctgtctcaaggcaatagactggaaaaaatggcagagagagacacctgacgcacacaaatgagtccctcaactctagtttcttaggaacaaatctggaagaagtggatgaaatccctttaccatggagaaggtgacaaacattatttttggagagttgagggtggcggtagatctgtggtcctcaaccttactaatgctgcgcccgaccctttaatacagctcctcgtgttgtggtgaccccaaccccaacattattttggttgctgctcggtaattataatgttgctattatttctaattgtgatgtaaatatctgatacacaggatatctgatatgtgcccacaggggattgcgagcctcgggttaagaaccactgtgctaggcaaactttaccctcaaatccatccacccatccttccttctatccttccttccttccttccttccttccttccttccttccttccttcctaacttgatctcaatgctggaccccaggcctgctaagcgtgcactctaccaccgagataaccacccccctcccaggctccattcttcctttttaatgcgtctttattacttcagaatgtgaagggacttttctaggaaattttccccaggagaaatgtgtaaggatggggcagtgcaggaggaagccctcccaagctatgtgatgccatgttggacgaactagagtgactcctgaaacaagctggtgtctccaggaaatgaaaagaaaaagaacgagaacagtagacaggaatggagggtgagcgaacacctgtggtggcacacacctgtaatccctgctctgcgggggctgaagcagaaggatctggaggtccggaccattctgatcaacatatagaaagaccatctcaaacaataagatactttagggagagcatcccagcagaagagggtctgtcttggatgcttcgggttgttcgtttatgtttttgtttgtttcaggagggtcacctttcttgttgggtaaagggtagggtgggagtttttctcttctttgcagggttgcctcaggttctgccaggaaggagctgctgagctccaggaaaccggtgctaagggagtgtcaaggcaggacgtccctctccaccctccaattcccaccagaggcctctcttgtgacyawtggacgctgctcctttaaaagcagccatcctcctggcttctagggtgtgggggtgggggctgaagatggagggaagctgacagaawtcctcaacaattagggaagatggaccaggctggaaaagtcgctcccaagccctaatgtccccttccctaagccagcgggtctggggggaaaacttcccatcccagacgcgacacgagatggctccgtggcctcacaaaaacggctctctggctttctggtcagacgcccccaccttggaccccagtgcagccaacaccagtgggttgccaggggtgccatgggcagcggcattggctggagcattgctggcgctggccacggtgggaggcaacctgctggtaatcacagctatcgcccgcacgccgagactacagaccataaccaacgtgttcgtgacttcgctggccacagctgacttggtagtgggactcctcgtaatgccaccaggggccacattggcgctgactggccactggcccttgggcgcaactggctgcgagctgtggacgtcagtggacgtgctctgtgtaactgccagcatcgagaccctgtgcgccctggctgtagaccgctacctagccgtcaccaaccctctgcgttacggcacgctggttaccaagcgccgcgcccgggcggcagtagtcctggtgtggatcgtgtccgccaccgtgtcctttgcgcccatcatgagccagtggtggcgtgtaggggcagacgctgaggcgcaagagtgtcactccaatccgcgctgctgttcctttgcctccaatatgccctacgcgctgctctcctcctccgtctccttctaccttcccctccttgtratgctcttcgtctatgctcgagtgttcgtcgtagctaagcgccagcggcgtttsstgcgccgggagctgggccgttttccgcccgaggagtctccgcggtctccgtcgcgctctccatcccctgccacagtcgggacacccacggcatcggatggagtgccctcctgcgggcggcggcctgcgcgcctcctaccgctcggggaacaccgcgccctgcgcaccttgggtctcattatgggcatcttctctctgtgctggctgcccttctttctggccaacgtgctgcgcgcactcgtggggccctccctagttcccagcggagttttcatcgccctgaactggttgggctatgccaactctgccttcaacccgctcatctactgccgcagcccggactttcgcgacgccttccgtcgtcttctgtgcagctacggtggccgtggaccggaagagccacgcgtggtcaccttcccagctagccctgttgcgtccaggcagaactcaccgctcaacaggtttgatggctatgaaggtgagcgtccatttcccacatgaaggaccatggagatctagcaaggagcctgacttctggagaaatttttttttaagacagaaagacaagcaacgtccatggatgcaaacyttttatacagcccttgatttctgctcagagtgagttcccaggaaccgcaactctccagaaccaatgactagaccacagaatgtaaaggggaaatcttaccaaatrggttttaccatcttctctctctttctgagagacgttgtctaggatccaccttgaacttcgctactacctcagccgccgggatatcaggccacccgtgcttgactgccctgggaggagctgcgttcccaccaccaccctgcttattatgtttgtgctggatgcttagggctaagaaagcacccttacctacctcycttcctactgctttcctgaccccatgaatgacttttgtctccacaaatcactctgtctccaggttctgtgttcccagtctctgtgtctctggttagttggaaagcaggaaacccggcgggggaggcgggggagggggggaacgaccaagtttgaggttttgtccctggctcctcactacagctctctaaacatcatcttggaccatctctcacaataggcacaaaacagctctaatctacctcactcttaggacttcaaggtttgggagaaattccagggttcctgggaagaagtcaaaccattggaatgggtcccttttccacttaaaatcaaattaataaatattattgaatgtgaaaaaaaaaaaaacc

SEQ ID NO: 2246 - DNA, 1414 bp, Rattus norvegicus
  misc_feature (87)..(87): n is a, c, g, or t
cacgaggcaatcacctaaacaaccgagcaagacaagccactccgacaaggttggctgcccgcgggtctcggtgagggcgcgaggtanatggtgaagagccgcggcagccgagggcaggccaggcccccagaagcaacagcttgaaggacgtcgcagtgggagccctgaactgctcctggcctcasgccccctggatccgtcggggcgcctccacccggctgttagcatgatgtcttacctcaaacaacccccatacggcatgaacgggctgggcctagctggccctgccatggacctcctgcacccttccgtgggctaccctgccaccccgcggaagcagcgacgggagcgcaccaccttcacgcgctcacagctggacgtgctcgaggcgctgttcgcaaagactcgctacccagacatcttcatgcgcgaggaggtggctctcaagatcaacctgcccgagtccagagtccaggtttggttcaagaaccgccgagccaagtgccgccagcagcagcagagcgggaatggaacgaaaagccggccggtcaagaagaagtcgtctccggtgcgcgagagctcgggttccgagagcagcggccagttcacgccgcccgccgtatctagctctgcgtcttcgtctagctcagcgtccagtgcctccgctaacccggcggctgctgcggccgcgggcctgggtgggaacccggtggcagccgcgtcctctctgagcacgcctactgcttcgtccatctggagcccggcctccatctctcccggctcagcgccggcatccgtatcagtgccagagccattaggcgctccgagcaacgcctcatgcatgcagcgctcggtagccgcaggtgcggccactgccgcgrcctcctaccctatgtcctatggccagggcrgaagctatggccagggctaccccgcgccttcctcttcttactttggcggtgtagactgcagctcctaccttgcgcccatgcactctcatcaccacccgcaccagcttagccccatggcaccctcctccatggctggccaccaccaccaccacccgcacgcgcaccacccactgagccaatcttcaggccaccaccaccaccaccatcaccaccaccaccaccaaggttatggaggctctgggctcgccttcaactctgccgactgcttggattacaaggagcccgccgccgccgctgcttcctctgcctggaaactcaacttcaactctcccgactgtctggactataaggaccaagcctcatggcggttccaggtcttgtgagcccaggagggaaaggaagtggagaagaaacgcaactaccttcgccctccgtggtccctatcatgttgctgctgctgctgctgctgctgctgctgctgctgctgctgctgctgctgctgc

SEQ ID NO: 2247 - DNA, 6471 bp, Rattus norvegicus
gacgacttggccgccaggcaccgatcctccccggtgagaaggtccacgaatcttactgcagacagatttgctcagcgcgatgggctgcaaaaacctgytgagcctgggtcagcagatgctgcgccggaaagtggtggactgcagccgggaggagagccggctgtcccgctgcctcaacacctatgatctggtagctcttggggtgggcagcaccttgggcgctggtgtctacgtcctagccggtgcagtggcccgtgagaatgctggtcctgccatcgtcatctccttcctgatcgctgctcttgcctcagtgctggccggcctgtgctatggcgagtttggtgcccgtgtccccaagacgggctcagcctacctctacagctatgtgacagtgggggagctctgggccytcatcactggctggaacctgattctctcctacatcatcggtacatccagcgtggcaagagcctggagtgcaacttttgacgagctgataggcaaacccatcggagagttctcgcgtcaacacatggccctgaacgcccctggggtgctggcccaaaccccggatatatttgctgtgattataattatcatcctgacaggactgttaactctcggtgtgaaagaatcagccatggtcaacaaaatcttcacctgtatcaatgtcctggtcttgtgcttcatcatggtgtcgggattcgtgaaaggctccattgagaactggcagctcacggagaataaatccagtcctctctgtgggaacaatgacacaaacgtgaaatacggtgagggagggttcatgccctttggattctctggtgtcctgtcaggggcagcgacctgcttttatgccttcgtgggctttgactgcatcgccaccacaggggaagaagtcaagaacccccagaaggccattcctgtgggcatygtggcgtccctcctcatttgcttcatagcttactttggggtgtccgctgctctcaccctcatgatgccctacttctgcctggacactgacagcccactgcctggcgccttcaagtacaggggctgggaagaagctaagtatgcagtggccgtgggctccctctgcgcactctccaccagtcycctaggttccatgttccccatgccccgagttatctatgccatggctgaagatggactactgtttaaatttttggccaaaatcaacgataggaccaaaacaccaataatcgctactgtgacctcaggcgccatcgctgctgtgatggccttcctctttgaactgaaggayctggtggacctcatgtccattggyactctcctggcttactctttggtggctgcctgtgttttggtcttacggtaccagccagaacaacctaatctggtataccagatggccagaaccaccgatgagctagaccaggtagaccagaaygagatggtcagtgccagtgagtcccagacaggctttttaccagcagccgagaagttttctytgaaaaccatactctcacccaagaacatggagccgtccaaattctcagggctaattgtgaacatttcagccggcctcctagccgttcttatcatcacygtgtgcatygtggccgtgcttggaagagaggccctggctgaagggacgctgtgggcagtctttgtaatgacaggatcagtcctcctctgcatgctggtgacaggcatcatctggaggcagcctgagagcaagaccaagctctcrtttaaggtaccctttgtccccgtacttcctgtcttaagcatctttgtgaacatctatctcatgatgcaactggaccagggcacgtgggtccggttcgcagtgtggatgctgatagsctttgccatctactttggctatggggtctggcacagtgaggaagcatccctggctgctggccaggcaaagactcctgatagcaacttggaccagtgcaaatgacccacagccccacccaccaaggtgacagcggttgacgggtgcgcagaggcctgggaccctcacactctctcccctcatgcctcgggaccagctcacacccccaatgtcaccaaagctggtttgtagcctcagccatagctgacatggcctggtcagacaaccctgcagccagctccagagatcctggtcacttctggacagttccttggtttttctcatctccctctgaacaaagaaagcagcccttctccctgccagctgggcgctttgctgcttcggccccagcagaagggaggcccccttctcctcttattcgggaagcaggcctccctccctccctgggaccaccctgcgtacactcatacgtacactccagagggttagtgggcgtctatctccctgtcaacccagccaggacagccacctgaccccaagatgcgagactagcccagtgaggaagctgtctcccagcagtgcaacccaacagcccatcaactccagaatacctagaggaccaacaggcccgcatcttactgctttcaggctggggtattaggatggggccctgatctgcatagaggcttctggaccaagcccagcacagtrtagccgttyttacgcgcagaaaacgggaggtccctggagtgatcgattgtatcaagactggatgccagctytgctcacgtggacgagggcgacattctytagccttattyttagcaggcctggatcagtttytgctgctcttggcatctgtcctcactgtcctgagtcaytggaacacgaggctatatcagtaggattgtcattctytcaggtcttccaaggtkcttcggacaggtggcactcaattcagggtggtgacactcttytaacgtgacgcgaaggactgytgtgggggtcctccagtcgcttgctgtgaatcactccaytggattaacttggggttcactgttgttaatgttccaaccttgggagatggtcaaataattmccmagtgccawawmarmwwrwrrwwmrwrawrtgcgctctgcacaagaggtggcttggggtcctaccgctatccctcctgtagctgtggtgcctttgcctgccgtgctactggtaagatttctaccctggcctggaccttctgctccccgagtctgccttcatttcccctcccccatgctccttatctctctgggtgaggccctaggcacacctcttcacttactctgtgtagatagaaaggatggtgagtgagtgctggtggattctggaaccagcagggcacccctcctccactcccaacgccatgacatcagggtgggaaggctggtgtcttagactaatattaatgctgtttttaaagcctagctttctttcctgtctggcctttgacccatgtctggtagaaaccggccgggtaaactgatgacactgtcttcccctctgctccggaaggttcttgggaatggccggagttggtggaactggcctggcacggaacctagtggtggagcacttgcctagcatatgcagggccccagtgctacggaaaattagagaaaccgcccggttgctgtgtcagccagtggagggtagcagagcagccaagagccaggcatcgtgccaggccctgacccccatccaggcactttgtctcctaggttgtctgagaaaacttcaaagggagtattataagaccctaaatgttgagtttctaaaggtatttaaagttatgtagattggtgctgtaaaatattttgataaatattaacttatttcattcgggtcttaattacctgttgtcttcttagggcctgttagatatgtctgggttggtttttttcccccccttgttacttacataggcagagaaggagtgcccagtgaggtgttgggagaattaggtttcactctgtagctgccctagtctagcctctgcctcaggctcctgagtgctaaggtcgtaggtgtgagcctcctctcctcctgctaaactgtctcctcgctttctggatgaaactttcctgtctaaggcagctgaacaatgtgtttacagttgacatttcagccagcagcctggatcccaccaaggggaaaggtgtatatatatatatatatatatatgggtttgatccgccgacagcaatggtggcagatctgctctgtgtgtttcactatgtgacacaggagcaaacacaggccttgctgggggtgggggttggaggggtgacatcctatacccacttcctagtcaggaaaagatatgcaggggtgacttgcctagttagttgattggccactgagcttttactaagtgtggacagttaaccagggaagctcttttggggtgcacgggaacaatgaagcttggagggagtccctaatatgctttttattatgcccccagttccttttcctgaaagaaaacacaagccccaaacccagacaacacacatacacacatccctccggacccacagtaggtagggtcgagtctcctagtctcccgtccaaaaaagagtcccattggattcaaagcgtggccagtatttcctacctggttgggacttaaacattttaaagacaacttcccatgccttcccttcaactagagtgctcacattggaaagacccattttctcaggagcctgtgcccttccttcttgtctctgggtcgaagttcatgaagaagccaatacccagggagctgtgcttaggagtggggcccaagatgtctccacctttcagaaggtgccccagtggtggcttggtggcagaagtgactgcaggaccgtggcaggacatcaggctcctccacctgcccctagtggcaagggttggatatccccctccaaaccccctcctgagcacagcagcgtgtgcacaccaaaggaatatatgacacactccaaccctgtccactacctgccactctcatgcacagggctggggataccagtggctatgtttgtacgttggccctaaccccaggcagacattctgaattgggtagtgttcatagtctcctctaacaaggaacttgcccaacgctggaagaagcttagaaacagcagtgtgagggactgggttcctcccataagcgtggacaagtcccacagaccccctcatatctaccggccaagccacgggcaccgctggcctgtgtacctacctacaatgaaaacatggctggctctcgccggggcccatcctttctgacttgaatgtcrtwygkcmcsacagaaacttatttcattctaataaaagcttaagcttactgttttcttggtacccaaacactaargaatcttagtrgggatctcagtgccaggatacttgagtccaggtatgsttgaggtasccaagtgagtggccaacagagaatacatgasccatggaactgcwmcagaagtcaaagtcagcggtgaatgtmkgyyryrtgygkttwttttatggagttcaaaccgtcstgtmtgtttggcctcctcgtgagaagattgtacgtgaggytcctggggggagagtgaacggtccattccttcagctcattttggtgtgtggaatgcttttattgacacagtggtacaggtgaaatgtgcaccagtccaatgtggttaggatgaaaattttaaggcaaaaaraaaaaaaaawmasctsgtkyysacctcccttactctagcccagtctggccgtatccgctgctccattgaactggaagaatatggtgtggccaagggtcttgggacatggtgaccaaggagccttcctggaccatcctgttacatgtgctgaatggctagcaaaaaaagcccaggagagatgaaaagaccacgtccaaaaaatgttctcagggcgctggcgtgtccagcagggtcaggaagcaagatttaggaagagacatcatgcaaactaatttattgacaagtgttacctttgcgttccttgacaagctttgcgttggactatttcccattkgaaagttataatatatcttgtattaaggtattactgcttgttgtgcctgcagcttcgatgggttaaggtcacagagggtcatgatactaatgagggctggtttattagcaaacctgagcagtwaagtgstttctccagsacaatttttttacttctactgaacacggagccattattaaaagagttatgtgtggattttcattatgtaaattgtatatatttttttgcttgttcgaggttctatttttctaatagtcttcttacagtttcttacaatgacattagattaagtccgatactaactgtaaatcaagctggtctctgttggattcccgtggattaattctatttattttaaggccaagtgcaggtgtcgtccatcacccttttaagaaatgtgaaacttgtgtctcccctcktggctgaatacattgtacactggcaaaccccctcccgtccctgtgtgtcagagctattttgtggtacattgtgtcatgcttctgcagatgctaataaatcctgtctggcttccaaaaaaaaaaaaaaaaaa

SEQ ID NO: 2248 - DNA, 3202 bp, Rattus norvegicus
gacgggtcaagagaggacatggccggctgcccaaaaggttcttggaagccaagactccggagtgtagtcctgggagcagctcagcttatctggctcagtgctttgatctctgagcttgtaaatcgaaagaaagtggcgacgtggacctataactacagcacgaaagcatactcatggaataactcacgggcattctgcaagaggcacttcacagacttagtggccatccagaacaagaatgaaatcgctcacctcaatgacgtcatcccatacgtcaactcttactactggattggtatccgaaagatcaacaataagtggacctgggtgggaaccaataagactctcacggcggaggctgagaactgggcagacaacgagcccaataacaagaggaacaaccaggactgtgtggagatctacatcaagagtaattcggcccctggcaagtggaatgatgagccctgctttaaacgaaagcgggccctgtgctacacagcctcctgccaggacatgtcttgcaacagccaaggggagcgcatcgagaccattgggagctacacctgctcctgctacccgggcttctatgggccagagtgtgaatacgtccaagagtgtggaaaattcgacatcccgcaacacgttctcatgaactgcagccaccctctgggggacttctccttcagctcacagtgcaccttcagctgtcctgagggctatgacctgaacggacccagtgagatgcaatgtttggcctctggaatctggacaaataatcccccgcagtgtaaagctgtgcagtgccagagcctggaagcccctctccatggaaccatggactgtacacacccattggctgcctttgcctatgactccagctgtaaatttgagtgccagcctggatatcggatgaggggctctgacatactccactgcactgactctggtcagtggagtgaaccattgccaacctgtgaagccattgcatgcgaaccgctggagagccccctccatgggagcatggactgcttcccatccacaggagcattcgggtacaacagcagctgcacttttcgctgcacagagggattcgtgctgatgggaaatgatgccattcattgtgctgacttggggcagtggacagccccagccccagtctgtgaagcgttgcaatgtcaggagtttccggtcccaagtaaagcccaggtgagctgctcggaccccttcggacccttgaagtaccagtcagcctgcagcttttcctgtgatgaaggctcactcttggtgggagcaagtgtgataagatgcttggctactggacactggagtgaggcccctcctgaatgtcaagctgtctcctgcacccctttgctcagccctgagaatggaaccatgacgtgtatccagcctcttgggcattccaactacaaatccacatgccagttcatgtgtgacgaaggattttatctatctggaccagaaagattggactgttctccatctggacactggacaggcagccctccaatgtgtgaagccatcaagtgcccagaaatctttgccccagaacaaggcagcttggactgctctcatgttcatggagaattcagtgtcggctccacctgtcacttctcctgcaacgaggagtttgagctcctgggatctcgaaatgtggagtgcacagtgtctggaagatggtcagcgcctccaccaacctgcaaaggtgtaacatcacttcctgtcccatcggttcgatgccccgccctcactactcctggacagggcacaatgtcctgtcgacaccacctggaaagctttggtccgaacaccacttgttactttgggtgcaaaacaggatttacactcagaggagccaactctctccgctgcggggcttcaggacaatggacagcagtgacgcccgtgtgcagagccgtcaaatgctcagaattgcacatggacacagcagtcgcgatgaactgttccaacccctggggaaactttagctacggatcaacctgtgccttccactgtccagaggggcagtcactgaatggctctgccaggacaacctgcggagaggacggtcactggtcagatgctatgccaacctgccaagcagggacgctgacgatccaggaagctctgacttacttgggtggcgccttggcttctacttctggcctggcagtgggcgggacgctactggctctgctaagaaagcgtctcagaaagaaagatgatggaaaatgccccctgaaccctcacagccacctaggaacatatggagtcttcacgaacgctgcatatgacccaaccccttaagaggcctggctcccgatgtcaattggatctctcaggattccgcatgcagataacaagtttcctggtcgacttgactgtcactccccagcatttgctgcggttctttgtggtaaataattggacaggaaccaaacgaaaggacgatgtgctccgcccaccccttcctgctccgcccctcaccttcctcggscwsagccacagaaacaggagcaaatgtttctgctktggtctgtggcttgatgttactttgctgttactgaaaacccgagttagtccaaggcactggagcatctgcctcaccaggtgaccaggctgtggaaaaccggaagtctgtctgctttctcttgggattgaagaatggcgatgttggttgggcaggcagacctctcgtttaagggaacgctgcttwaagatctctgggtcttcgtgtttcttatctctgaggttgtttacacctctgctgctgagactttcagatggtactagggggacacagaagatckgtgaacagagcattggacaccacatctgactgcagactttycgtcacaaagcacccawwggccattgtttgactgtagagttyaactcccagctatcaagctcttcacgtttgttcagtgaggtctgtgtatctcactttgtcctaccaccaatgtggtcacagttayactcctccaaatgacagctggaccctcccagtgagcccacaaatatatgttgtatgtcgcctgtccacagagagaaaaatcagaggagcaggraaggtcctcytttcgktattttgkwcygcaggaaagracagttatgttttawacgtaacytaattcacatatttaataaayaagtcactgaaaawwaaaaaaaaaaaaaaaaa

SEQ ID NO: 2249 - DNA, 1284 bp, Rattus norvegicus
aattccgggcagccctgaccctcatcaggacaatgacactcagactgctattcttggctctcagcttcttctcagttcaagtaacagaaaacaagattttggtgaagcagtccccgctgcttgtggtagataacaatgaggtcagcctcagctgcaggtattcctacaaccttcttgcaaaggagttccgggcatccctttacaagggcgtgaacagtgacgtggaagtctgtgtcgggaatgggaattttacctatcagccccagttccgcccaaacgtggggttcaactgtgatgggaatttcgacaatgaaacagtgacgttccgtctctggaatctcgatgttaatcacacagatatttacttctgcaaaatcgaggtcatgtatcctccgccatacctggacaacgagaagagcaacggaactattattcacataaaagagaaacatctttgtcatgctcagacgtctcctaagctgttttggccactggtcgtggttgctggagtcctgctgtgttatggcttgctagtgacagtgactctttgtattatctggacaaatagcagaaggaacaggctccttcaaagtgactacatgaacatgacaccgcggagactcgggcccacgcgaaagcattaccaaccctatgccccagcgagagactttgcagcgtaccgcccctgacagggacctctatccagaagcccgccggctggtacccgtctacctgctcaccatcactgctctggataggaaaggacagcctcatcttcagccggccaccttggacctctactgggccaccaatgcccactattttaagagtgtctagatctaacatcacgatcatctcgagactctgcaatgaatgaaagaagcttctatggcaggataaattctgtgtggcttgacccggacacaagcttaatatatttattgacttgactggggaagttagagtagagaaatcaaaaagtgaaagaattcattcagccttggaaagtcaatttgcaggctcctagatgagccccgcccctttcttatttaccggcatatttcagtcatgtgacctgtgatggccaaagacgttttgggtggagaagaaaggatagaaaaaccttctctttggctaagttggtgtttggggtggaggtaggttggagtatagtacttaactatttgaaaaataattaaaacacttttttttactcatgaaatgagccatttagctcctaaacagtgttttttagtttagaaggatgtggccatatttttaatg

SEQ ID NO: 2250 - DNA, 1500 bp, Rattus norvegicus
gatcacaggcttggacactccattctttccaactccccacctaaaagtggccttaactacttactagactgattggctggagacctagcccccaagggaggatttggccagggtgatgcctggcccacttagaggacacaagtgcttttgccccttagctgcaykgkssaggaratcaagamgrcaaraggcgtctcccgcgctcgccagggccgtgccacctgcccgctagctcgccgcgctacggtttcccactagccaacatgctgccgagattssgcggccccgcgctgccgctgctcctgccgtcgctgctcttgctgctgctsttgggcgcgggcggttgcggtcctggggtgcgcgccgaggtgctgttccgctgcccaccctgcacgcccgagcgtctggccgcctgcggacccccacccgacgcgccctgcgccgagctggtgcgagagcccggctgcggttgctgctccgtgtgcgcacgacaggagggcgaagcttgcggcgtctacatcccgcgctgcgcccagacgttacgctgttaccccaacccgggctccgagctgcccctgaaggcactggtcaccggcgcgggtacctgtgaaaagagacgcgtgggcgccaccccacagcaggttgcagacagtgaggatgaccactcggagggaggcctggtggagaaccatgtggacggaaccatgaacatgttrggaggcagcagtgctggccggaagccccctaagtcaggcatgaaggaactggctgtgttccgggagaaggtcaacgagcagcaccggcagatgggcaaaggtgccaaacacctcagcctggaggagcccaagaagctgcgcccacctcctgccaggaccccttgccagcaggagctggacmaggtcctggagcgcatctccaccatgcsccttcsgratgatcggggtcctctggaacatctytactccctgcatatccccaactgtgacaagcatggcctgtacaacctcaaacagtgcaagatgtctctgaatggacagcktggggagtgctggtgtgtgaaccccaatacygggaagccaatccagggagckcccvccakcyggggagascccgrstgcsrtykctkytmcwrygmgcagcaggagaatgwtggggytcacgcccaaagggtgcagtaaaccacagccagtcggtgcstggcttccccaccccaaacaccagcagaaatggagggtstcagggygryrsgwgkrgaggatttcccagttttgacacatgtatttatattyggaaagagaccaacaytgagytcagaagcccccctgcgccccccagtggcagttaacctgtacctcygttcctgctthtaatagagagggtggtggcactggggatactggstacaggcttgrgaatggggaaagaaatttttmtttttgaacccctgtgtctcttttacttaagattaaaggarggaaamdkwwwwmaaaaaaaaaaaaa

SEQ ID NO: 2251 - DNA, 1048 bp, Rattus norvegicus
atgaaagtgctacttgggttcatttgtctcattgtgcctctgctgtcgctggagaccgacaaatgcacggagtatccaaatgaggtcatttcattttcatccgtaaatgaaattgacattcgcagctgtcctcttactccaaacgaaatgcatggcggcaccataatctggtataaaaatgacagcaagacccccatatcagcggacaaggactccaggattcatcagcagaatgaacatctttggtttgttcccgccaagatggaggattcaggctattactattgtataatgagaaactcaacatactgcctcaaaactaaaataaccatgagtgtcttagagaatgaccctggcttgtgctataacacacaagccagcttcatacagcggctccatgttgcaggggatggaagtcttgtgtgcccttatctggattttttcaaagatgaaaataacgagttacccaaagttcagtggtataagaactgtaaacctctgcctcttgacgatggaaacttctttggattcaagaataaactgatggtgatgaatgtggctgaagagcacagagggaactatacttgccgcacgtcctacacataccaggggaagcaatatcccgtcacacgagtaataacatttatcacaatagatgacagcaagagggacagacctgtgattatgagcccacggaatgagacgatggaagctgacccaggatccacgatacaactgatctgcaacgtcacgggccagttcaccgaccttgtctactggaagtggaatgggtcggaaattgaatgggacgatccaatcctagccgaagactatcagttgtgagtttgccaatcaattttgatgctacattctgtgacacacctgtgctcgttttgactctaagatggagagatgaaggttggctgctcctagccctttgctgcccactttgagctttgctaagtgatagacaattttgtgagaatttgtatttttggttttttttttttgttgttgttgttaaaaatacatgtcactgtacaaattc

SEQ ID NO: 2252 - DNA, 1790 bp, Rattus norvegicus
ccagtgksaygrryatcwgyrggaattmaggcwaatctctgttkwatkctgttatgggtgaaactctgggagatcctcctgttgacccagagcatggtgccttcgctgatgcactgcctatgagcacttcacaagaaattaccatggttgacacagagatgccattctggcccaccaacttcggaatcagctctgtggacctctctgtgatggatgaccactcccattcctttgacatcaaaccctttaccacggttgatttctccagcatttctgctccacactatgaagacatcccgttcacaagagctgacccaatggttgctgattacaaatatgacctgaagctccaagaataccaaagtgcgatcaaagtagagcctssgtccccgccttattattctgaaaaaacccaactctacaacaggccacatgaagagccttcaaactccctcatggccatcgagtgccgagtctgtggggataaagcatcaggcttccactatggagtccatgcttgtgaaggatgcaagggttttttccgaagaaccatccgattgaagcttatttatgataggtgtgatcttaactgtcggatccacaaaaagagtagaaataaatgtcagtactgtcggtttcagaagtgccttgctgtggggatgtctcacaatgccatcaggtttgggcgaatgccacaggccgagaaggagaagctgttggcggagatctccagtgatatcgaccagctgaacccagagtctgctgatctgcgagccctggcaaagcatttgtatgactcatacataaagtccttcccgctgaccaaagccaaggcgagggcgatcttgacaggaaagacaacagacaaatcaccatttgtcatctacgacatgaattccttaatgatgggagaagacaaaatcaagttcaaacatatcacccccctgcaggagcagagcaaagaggtggccatccgcatttttcaagggtgccagtttcgatccgtggaagctgtgcaagagatcacagagyaygmsraaaatatccctggtttcattaaccttgacttgaatgaccaagtgactctgctcaagtatggtgtccatgagatcatctacaccatgctggcctccctgatgaataaagatggagtcctcatatcagagggacaaggattcatgaccagggagttcctcaaaagcctgcggaagccctttggtgactttatggagcctaagtttgagtttgctgtgaagttcaatgcactggaattagatgacagtgacttggccatatttatagctgtcattattctcagtggagaccgcccaggcttgctgaacgtgaagcccatcgaggacatccaagacaacstgctgcaggccctggaactccrgctgaagctgaaccacccggagtcctcccagctgttcgccaaggtgctccagaagatgacaracctcaggcagattgtcacagagcacgtgcagctactgcatgtgatcaagaagacggagacagatatgagccttcaccctytgctccaggagatctacaaggacttgtattagcagaaaagtcccagtcgctgacaaagtgttccttctatcgattgcactattattttgagggaaaaaaatctgacacytaagaaatttactgtgaaaaaagcatttaaaaacaaaaagttttagaacatgatctattttatgcatattgtttataaagatacatttacaatttacttttaatattaaaaattaccmcmctwwaaaaaaaaaaaaaaaaaa

SEQ ID NO: 2253 - DNA, 1313 bp, Rattus norvegicus
ccctcaggccaactccttgtgagacttcacagaaggcaaaggcgttccaggacacactgcagctgcggccaactgcccagggggtggagactgctctcgggctctcagttgcccttcaggttctgcaccctggggacctggcagtggcagaatcatgtgggcatctgaatccactttgacatatggccctctggctcttcaaagcagtgtttgttcatggtccatgctggcgaggtccttaagaacacagaagtccatgtcagcagataaccagcctaccggagccaaaagggtgtggaggaaacctactgctaacagtgaaccactgtcaactgagtattccgagaggcagcatcccctgctgactgagaaattgatccaagcattaacacctgctggaagaagcagagaaggttgtgcatggtctgggaatcccagagttcatctacaaacaaagaggaggcgttctggatggatggcagctggaagccttcgccatagcccgctcttcttcaacacttaagcatttacctgggcattaagtaatgaaaattttgaaaccatatatgaggaatacatccatcttgtactacctgtgtttccttctcaacagtcacttcttaactgaggctggcatccatgtcttcattttgggctgtgtcagtgtaggtctccctaaaacagaggccaactggatagatgtaagatacgatctggagaaaattgaaagtcttattcaatttattcatattgatactactctatacactgacagtgactttcatcccagttgcaaagttactgcaatgaactgctttctcctggaattacaggttattttgcacgagtacagtaacatgactcttaatgaaacagtaagaaacgtgctctaccttgcaaacagcactctgtcttctaacaagaatgtaatagagtctggctgcaaggaatgtgaggagctggaggagagaaacttcacggagtttttgcagagttttatacatattgtccaaatgttcatcaacacgtcctgactgcactcgaaccttgtcagtgtttctgttattaagacacctccgcctgcccagaggcagcacagctccatgcattcgtgatctgctgggaaaccaagctgcctaacaggaaacggttgagccatttggatcccatgaaccctcgggaatgaagagarggaaagggcttttctcggacttatttttgcttgcytatttttaatttattacttcagttgtgcatatttgtaatataayagaagatgtggaataaagttgtatgcatattttatcagttga

SEQ ID NO: 2254 - DNA, 2028 bp, Rattus norvegicus
accaaggcgaggccagggccgaggcgcggggacggcggccgagagctaagcgacgtgggacggtgactgggaacggatcggagcgcgggacccggcccgggtctcgtgcgtccccgccgatgggcctccgccgagccggtgctaactgggtcttccctgaagcagaaggaacagtatttcctacctttccgaaccgaagaccaagaagctagagaatctatgtaaataaactgaaatctctgttggctttgcaccccaccccggagccgtcacttttacctggtctgaggagcgtgtagacctcggccagccgctatgaatgtgaccagcttgttttcattcacaagcccagctgtgaagagactccttgggtggaaacagggcgacgaagaagagaaatgggcggagaaggctgtggacgctttggtgaagaaactgaagaagaagaaaggggccatggaagagctggagaaggccctgagctgccccgggcagcccagtaactgtgtcaccattcctcgctccctggatggcaggttgcaggtgtcccaccggaagggactgcctcatgtcatttattgccgcgtgtggcgctggcccgacctccagagccatcatgaactaaagcctctggaatgctgcgagttcccatttggttccaagcagaaggaagtctgcatcaatccctaccactataagcgagtggagagccccgttctcccaccggtgctggttccgaggcacagcgagtacaaccctcagcacagccttctggctcagttccgaaacctgggacaaaatgagccccacatgccactgaatgccacgttccccgactccttccagcagccacacagccacccgtttscccagtmccccaacagcagctaccccaactctcctggcagcagcagcagcacctaccctcactccccgaccagctcagacccgggcagcccttttcagatgccagccgacacacccccgcctgcttacctgcctcctgaagaccccatggcccaggatggctctcagcctatggacacgaacatgacgaacatgacggcaccgacactgcccgcggagatcaatagaggagatgttcaagcagttgcttacgaggaaccaaaacactggtgctctattgtgtactatgagctcaacaaccgtgtgggcgaassgttccatgcctcctccaccagcgtgttggtggatggtttcaccgatccttccaacaataagaaccgattctgccttgggctgctctccaatgttaaccggaactccactattgaaaataccaggcgacacatcgggaaaggagtccacctttattacgtcggaggagaggtgtatgcggagtgcctcagtgacagcagcatcttcgtgcagagtcgraactgcaactaccaccatggctttcatcccaccacggtctgcaagatccccagcgggtgcagcttgaaaatcttcaacaaccaagagttcgctcagctactggcgcagtctgtgaaccatgggttcgagacagwgtatgaactcaccaaaatgtgcactattcgaatgagcttcgtgaagggctggggagcggagtaccaccggcaggatgtcactagcaccccctgctggattgagatacacctgcatggccctctccagtggctggataaagtccttacccagatgggttcgccccacaaccctatttcgtcggtgtcttaaaggccctcggcttctgtctcttgcaaactattgggccttgcagtacttgaaggacggagaagtcagacaggatggggagctgtaaaggagccgtgatacttgacctctgtgaccaaccgttggatggagaagctgacaggccttggtaacaagctgttgatatcaagaacccgcttagtttacattgtgacattctgttgtaaaatcaactaaaatgctgacttttagcaggactttgtgaatagttagaaaagagatggccaagccaggggcaaattatctattaggaaaaaaaaaaaaaaaaaa

SEQ ID NO: 2255 - DNA, 5893 bp, Rattus norvegicus
  misc_feature (107)..(107): n is a, c, g, or t
  misc_feature (221)..(221): n is a, c, g, or t
  misc_feature (5223)..(5224): n is a, c, g, or t
acacacacacacacacaaccactctctaaccactctctatcgcggagctgtcaccggccaccccagccctggaagggcggcgaaagccgcgcttccccgctaccggngcggggtcttaccgctcgactggtggggtcccgggacctccacagtcaccccgaggcgaaccagcagccccggagacccgccggccccaggaacgccactgctggggaccggcnggtgctcacagccccctcggcgcggtttaatgccgccggctcgccggcgccgcctccaacagggtatctgcactgtcgctctattactctacccaccgtcagtagggcgactgccgggattgctatcctctccatcctcattgccgatcagccagtattggacttgctggtagcggcggcagcggcggaggcggcgggagtctcgctgcccccctcccccgcccagcctccctaacatgtcctagaaaagctatggaaaccaaaggctaccacagtctccctgaaggcctagacatggaaaggcgctggagtcaagtgtctcagaccttggagcgttcttcacttggacctgcagagaggaccactgagaacaactacatggagattgtcaacgtcagctgcgtttccggtgctattccgaacaacagtactcaaggaagcagcaaagaaaagcacgaattactcccttacattcagcaagacaatagtcggtctgggattttgccatcagatattaaaactgagctggaatccaaggaactttcagccacggtagctgagtccatgggtttatatatggattctgtgagagatgccgagtacacttacgatcagcagaaccaacaaggaagcctgagcccaacaaagatttatcaaaacatggagcagctggtgaagttttacaaagagaatggtcacaggtcctccacactgagtgctatgagcagacctttgaggtcattcatgcctgactctgcagcctccatgaatggtggggccttgcgtgccatcgtgaagagccctatcatctgtcatgagaagagctcttctgttagcagcccgctgaacatggcatcttcagtatgcagccctgtgggcatcaactccatgtcctcctccacgactagctttggtagtttcccagtgcacagtcccatcactcaaggaacctcactgacatgctcccccagtgtcgaaaacagaggctcaaggtcacacagccccacacatgcgagcaacgtgggctcccctctttcaagtccattgagcagcatgaaatctccaatctccagccctccaagtcattgcagtgtaaaatctccagtctccagtccaaataacgtccctctgcgctcctctgtgtccagcccggcaaatctcaacaactcaaggtgctccgtttccagcccttccaacaacaccaacaatagatccacactctccagcccgacagccagcacagtggggtccatcggcagccccatcagcaatgccttcagctatgccacttcaggcgcttctgctggagccggtgccatccaggatgtggttcctagtccagacacccacgagaaaggtgctcacgacgttcctttccctaagacagaggaagtcgagaaggccatctccaatggtgtgactggcccgctcaacattgtccagtacataaaatcagaaccagatggggctttcagcagttcctgtctaggaggaaacagcaaaatcagccccagttctccattctctgtaccaataaagcaagagtcaagcaagcactcatgttcaggcgcctcttttaaagggaaccccacggtcaacccatttccattcatggatggctcctacttttcctttatggatgataaggactattattccctatcaggaatcttaggaccacctgtgcccggctttgatggtagctgcgaggacagcgcattcccagtggggattaagcaagaaccagatgatgggagctattaccctgaagccagcatcccatcatctgctatcgttggtgtgaattcgggtggacagtcctttcactaccggattggtgctcaaggtacaatatctttatcacggtcacctagagaccaatctttccaacacttgagttccttcccacctgtcaatacattagtggaatcatggaaaccacacggtgacctgtcatctaggagaagtgatgggtatcccgtcctagagtacattccagaaaacgtgtcaagctctactttacgaagtgtttctactggatcctcaagaccttccaagatctgtttggtgtgtggagatgaggcttctgggtgtcactatggggtagtgacctgtggcagctgcaaagtcttcttcaaaagagccgtggaagggcaacacaactatctgtgtgctggaagaaatgactgcattattgataagattcggcgaaagaactgtcctgcctgcaggctccagaaatgccttcaagctggcatgaacttaggagctcgaaagtcaaagaagctggggaagttaaaaggcctccacgagragcaaccacagcagcccccaccaccgccaccccaragtccagaagaggggaccacatacatcgctccgaccaaggagccatcggtgaactctgcgctggtcccgcagctcacctccattacgcatgcactcacaccatccccggccatgatcctggagaacatcgagcctgagaccgtgtatgcaggctacgacaattccaagcccgacaccgccgagagcctgctctccacgctcaaccgcctggcagssaaacagatgakccaggtcgtgaagtgggccaaggtacttccaggatttaaaaacttgcctctcgaggaccaaatcaccctcatccagtattcttggatgtgtctatcatcgttcgctttgagttggagatcgtacaaacacacgaacagccaactcctctattttgctccagacctagtttttaatgaagagaagatgcatcagtctgccatgtatgaactgtgccaggggatgcgccagatcagccttcaattcgtgcggctgcagctgacctttgaggagtactccataatgaaggttttgctgctactaagcacagttccaaaagatggcctcaagagccaggctgcatttgaggagatgaggacaaattacatcaaagaactgaggaaaatggtcaccaagtgtcccaacagttctggacagagttggcagaggttctaccaactgaccaagcttctagactccatgcatgatctcgtgagtgacctgctagaattctgcttctacaccttccgagaatcccaggctctgaaggtggagtttcccgccatgctggtggagatcatcaccgaccagctgccaaaggtggagtctgggaatgccaaacccctttactttcacagaaagtgacgggagataccggccaggaagaacttcgccttaagtttccccacgtggttctatgcctacgaaggacccaagaaatcacatttttaacatgtgatggctgattgacagttggtcggcagtttctcaagtttaaaaatcacgtcaagggtctggagccgggaaagccatgagacgtggatttgcaaggcctgagctggctaaaggactcttccctctccactcccagcgcttataaaacatgttcccgttcctctggatgaaaagccatatctagtcaataactctgattttgatattttaacaggtggaagttttaactatgccatgtggtttctggtatctctcgcttgttttcaaagggttcaaaggactagagagacgggttcaaaggactagagaactttttaagcttacccttggtttgcacataaaaacgtctagtcaatatggggattactatccttttgttatttaaaaacacacaaacacatacacaaaatgcatacagatccctggtatgtaataacagaacacgtggcgtggaactgtggcctaccgggcacgttttttctgcatcgctggcatacgcactcgttagtgtccatttattatttaattagaatggataagatgttaaatgccttggtttcaaatttctagtatctattgtgttggctttacaaataattttttgcagtctttttgctgtgctgtatattactgtatgtataaattgtgaaggacctgaaacaaggtgtaaggagcttttgtaaatgaaacacattagaaaaaagtctttaatggttaataggttgaatgggaaagtatttttgaaagaattctattttgctggagactatttaagtactatctttgtctaaacaaggtaaaattttcttttgtaacgtgagatgctctgcatgcgtactgaccgtttacagtgtatttaagagagacaaagctgtgcctttttttagcttcatatctaatttaccattttacagtctgttgtaaataaccacacttagacctcttcggttgtctctaagcctttctactttttcagtactatttgttttgttcttggtctcccgcgtgggaagtgttcgtgagactctagtgcgcagctstggcttctgcttcttcccgcttccatccgggatgctctggcartgtcctgcagctcctggcasgwgrcaggaaccactggtcctgagagtgctgtcctcccccctctgtcataagaagcagagcctgctctctcagaaagggagactggaaasatggcccagagagcacaattctcccatttccagaaaatctgattttctcctcttggggaaaatattccatgcaccctccacacctgtcaaagatcagaaagccgcctctagccttggacagggtcttcactcctggagccggtcatggggacagcaaatatggcaggaggtacaggcaactcatctgggtatgagtcagacagaatggcgtggagacccacagatcactagaaggtttttagattttttaaggtaggttttaaaaatgaaaattttatacataaacagttttggaggaaaaaaaccacaaaaacactacgaatcatgtaagcaagacagtggcactaaaattttaattcattaatctgtccaatactgatgcgatttatggcttttttcttgccccaaatcacagacatttgtgtatctctggggaacttcggtattgattgcactaaatgatctcttgatagaggccaaattaatctttcaaacatggtgatgactctcagaattcccannacctaagctgacgcagaaggctggggcaaggcttgagtgggtcagcgtttccacagggttcaccatgcaggcaacattaccgtgtctctcagacgacgcctgccttctgcaaggggagacccagggacgctgaactcagagggtggggsctttcttacatcatttgcamcttcaaggatttatttataggcagatctttaracacagtcaacttacacgcacagcaatatgaaaaccatacttcgaaggcgataaacacatacagcatgcagacgaggtgtttctgggggaaaggggctgagttaacgctgtgaractggatttccatcttagccaggattgaggtggagaaggtctacattagtctttttgtattartgaagttactggctcctcatgtgtctccgggtaactctgcttaactaaacagcaaagccatattctctaaattcactgttgaatgcctgtcccgggccaaactgtctgctcttatttttgtaccatattgctcttaaaaatcttggtttggtacaattcataattcaccaaaactccttcaaataattataacactaaattagtttaaaatgaagcaatttatatctttatgcaaaaacatgtctgtctttgcaaaggattgtaaacagattacaataaatcctttacttt

SEQ ID NO: 2256 - DNA, 1670 bp, Rattus norvegicus
gcggccgcgtcgacgttgcacggagagtactgcctgtctctcggcgtgtgcatctgtcmtgctctcaaccgcagcctgcgccctaccttctgcagctccagcctactcctgaccgacagcatcatggctctcagaggcaccgtgactgacttctctggattcgacggcagggctgatgccgaagttyywckgwwrgccatgmaagkytyrggcaccgacgaggacagcatcctgaacctgttgacagcccggagcaacgctcagcgccagcagattgctgaggagtttaagaytstktttggswrggmsbywgkgwawsmcatsaagtctgaactgaccggaaagtttgagaagttaattgtggctttgatgaagccctcccggctctacgacgcctacgagctgaaacacgctcttaaggkarmwgggwcagatgagaaagtgttgactgaaatcattgcctcaaggacacctgaagagctcagggccataaaacaagcttatgaagaagaatatggttccaacctggaagatgatgtggtgggggatacctcagggtactaccagaggatgttggtggtcctccttcaggccaatagagaccctgacactgcaattgatgrtgctcaagktrvwbkgkrykctcaggcattgttccaggctggagagctgaagtgggggacggatgaagaaaagttcatcaccatccttggramacrcaktstgtctcatttwmkmwgagtgtywgayaagtahwtgasaatatcaggatttcagattgaggaaaccattgaccgagagacctcagggaacttggagaacttactcctggctgtcgkkargystakkygrakcatacctgcctaccttgcagagaccctctactatgctatgaagggtgctgggacggacgatcacaccctcatcagagtcatagtgtcgaggagtgagattgatctgtttaacatcaggaaggagtttaggaagaacttcgccacgtmcctgtactctatgatcaagggcgacacatctggagastataagaaggscctgctgctcctctgtggaggmgaggatgactgaggagctgmctggagtgccctgggsccgcctgctgsccaccatcagmttccttcagcaccacgcctacttacgttcaatgcctgcctgcctgccacgctgscttactcacacgagtgtgtgstaatgaccaaagctgtctcgaatgaaagcrgwgttctgctgktctgtctgacagaccttcccacgtctctcagkctartatctctaagttgcgtyytctatcctcttctaragcttcatwyatattargttmataaccatattacctkgracggaaccttagccrtgaaattgtgaactcttggaagtgctgtcaakcaagcttagtgctctagctgayctgaaaaattmasatggtcgtaatatcagaaacgttgccgacaaataaacattctcgatcctccgaaaacagacgagcacactcgaggggggggccagggaccagttcgactataatgacgcgatgacagacacaggcggcgcacacaaagtggcgagtgaaaacccggcgtaccacttaacgcggcagaatcccttcgcgcagcgaaacaaagccgacagagcaccaaaggccactaggatgcatg

SEQ ID NO: 2257 - DNA, 2125 bp, Rattus norvegicus
gcggtaccttagctgcctggctgcaattctcccccccagctctgccacctcgtccctctactccctgcccccttaaacatctggattattacccccagtggcgttctccggcttcgtaagtgcccatcggaaacatctttgcacccccataactcgtggactttacagcacaagaatctggaagatgtacagcttcaacactctgcgattctacctttgggagaccattgtattcttcagccttgctgcttccaaagaggyygacgctgcccgctctgcacccaagcctatgtcaccctcggacttcctggatawgywyakskkmarsacttctgsgtatkmtrccwkkrksagaccswaytytwmaggtcctcctgtgaacgtgagttgcaacatcttcatcaacagctttggttctatcgccgagacaaccatggactacagggtcaacatcttcctgaggcagcagtggaacgacccccgtctcgcctacaatgaatatcctgacgactctctggaccttgacccatccatgttggattccatctggaagcctgacttgttctttgccaatgagaagggggcccacttccacgagatcaccacggacaacaagctgctgagaatctcccggaacggcaacgtcctctacagcatcagaatcaccctgactctggcctgccccatggacctgaagaatttcccgatggaygtacagacatgtatcatgcaactggaaagctttggttataccatgaacgacctcatctttgagtggcaagagcaaggagctgtgcaggtggcagayggactgaccctgcctcagtttatcctgaaggaagagaaggatctgagatactgcaccaagcactacaacacaggtaaattcacctgcattgaggcccgattccacctggaacggcagatgggctactacctgatccagatgtacatccccagcctgcttatcgtcatcctgtcctggatctccttctggatcaacatggatgctgcaccagctcgtgtgggactgggcatcaccacagtgctcaccatgaccacacagagctctggctcccgagcctccctacccaaggtgtcctacgtgaaagctattgacatctggatggctgtttgcctgctcttcgtgttctcggccctgctggaatatgccgctgtcaactttgtgtcccggcaacacaaggaactccttcgatttaggaggaagcggcgacatcacaaggatgatgagggtggagaaggccgcttcaacttctccgcctatgggatgggsccagcctgcctgcaagccaaggatggcatctctgtcaagggtgccaacaacaacaacaccacgaaccccgctcctgcaccgtccaagtccccggaggagatgcggaaactcttcatccagagagccaagaagatcgacaaaatatctcgcatcggtttccccatggccttcctcatcttcaacatgttctactggatcatctacaagatcgtccggagagaggacgtccacaacaagtgaaggctctgggacggggtgggggggagctgggagagggtggtgggatgagcacagaggctgggagccaagggwggaggaagagagrragagcasasasccatctccctccaccaagtgcaatagaagccacaagggtggatacatccagggtgttacaatatccatctagcctccaggggcgtgaggtgggagggccttttcgaatacagcaactggggaccatgaggggtgggacaggggtcagggaggggattgggaaaatcacagctttcaaaattcaagtccattgggttgaggggggcgggggggctcctgtttggaggtcaatgctgcctgccccaaaaacaggaaggcagtgtaatatatatataacatttaaccatgcttaacattaatgcaaaacccaccagaacaaaagatacgtctcttaaaccagcctagtaactgcttaaacttttaaagtccccaacgtgatggacaatacttcccagagtagaaatggacacgaataagcttgctgtggtctatgctcccatcacgctcttacaaacgccatgtctgtctttaaactgacccccgtggacacatgcc

SEQ ID NO: 2258 - DNA, 4390 bp, Rattus norvegicus
  misc_feature (31)..(31): n is a, c, g, or t
ataagcgcagttccttccgccctggtctccnttggctggagacggcggaagggcggcttggtggcctccattgagatccggaggatccaaggactgtgtagctacaatgttgtcaagacttttccgtatgcatggcctctttgtggcctcccatccctgggaggtaattgtgggaacggtgacacttactatctgtatgatgtccatgaacatgttcaccggcaacaacaagatctgtggttggaattatgagtgcccaaaatttgaagaggacgtgctgagcagcgacatcatcatcctcacgataacccggtgcatcgccatcctgtacatctacttccagttccagaacctgcgtcagcttgggtcaaagtacattttgggtattgccggcctcttcacaattttctcaagtttcgtcttcagcactgtcgtcattcatttcctcgacaaagaattgacaggcttaaatgaagctttgccctttttcctgctcttgattgacctttctagagcgagtgcattggccaagtttgccctgagttcaaactcacaggatgaagtaagggagaatatagcgcgtgggatggcgatcctgggccccacgttcacccttgacgctctggtggaatgtcttgtgattggagttggcaccatgtcaggggtgcggcagcttgagatcatgtgctgctttggctgtatgtccgtgcttgccaactactttgtcttcatgacattcttcccagcctgcgtgtccctggtcctagagctttctcgggaaagccgtgagggtcgtccaatttggcagctcagccattttgccagagttttagaagaagaagagaataaaccaaacccagtaacccaaagggtcaagatgatcatgtctttaggcctggttcttgttcacgctcacagtcgctggatagctgatccttctcctcagaacagcacagcagaacagtctaaggtttccttgggtctggctgaagatgtgtccaagagaattgagccgagtgtttctctctggcagttttacctctccaagatgatcagcatggacatcgagcaagtgattaccctgagcttagcgttgcttttggctgtcaagtatattttctttgaacaagcagagacagaatcaacactctcattaaaaaatcctatcacatctcctgtcgtgaccccaaagaaagctcaagacaactgttgtagacgtgagcctctgcttgtgaggaggaaccagaagctttcgtcagtggaggaggatccaggagtgaaccaagacagaaaagttgaggttataaaacctttagtggcagaagccgagacttcgggcagagctacgtttgtgcttggcgcctctgcagccagccctccattggccctgggggcacaggagcctgggatcgaactccccagcgagcctcgacctaatgaagagtgtctacagatactggagagtgcagagaaaggtgcgaagttccttagtgatgcagagatcatccagttggtcaatgctaagcacatcccagcctacaaactggaaaccctcatggagacgcacgagcgtggtgtgtctattcgccggcagctcctctccgccaagcttgcagagccatcttctctgcagtacctgccttacagagactataattactccttggtgatgggagcttgctgtgagaacgtgatcggatatatgcccatccctgttggagtggcaggacctctgtgcctggatggaaaagagtaccaggtgccaatggcaacaacagaaggttgtcttgtggccagcacgaacagaggctgcagagcgatcagtcttggtggaggtgccagcagccgggtccttgcagatgggatgagccgaggcccagtggtgcgtcttcctcgtgcttgtgactcagcagaggtgaagagctggcttgaaacacctgaagggtttgcagtggtaaaggaggccttcgacagcacgagcagatttgcacgtctacagaaacttcacgtgacgctggcaggacgcaacctctacatccgwytmsagtccaaaacgggggacgccatggggatgaacatgatttccaagggtacggagaaagcacttctgaagctkcaagagkkcktkcckgagctgcagatwctggcggtcagtggtaactattgcaccgacaagaaacctgctgccataaactggatcgaagggagaggaaagactgtggtttgtgaagctgtcattccagccaaggtggtgagagaagtattaaagassactacggaagctatggttgacgtaaacattaayaagaatcttgtgggctctgccatggctggtagcataggaggctacaacsyccatgctgccaacatcgtcactgccatctacattgcatgtgsccaggatgcagcacagaatgtggggagttcaaactgtattackttaatggaagcaagtggtcccacaaatgaagacttrtacatcagctgtaccatgccgtctatagagatcggaaccgtgggtggtgggaccaaccttctacctcagcaagcctgcctgcagatgctaggtgttcaaggggcgtgcaaagacaatcctggagaaaatgcacggcagcttgcmcgaattgtgtgtggcactgtratggctggtgagttgtccttgatggcagcattggcagcaggacatcttgtcagaagtcacatggttcacaacagatcaaagataaatttacaagatctgcarggaacatgcaccaagaaggcagcttgagcatcctgacatacttgractgaaacacgggcattgggttctcmaggwctaacatgaaatctgtgaattaaaaatgtcagtgcagtgtcttgtggaagatgaacgtgatcagtgaggcaggcacctgcttggtttctggcctctttcagagacgtctgcggtcctttgcaccagactcctcagacgtgggaactatggttctttccgtgccgtrttctagaaagatctcatgtggatgtcatggtgctctgagcaccacagatgtgactgcagctcgtttctraaagctgccacaagctggaagctggtgttttgacgaaatgatggatcytggtgatcagtgtggggctcacctccaatgggttaaaatggagttttaaatgacactgtagctgacagaactctctgatttttatttattcagtctgggykgtagaactttgcaatctaagtttattttttgtaaactaataattcatttggtgctggtctattgatttttggggacctacttcttcatggaagaattacttttattctcaaactacagaataatgtgctaagtagtgctaaatagttctcgacgaagaaaagagtcgctgtgttcatctcagtctttgkkcagagaggcctttagctgtgcacagtctgcactaaagacacagagctcttagtgttagagcagagtacaagcaggtcggacctctcaggacttagagtgtgggagcagtttttaaagaaaacaaccattgctctaagccaactttcttkggagacattttarmkkatttagctgaattctagatttcttggtaaactatmaaatctgtatatgttgtaataaagtgtctaatgctaggagtttattggaagtgtttaagaaataaaagtactcatcagcttttacacggataaaatgctytagcttgggccagagaagacytcgctcaggagcattggtccgggaaagcctggcttgcttgccgagcctaatgaagggaagtcagcctacagagccagtgatggagccacatgaatggccctggagctgtgtgccttgttcctgtggccaggagttrggtgactgaatcatttatgggckscwykrgkggacccataaaagctcttagcttcmtcagggggtcagcagagttswwgaatckkmaykwkktkttaatgtaccagttttgtataaataataataaagagctccttattttgtawwmdrhmhradrmwwmrwwwrktcyyrrmagcggacgtctgtgtaraagacggactctgaaagwsattscragtrmgrygrcggcggcggcggcggcgssackgrmgctcagtgattgtgyyagtattattgtggaaggtwgactyygctgttgtatgtaaagtttccagttgcgcctcttgtgacttttcagccagtaccattttatttacctgagcttgtcgtgggaagtggtagtaaaccgcattgagtgttgatgctggtgacttgtgatcagtgtcatcgtgctaagtccatgttttgtacaattactaaattgtatacattttgtyawaraawamwwwwwmmasttgagtaattmtgaaagsaagttaamawwraaaaaaaaaaaaaaaaa

SEQ ID NO: 2259 - DNA, 3329 bp, Rattus norvegicus
gggggggacgcgcctgggtggggcggctcgcagcccgggcctggtggcccccggggctcccgggcggcggggtagctaggggagagcgggcttcaacatgatggcggccgaggcgggcagtgaggaaggcggcccggcgaccgcggggaccggcggcgccgcggccacgggctccagcgcctacccagcagcgtgccgggtaaagttacccgcggcccctccgatggcagtcgccccgtgtcctgggctggcggacaccgacctggctgcggccctcggtgggggagccgcgtcggggtccgggttcctggggaccgggccggtgtctggtgtcctggggggcgccgcgctgaccggcggtgctgcagctggcgtggcgggtgctgcagccgctggacctgccggagacatcgctctcaccaaggggactctctctctgcctgctgagactctcgggccgggcggcggattccctcctctgccgcctcctcctctgttgcctcctttgggctccggtctggggacagtggatgaaggtgactccttggatggaccagaatacgaggaggaagaggtggccataccgctgaccgcacctccaactaaccagtggtatcatggaaaacttgatagaactatagcagaagaacgcctcaggcaggcagggaaatctggaagctaccttataagagagagtgatcggaggccagggtcctttgtactttcatttcttagccagacaaatgttgtcaatcattttaggattattgctatgtgtggtgattactacattggtggaaggcgtttttcttcactctcagacctaataggatattacagtcacgtttcttgtttacttaaaggagaaaaattactctacccagttgcaccaccagagccagtagaagatagaagacgtgtacgagccattctgccctacacaaaagtaccagacactgatgaaataagtttcttaaagggagatatgttcattgttcacaatgagttagaagatggatggatgtgggttacaaacctaagaacagatgagcaaggccttattgttgaggacctagtggaagaggtgggccgagaagaagatccacatgaaggcaaaatatggttccatgggaagatttccaaacaagaagcttataatttattaatgacagttggccaagtctgcagctttcttgtgaggccctcagataatactcctggagattattccctgtattttcggaccaatgaaaatatccagcgatttaaaatttgtccaacacctaacaatcagttcatgatgggaggccgctattataacagtattggggacatcatagaccactatcggaaagaacagattgttgaaggctattatcttaaggaacctgtaccaatgcaggatcaaggacaagtactcaatgacactgtggatgggaaggaaatctataatacaattcgtcgtaaaacaaaggatgcattttataaaaatattgttaaaaaaggttatcttctgaagaagggcaaaggaaaacgttggaaaaatttatattttatcttagagggcagtgatgcccaacttatttattttgaaagtgaaaaacgagctacaaaaccaaaagggctaatagatctcagtgtatgttctgtctacgttgtccatgatagtctcttcggcaggccaaactgttttcagatagtcgttcagcactttagtgaagaacattacatcttttactttgcaggagaaactccagaacaagcagaggattggatgaaaggcctgcaagcattttgcagtttacggaaaagtagcccagggacatctaataaacgccttcgtcaggtcagcagccttgtattacatattgaagaagctcataaactaccagtaaaacacttcactaatccatattgtaacatckasttgaatagtgtccaagtagcaaaaactcatgcaagggaggggcaaaacccagtatggtcagaggagtttgtctttgatgatcttcctcctgacatcaatagatttgaaatcacacttagtaataaaacaaagaaaagtaaagatccagatatcttatttatgcgttgccagttgagcaggttacagaaaggacatgccacagatgaatggtttctgctaagttctcatataccactaaaaggtattgaaccaggatctctgcgtgttcgagcacgatactctatggaaaaaatcatgccagaagaagagtacagtgaatttaaagagcttatactgcagaaggaacttcacgtagtctatgctctatcacacgtatgtggacaagaccgaacactactggccagcatcctactgaaaatatttcttcatgaaaagcttgagtcattgttgttatgcacactaaatgacagagagataagtatggaagatgaagccactaccctatttcgagctacaacacttgcgagtaccttgatggagcagtacatgaaagccacggccacgcagtttgttcatcatgctttgaaagactccattttaaagataatggaaagcaagcaatcatgtgagttaagtccatcaaagttagaaaaaaatgaagatgtgaacactaatttagcacacctattgagcatactttcagagcwygwggagaaaatattcatggcttcagaaatacttccaccgacactgagatatatttatgggtgtttacagaaatcagttcagcataagtggcctacaaataacaccatgagaacacgagttgttagtggttttgtttttcttcggcttatctgcccagctatcctgaatccacggatgtttaatatcatctcagattctccatctcctattgctgcaagaacactgacattagtggctaaatctgtgcagaatttagcaaatcttgtggaatttggagctaaggagccttatatggaaggtgtcaatccattcatcaaaagtaataaacatcgcatgatcatgtttttagatgaacttgggaatgtacctgagcttccggacactacagaacattytagaactgacctgtctcgtgacttagcagcattgcatgagatttgtgtagctcattcagatgaactgagaacactcagtaatgagcgtggtgtacagcagcatgtactgaaaaagcttctggcaataacagaactgcttcaacaaaagcaaaaccagtatacaaaaaccaatgatgtcaggtagcagcccggtgttctgcatggattcggcatgcccaacgtggtaattcacatcaccatgtctcctttgctcttgccaaaaagmmaaacaaaataataaagagaaaaaaaaaaaaaaa

SEQ ID NO: 2260 - DNA, 2390 bp, Rattus norvegicus
tctgaatatgtggagactattatagcaaaatggactcagtgtctctttgccagattccttattgctgtatcccatgagcctacctgaccttgaggaagagccgtgtttaatgatgacaagcctgtctcccgtgtagtgacaaaaaggaggaggaccacaaggaaagacggatttagatttctactcagcaaggaagcgagctctgtcagcaacctctctggattacccttcccaagatgaaccgatatacaaccatgaggcagctgggggacggcacgtacgggagtgtgcttatgggcaagagcaatgagtctggggagctggtggcaatcaagaggatgaagagaaagttctattcttgggatgagtgtatgaacttgcgagaagttaagtccctgaagaaactcaatcatgccaatgtgattaaactaaaagaagttatcagagaaaatgaccatctttattttatatttgaatatatgaaagaaaacctctatcagctaatgaaagacagaaacaaactgttccctgagtcagtcatcagaaatattatgtatcaaatactacaggggctggcatttatccacaaacatggcttttttcacagggacatgaaacctgagaatttgctttgcatgggtccagagctggtgaagattgctgattttggacttgcgagagaattaagatcacagccaccatatactgactatgtgtctaccagatggtaccgtgctcctgaagttttgctaaggtcttcagtgtacagctctcccattgacgtgtgggccgtgggaagtataatggccgagctatatacgtttagaccgcttttcccagggaccagtgaagttgatgagatctttaaaatttgccaagtgttagggactcccaagaaaagtgactggccggaggggtaccagctggcatcctccatgaacttccgctttccccagtgcattcctataaacctgaaaactctcattcccaatgccagtagtgaggctattcagcttatgacagaaatgcttaactgggatccaaagaaacggccaactgcaagccaggcactgaagcacccatattttcaagtcggtcaggtattgggcccttctgcacaccatctggatgcaaaacagactttgcacaagcagctgcagcctccagagccaaagccatcttcctctgaacgggatcctaagcctttgccaaacatccttgatcagcctgccgggcagccccagccaaaacagggccaccaaccactgcaggccattcagccaccacagaacacagtggttcagccacctccaaagcagcagggtcaccataagcaaccacaaacgatgtttccaagtatcgtcaaaaccataccaacgaatccagtcagcacagtaggccataagggggcccggagacggtggggtcagacagtcttcaagtctggagacagctgtgacaacatcgaggactgcgacttgggagcctcccactccaagaagccgagcatggatgccttcaaggaaaaaaagaagaaggagtctccatttcggtttccagaagcaggactcccagtctccaaccacttgaagggggaaaatagaaatttacatgcatccttaaaatctgacacaaacttgtcaactgcttcaaccgctaagcagtactatttgaaacaatcaagataccttccgggtgtgaaccccaagaacgtgtctttggtagctggcggcaaggatataaattcacactcttggaataatcagctatttcctaagtctctgggatccatgggggcggacctcgctttcaagaggagtaacgcagcagggaaccttgggagctacagcgcttacagccagacgggatgcgtgccttcctttctcaagaaagaagtgggatcagctggccagaggatccacttggcgcctctgggtgcgtcggctgccgactatacytggagcacaaaaactggccgaggccagttttcaggacgaacttacaatcccacagccaaaaatctcaatattgtgaaccgcacacagccagtcccctcggtgcacgggaggacagactgggtggctaagtacggaggccaccggtaggagaagtggaagcctgaagcattgctccgtagaggacaatcacgccccttgatcctgggagacgtctacagagtctatttctaccgagttccacaggacgcacacaaccgtgggcgcctcagagmccggaagtcagctcccgatttcttccttttccggaaatgcaatgcattttcttaacttgtggccagcagtgctgatgcagcaccgtgctgaaacttttgagcgggacttttaaagagtattgaataaattatttgccaaagtaaaaaaaaaaaaaaaaaa

SEQ ID NO: 2261 - DNA, 8822 bp, Rattus norvegicus
ccggatcgtccaagtcgccgggctgcgaggtggcactgcgctcctttccgcccagcgcgcctcagtcctctgcaccgagcctggcagctcgcttctgggcgactttgccgcctcgagccccggaggccaaagccatgaatgaaatgtccagctttcttcacatcggggacattgtgtccctgtacgccgagggctctgtcaacggcttcatcagcactttggggctggtggatgaccgttgtgtggtggagcctgcagctggggacctggacaacccccccaagaagttccgagattgcctcttcaaagtgtgccccatgaaccgctactccgcacagaagcagtactggaaagccaagcagactaagcaggacaaagagaagatcgccgatgtggtgttgctgcagaagctgcagcatgcagcccagatggagcagaagcaaaacgacacagagaacaagaaggtgcacggggacgtggtgaagtacggcagcgtgattcagcttctgcacatgaagagcaacaaatacttaacggtgaacaagcggctgccggccctgctggagaagaacgccatgcgggtgacgctggacgcgacgggcaacgagggctcctggctcttcatccagcccttctggaagcttcggagcaatggggataacgtggttgtgggggacaaggtgatcctgaaccctgtcaacgcagggcagcctctacacgccagcaactatgagcttagtgataacgttggctgcaaggaggtcaactctgtcaactgcaacaccagctggaagatcaacttattcatgcagttccgggaccatctggaggaggtgttgaaggggggagacgtggtgcggctgttccatgcagagcaggagaagttcctgacctgtgacgagtaccggggcaagcttcaggtgttcctgaggaccacgctgcgtcagtccgccacctcggccaccagctccaacgcgctctgggaggtggaggtggtccaccatgacccctgccgcggcggagcgggacactggaatggtctgtacaggttcaagcacctggccacgggcaactatctggcggctgaggaaaaccccagctacaagggtgatgtctcagatcctaaggcagcaggaccaggggcccagagccgcacaggccgcagaaacgccggcgagaagatcaagtaccgtctggtggctgtgccacatggcaacgacatcgcgtctctcttcgagctggaccccaccacgctgcagaaaaccgactccttcgtgccccggaactcctacgtgcggctgcggcacctctgtaccaacacctggatccagagcacgaacgcgcccatcgacgtggaggaggaacggcctatccggctcatgttgggcacgtgccccaccaaggaggacaaggaggcctttgccattgtgtcggttcccgtgtctgagatccgcgacctggactttgccaacgatgcaagctccatgctggccagcgctgtggagaaactcaacgagggcttcatcagccagaacgaccgcaggtttgtcatccagctgttggaggacttggtgttttttgtcagcgatgttcccaacaatgggcagaatgtcctggacatcatggtcaccaaacccaaccgagagcggcagaagctgatgcgggacgagaacatacttaagcagatctttggcatcctgaaggctccattccgtgacaaggggggtgaagggccattggtgcgtctggaggaactgtctgaccagaagaacgccccctaccagtacatgttccgcctgtgttaccgggtgctccggcactcccaggaggactaccgtaagaaccaggagcacatagccaagcagttcgggatgatgcagtcacagattggctatgacatcctggccgaagacaccatcacggccctgctgcacaacaaccggaagctgctggagaagcacatcaccaagaccgaggtggaaaccttcgtgagcctcgtgcgcaagaacagggagcccaggttcctggactacctctccgacctgtgcgtgtccaaccgcattgccatccccgtcacccaggagctgatttgcaagtgtgtgctggaccccaagaacagtgacatccttatccagactgagcttcggcccgtgaaggagatggctcagtctcacgagtacctcagcatcgagtactcggaggaggaggtgtggctcacatggacggacaggaacaacgagcatcacgagaagagtgtgaggcagctggcccaggaggcaagggccggcaacgcacacgacgagaacgtgctcagctactacaggtaccagttgaagctgtttgcccgcatgtgcctagaccgccagtacctggccatcgacgagatctccaagcaactgggtgtggagctgcttttcctatgcatggcggacgagatgctgccctttgacctccgcgcctcattctgccacctgatgctacatgtgcacgtggaccgtgacccccaggagctggtgacccctgtcaagtttgcccgcctctggacagagatccccacggccatcaccatcaaagactatgattccaatctcaacgcctcccgagatgacaagaaaaacaagtttgccagcaccatggagttcgtggaggattaccttaacaacgtggtcggcgaggccgtgccctttgccaacgatgagaagaacatactgacctttgaggtggtcagcctggcacacaacctcatctacttcgggttctacagcttcagcgagctgctgcgactcacacgcacgttgctgggcatcatcgactgcattcaggcaccagccgctgtgctgcaggcctatgaggagcctggcggcaagaacgtgcggaggtccatccagggggtgggacacatgatgtccaccatggtgctaagccgcaagcagtctgtatttggtgcctccagcctgcctactggagtgggtgtccccgagcagctggacagaagcaaatttgaggacaatgaacacaccgtggtgatggagaccaagctgaagatcctggagatcctgcagttcatcctcaacgtgcgcctagactaccgcatctcctacctgctgtcggtcttcaagaaggagtttgtggaggtctttcccatgcaggacagcggggcagacggcacagcccccgccttcgattcctctactgccaacatgaatctggaccgcatcggggagcaggcagaggccatgtttggagtagggaagaccagcagcatgctagaggtggatgacgaagggggtcgcatgttcctgcgagtgctgctgcacctcaccatgcacgactacccacctctggtctccggcgccctgcagctgctcttcaaacatttcagccagcgccaggaggccatgcacaccttcaagcaggtgcagctgctcatctcagcccaggatgtggagaactacaaagtgatcaagtcggaactggatcgactgcggacgatggtggagaagtcggagctgtgggtggacaagaaaggcagcgtcaagggcgaggagggggaggcgggcgccagcaaggataagaaggagcggccctcggatgaggagggatttctgcagccacacggggagaagagcagtgagaactaccagattgtcaaaggcatcctggagaggctgaacaagatgtgtggggtcggggagcagatgcgaaagaagcaacagagactgctgaagaacatggacgcccacaaggtcatgctggacctgctgcagatcccttatgacaagaacgacaacaagatgatggagatcctgcgctacacacaccagttcctacagaagttctgtgccgggaaccctggcaaccaggcccttctgcacaagcacttgcagctcttcctcacgcccgggctcctggaggctgagaccatgcagcacattttcctcaacaactatcagctgtgctctgagatcagcgagccggtgctgcaacacttcgtgcactgctggccgacacacgggcgccacgtgcagtacctggacttcctgcataccgtcatcaaggccgagggcaagtacgtgaagaagtgtcaggacatgatcatgaccgagctgaccaacgcaggcgacgacgtggtggtgttctacaatgacaaggcctctctggcccatctgctggacatgatgaaggcagcccgagatggcgtggaggaccacagccccctcatgtaccacatctccctggtggacttgctggctgcctgtgcagaaggcaaaaatgtctacacagagatcaagtgcacttccctgctgcctctagaggacgtggtgtcggtggtgacccacgaggactgcatcacggaggttaaaatggcgtatgtgaacttcgtgaaccactgctatgtagacacggaggtggagatgaaggagatctataccagcaaccacatctggacgctcttcgagaacttcaccctggacatggctctggtctgtaacaagcgggagaagcgcctgtcagaccccacccttgagaagtacgtgctcaccgtggtgctggacaccatcagcgccttcttcagttccccattttcagagaacagcacatccctacagacgcatcagacaattgtggttcagctgctgcagtccaccacccggctgctcgagtgtccttggctgcagcagcagcacaagggctcggtggaggcctgtgtccgcaccctcgccatggtggccaagagtagagccatcttgctgccgatggatctggatgcccacatgagcgctctgctcagcagtgggggcagctgctcagccgcggcccaacgcagcgctgccaactacaagacggccacgaggaccttccctcgggtcatccccaccgccaaccagtgggactacaagaacatcattgagaagttacaggacatcatcacggccctagaagagcggctgaagcctctggtgcaggccgagctctcggtgctggtggacatgctgcactggcccgagctgctctttctagagggcagtgaggcctaccagcgctgcgagagtggcggcttcctgtccaagctcatccgtcacaccaagggtctcatggagtcggaggagaagctgtgcgtgaaggtgctgcggacgctgcagcagatgctgcagaagaagagcaagtatggggaccggggcaaccagctaaggaagatgctgctgcagaattacctccagaaccggaagtccggtccccggggcgagctcactgaccccacaggctctggcgtggatcaggactggtccgccatcgcagccacccagtgccggctggacaaggagggggccaccaagttggtgtgtgatctcatcaccagcaccaagaacgagaagatcttccaggagagcatcggcctggccatccgcctgctggacgggggcaacactgagatccagaagtctttctacaacctgatgacaagtgacaagaagtcagagcgcttcttcaaagtgctgcatgaccgcatgaagcgtgcccagcaggagaccaagtccacagttgccgtcaacatgagtgacctgggcagccagcctcgtgaggaccgtgagccagcagaccctaccaccaaaggtcgcgtgtcctccttctccatgcccagctcctcccgatattcgctgggccctggcttgcaccgggggcacgacgtgagcgagcgtgcgcagaacaacgagatggggacctcggtgctcatcatgcggcccatcctgcgcttcctgcagctgctgtgtgagaaccataaccgggacctgcagaacttcctgcgctgtcagaacaacaagaccaactacaacctcgtgtgtgagaccctgcagttcctggacatcatgtgtggcagcaccacagggggcctggggctgctggggctctacatcaacgaggacaatgtgggcctggtcatccagaccttggagaccctcacagagtactgccagggcccgtgccatgagaaccagacctgcatcgtgactcacgagtccaacggcattgacatcatcacggcgctgatcctcaatgacatcagcccgctctgcaagtaccgcatggacctggtgctgcagctcaaggacaatgcctccaagctgctcctggctctgatggagagtcgacatgacagcgagaatgcagaacgcatcctcatcagccttcggcctcaggagctggtggacgtgatcaagaaggcctacctgcaggaggaggagcgggaaaattccgaagtgagcccacgtgaagtgggccacaacatctacatcctggcactgcagctttccaggcacaacaagcagctacagcacctgctgaagccggtgaagcgcatccaggaggaggaggccgagggcatctcttccatgctcagcctcaacaacaagcagctctctcagatgctcaagtcctcagcccctgcccaagaggaggaggaagacccgctggcctactatgagaaccacacctcgcagattgagattgtgcggcaagaccgaagcatggagcagatcgtgttcccggtacctgccatctgccagttcctgacagaggagaccaagcaccggctcttcaccaccacggagcaggacgagcagggcagcaaagtgagcgacttcttcgaccagtcctccttcctgcacaacgagatggagtggcagcgccggcttcgcagcatgccgctcatctactggttctcccgccgcatgacgctgtggggtagcatctccttcaacctggcagtgttcatcaacatcatcattgccttcttctacccctacgtggaaggcgcgtccacgggcgtgctgggctccccactcatctcgctcctcttctggatcctcatctgcttctccattgccgcgctgttcaccaagcactacagcgtccgtcccctcattgtggcactggtccttcgctccatctactacctgggcattgggcccacgctcaacatcctgggtgctctcaatctgaccaacaagatcgtgtttgtggtgagctttgtgggcaaccgcggcaccttcatccgtggctataaagcaatggtcatggacatggagttcctgtatcacgtgggctacatcctgacgagtgtcctgggcctctttgctcatgagctcttctacagtatcctgctctttgacctcatctaccgagaggagacgctgtttaatgtcatcaagagcgtgacccgcaatggccgctccatcctgctaactgccctgctggccctcatccttgtctacctcttctccatcgtgggcttcctcttcctcaaggatgacttcatcctggaggtggaccggctgcctgggaaccactccagagccagcaccctggggatgccacacggagctgccacatttatgggcacatgtagtggggacaagatggactgtgtctctgaggtctcggtgcctgagatcctagaagaggacgaggagctggacagcacagagcgggcctgtgatactctgcttatgtgtattgtcaccgtcatgaaccacggactgaggaacggtggcggcgtgggcgacatcctccgcaagccctccaaagacgagtcgctcttcccagccagggtggtgtacgacctcctgttcttcttcattgtcatcattattgtcctgaacctcatctttggggtgatcatcgacaccttcgccgacctgcgcagcgagaagcagaagaaagaggaaatcctcaagaccacgtgcttcatctgtggtctggagagggacaagtttgacaacaagacagtgtcctttgaagagcacatcaaactggagcacaacatgtggaactacctgtacttcattgtgctggtccgtgtcaagaacaagacagactacacgggccccgagagctacgtggctcagatgatcaagaacaagaacctggactggttcccacggatgcgcgccatgtccttggtgagcggcgagggcgagggcgagcagaacgagatccgcatcctgcaggagaagcttggctccaccatgaagctggtctcgcacctcaccgcccagctcaatgagctcaaggaacagakgacggagcagcggaagcggaggcaacgtctgggcttcgtggacgtgcagaactgcatgagccgctgagcagagcggagcctcggaggcccccacgggaggccggcttgcccacagctgccgcccttccttcaggtcaggtagaagccaggtgcctgccccatcttcagctcagctgccaccctccctmcccaagccaggctctggccagcgggagtgccagagcagagcacggtcctgcttagtaagtacccttgaagagactcggtttacmttagtgccttaggggatgcaagtyctccagactgmtgtccwtcgaagcagtgactggcattyctcagtgsccytggcaggtggytaaaagtgggctgsctctcacctccaagcaytacattgtggctgtcccstgcctgccaccctggctaggaaggtggtagcctgctgytattagcttcctagggctttgmtatttaacttattctgggggcyatcccamcctcctgtggcctgctggggacagtgtggccccgtcscaggagcstcatgactcaggtggaccttgctcscaggactttctytaggctttgtaggcaagcctcacaagcccagcaacaggcctgggctgtgtgacagtggcttctctctwtttggtgtaatgttktacatgtcctgtgtcctggagamtaatgtgttaattgccttaaataaattaatagactccaarwmmaaaaaaaaaaaaaaaaa

SEQ ID NO: 2262 - DNA, 2175 bp, Rattus norvegicus
  misc_feature (2091)..(2091): n is a, c, g, or t
ggcacgagctgggggattctgcggagcgtgcgggacggcggcggcggcggcggcggcggcggcggcggcggcgggagaggcggctggaacagcgctgtgcagcagcggggttatgcgtgtgggactcgcccagaggctcctgctcactgacagatgaggacaaacccacggtaaaggcggtccatctgcgctcagacccagatggtggcagagctatgaccaggcctgcaggcgccacgccaagtggggtcagtcatggaacagccacaggaggagacccctgaggcccgggaagaggagaaagaggaagtggccacgggtgacggagccccagagctcaacgggggaccagagcacacccttccttccagcagctgcacagacctctcccagaattcctccccttcctccctgctggaccagctgcagatgggctgtgatggggcctcaggtggcagcctcaacatggagtgccgggtgtgcggagacaaggcctcaggcttccactacggggtccacgcgtgtgaggggtgcaagggcttcttccgccggacaatccgcatgaagctcaagtacgagaagtgcgatcggatctgcaagatccagaagaagaaccgcaacaagtgtcagtactgccgcttccagaagtgcctggcgctcggcatgtcccacaacgctatccgctttggaaggatgccggaggccgagaagaggaagctggtggcggggctgacggccagcgagggatgccagcaaaacccccagctggccgacctgaaggccttctccaagcacatctacaatgcctacctgaaaaacttcaacatgaccaaaaagaaggcccggagcatcctcactggcaagtccagccataacgcacccttcatcatccacgacattgagacgctgtggcaggcagagaagggcctggtgtggaagcagctggtgaacgggccgcsgccctacaacgagatcagcgtgcatgtgttctaccgctgccagtccaccaccgtggasacagtgcgggagctcaccgagttcgccaagaacatccccaacttcagcagcctcttcctcaacgaccaggtgaccctcctcaagtacggcgtgcatsaggccatctttgccatgctggcctccattgtcaacaaagacggactgctggtggccaacggcagtggcttcgtcacccatgagttcttgcgcagtatccgcaagcccttcagtgacatcattgagcccaagttcgagtttgctgtcaagttcaatgctctggagctggwcgacagtgatctggcccttttcattgccgccatcattctgtgcggagaccggccaggcctcatgaacgtgccacaggtggaagccatccaggacaccatcctgcaggctctagaattccatctgcaggtcaaccaccccgacagccagtacctcttccccaagctgctgcagaaaatggccgacctgcggcagctggtcactgaacacgcgcagatgatgcagtggctgaagaagacggagagtgagaccttgctgcaccccctgctccaggagatctacaaggacatgtactaaggctgcacgcagccagcctcccgcagctccgctgggcccagccacggactgttcagaggacccgcccacaggcactggccacagcccacgcagctagagccactcacaacactccagacacggcccagactctcaccctctccgcccgccctcggcamccggttctccccagcacttcctgttcatgctswcwssccagcacccttgctcctccacctggccttctctagcatcctgcgcctccccgcctgtccccacatctgtctgattcacgccagtgagcccattagtccgctcaccagcagcctagaagcagtgaggcctgcactggcccggccctgcctgtctctgtcccctcttcaaggacatgagccatccaaagaaacactatgttctctctgagtccgactttccaagaaacttgcctggactgactgccatcccaggctgtctgaaccctaggcaccccwcgtsycactctgacactctcctttcttcctgcctgtgttctangccattgtcactgatggcccttgtgctgccctggagttgtcccctccgcaggggtccaacagccccactgaagggaaggggtgt

SEQ ID NO: 2263 - DNA, 1519 bp, Rattus norvegicus
cgccgagcacaaacccagcgagcattgaacactgcacacggccatctgcccagagagctgtgaccaccacttccgctactatctactcagaaagtcgtgactactgagccactgctgcctgcccagattctcatccaccgcctgctgcgtctggttgcgatgccggagttcctaactgttgtttcttggccgttcctgatcctcctgtccttccaggttcgcgtagtcgctggagccccccagccatggcactgtgctccctgcactgctgagaggctggagctctgtccacccgtgcctgcttcgtgccccgagatttctcggcctgcgggctgtggctgctgcccgacatgtgccttgccactgggtgctgcctgtggtgtggccactgcgcgctgcgctcagggactcagctgccgtgcgctgccaggggagcctcgacctctgcatgccctcacccgtggccagggagcctgtgtactagaacctgccgcacccgccacgagcagcttgtccggttctcagcatgaagaggcaaaggctgctgtggcctctgaggatgagcttgccgagagcccagagatgacagaggaacagctgctggatagcttccacctcatggccccatcccgtgaggaccagcccatcctgtggaatgccattagcacctacagcagcatgcgggcccgggagatcactgacctcaagaaatggaaggagccctgccaacgggaactctataaagtgttagagagattasstgccgctcaacagaaagcaggagatgagatctacaaattttatctgccamactgmrrcaagaatggattttatcacagcaaacagtgcgagacatctctggatggagaagctgggctctgctggtgtgtctacccatggagtgggaagaagatccctggatctctggagaccagaggggaccccaactgccaccagtattttaatgtgcaaaactgaaagttgtttcctccctccttcttcacacaaaatatttaagtatatagtgtatttatactccggagcacaccattttatatatgtgtatatgtatatatccaggaactagtttttatactccacatgctgcttgatgtacaagtgggtttgtatttattcactcyaagtttatttttttctaccctgtccttgtgcygtattaatttatataactgaagcttttctcatctccatacatgtaaatactamcatctcagctcttccagagttctgctttgaaagggcagcgcggtagtgcctagaacgagcacaagtcagtctgaggtaggggcctttcagtgggttcagggaggaaggttagccctggctcggggagacttcctcatcgaatcccacaggtctgtgtctgatgcctattggctgggaaggttccgatgttggttgtgtaatcaaagctaaacgtggaaagctgcgtcccatgcactgttaaacacacgtctggaataaaacattctacctggaaaaaaaaaaaaaaaaaaaa

SEQ ID NO: 2264 - DNA, 2015 bp, Rattus norvegicus
gcggcggcggtaccgagcctagcggtcgccgggactcgcgggcgcggatcgtagagcgtcgcgggcggggacggccgcccgaggcggcggcgtatcggttagcagacctcgcctccagcttgccggagctgaggacctagcggggccgcctccgggccagcctctccccgctctgccagccggccccggcgccgagggcgcggcgacgctcggccaccatgggctgcacactgagcgctgaggacaaggcggccgtggagcgcagcaagatgatcgaccgcaacctccgggaggacggagagaaggcagcgcgcgaggtcaagctgctgctgctgggtgctggtgaatccgggaagagcacaattgtgaagcagatgaaaattatccacgaggctggctactcagaggaagagtgtaagcagtacaaagcagtggtctacagcaacaccatccagtccatcattgccatcattagagccatggggagattgaaaatcgactttggagacgctgctcgtgcggatgatgctcgccaactcttcgtgcttgctggggctgcagaggaaggctttatgaccgcggagctcgccggcgtcataaagagactgtggaaggacagcggtgtgcaagcctgcttcaacagatcccgggagtaccagctgaacgattcggcggcgtactacctgaatgacttggacagaatagcacaaccaaattacatcccaacccagcaggatgttctcagaactagagtgaaaacgacgggaattgtggaaacccactttactttcaaagatcttcattttaaaatgtttgacgtgggaggccagagatcagagcggaagaagtggattcactgctttgaaggcgtgactgccatcatcttctgtgtggccctgagtgactatgacctggttcttgctgaggatgaagaaatgaaccggatgcatgaaagcatgaagctgttcgatagcatatgtaacaacaagtggtttacggacacatccatcatccttttcctgaacaagaaggacctcttcgaagagaagatcaaaaagagtcccctcacgatatgctatccagaatatgcaggctcaaacacatatgaagaggcggctgcgtatatccagtgtcagtttgaagacctcaataaaaggaaggacacaaaggaaatttacacccacttcacttgcgccacggatacgaagaatgtgcagtttgtgttcgatgctgtaacggacgtcatcataaagaataacctaaaagactgtggtctcttctaagctctgcagtggggtagtaaaaatgcattttcaaaccagacgwgtacttatatatggatctctctagattagagtctycyagcaacagagaatgtagtgtacagcaaatgcatsctggacctgaccagagttctgaccaaagytgttctgtatcgtgwctttaatagaaggacctttcgagaaggcgaaagatggtcctggagtgtgagarggagggttgatgttkaagctgkrgctctagkgtactgatgatttctgtgymagtgtamrtrtgsaamtgtmagatgtattyataacttctrakttcccacgttawgkktawgwwgwawgagyggcracttatggkcctagtgcgawrrctttgggaaaacataactsktaagkaccttgwacggmaygacagattggktstgwgtttgssagytttgatcagcwytatttatgttbktasmcctraatyttargcaccataaytwacattaggaaatgtcaacccccttaccctgattctatgtttacttatactcataaaatgttatttgtataaacgttgcacagactattttagtaccatgatttgtmtamagkyttktgwttcatrgggarmtmktwcwgaggttgcwkyacytymtktsrawmagwcwtttwwgcattgagagyattmggatttatttacagagtgcatgacgtgccgattctactttacatttgttttaaaaaactaaaattcca

SEQ ID NO: 2265 - DNA, 3197 bp, Rattus norvegicus
caaaagcagaggcttaaggaggtactagggggagactaggagcaagcaggccaaggcctggctggggcttggggggaggacacatggagcggtcccagtcccagcaacatggaggtgaacaaagctggtggggcactgccccccagtaccagtacatgcccttcgaacattgtaccagctatggactgccctcagagaatgggggccttcagcaccggccccgaaaggacctgggtcccaggcacaatgcccacccaacacagatatatggccatcacaaagaacaatattcatatcaggcacaggacaggggaatacccaagaagacggactccagttctactgtggacagcttggatgaggaccactattctaaatgtcaagactgtgtccatcgcctgggacgtgtgctgagaaggaagctgggggaagactggatctttcttgtgctcctgggcctactgatggctcttgtcagctggtgcatggactatgttagcgccaagagccttcaggcctacaagtggacctatgcccagatgcagcccagccttcctctacagtacttggcctgggtcaccttcccacttatcctcatcctcttcagtgccctcttttgccaactcatctctccccaggctgtgggctctggaatccctgagatgaagacaattcttcgtggtgttgtcttgaaggaatacctcacactcaaggcctttgtagccaaggtggtggccttgacagccggtctgggcagtggtatccctgtggggaaagagggtccctttgttcacattgccagcatctgtgctgctgtcctcagcaaattcatgtccatgttctctggtgtctatgagcagccatactattacactgacatcctgacagtgggctgtgccgtgggggtcggttgctgttttggaacaccacttggaggagtgctgttcagcatcgaggtcacctctacctactttgccgttcggaattactggcgaggattctttgcagccaccttcagtgcctttgtgttccgcgtcctggcagtgtggaacaaggatgctgtcactattactgctctgttcagaactaatttccggatggatttcccctttgacctgaaggaactcccagcttttgctgtcattgggatttgctgcgggttcttgggagctgtttttgtttatctgcatcgccaagtcatgctcggtgtccgaaagcacaaggctctcagccagtttcttgctaagcaccgcctgctctatcctggaatcgttacttttgtcatcgcctcactcacctttccaccaggaatgggtcaattcatggctggagagctgatgccccgtgaagctatcagcaccctctttgacaacaacacatgggtaaagcacataggtgatcccaaaagcttgggccagtcagctgtgtggattcacccccaggtcaacgtggtcatcatcatccttctcttcttcgtcatgaagttttggatgtccattgtggccacgactatgcccataccctgtggaggcttcatgcctgtttttgtgctaggagctgcctttggaaggctggtaggagagatcatggccatgctgttccctgagggtatcttatttgatgatatcatctataagatcttaccagggggctatgcagtgattggagcagcagctttgacaggggctgtctctcacacagtctccacagctgtgatttgcttcgaattaactggtcagattgctcacatcctgcccatgatggtggctgttatcttggccaacatggtggcccaaagtctgcagccctccctctatgacagcatcatccaggtcaagaagcttccctatttgccagaccttggttggaaccagctcagcaaatttacaatttttgttgaggacatcatggtacgtgacgtgaagtttgtttcagcttcttgtacatacggggaactaagaaacctactccagaccaccacagtcaagactttaccattggttgactccaaagattcaatgatcctgctaggctctgtggaacgctcagaactgcagtccctcctgcagcgccacctgtgtgcagagcgaaggttgaaggctgcccaggacatggctcgaaagttatcagagctgccctataatggccaggctcagctggctggggagtggcatcctggtggtcgacctgagtcctttgccttcgtagatgaagatgaagatgaggacgtctcccggaagacagagcttccacagactccaactcctcctcctcctccccctcctcctctgcctccccagtttcctattgctccatcataccctgaagagcctaacgggccactgcccagccacaaacagccccctgaagcttcagactctgcagatcaaaggtcctccatcttccagcgcctgctgcactgcttactgggcaaagctcactccacaaagaagaaaataacccaggattcaacagatttagtggataacatgtcacctgaagagattgaggcctgggagcgggagcagctgagccagcctgtgtgttttgatttctgctgcattgaccagtctcccttccagctggtggagcagacaactctgcacaagactcatacactcttctcacttcttggcctccatcttgcctatgtgaccagcatggggaagctcagaggtgtcttggcactagaagagctacagaaagctatcaagggccacaccaaatctggagtgcagcttcgccctccacttgccagcttccggaatacaacttcaattcggaagacccctggggggccaccccctcctgcagagagctggaatgtgcctgagggtgaagatggagctcctgaaagagaagtcatggttcctaccatgccagagactcctgtcccaccaccatctccagaggtcccttcctgcctggccccagccagagtggagggtgagctggaggaactggagatggtggggaacctagggcctgaggaggacctggctgacatcttgcatggccccagtctgcggtccactgatgaggaagatgaggacgagctgatcctgtgaacaacaccctccaagctttcttcataaaaaccacagggcccatgtcagagagtgggcttgtatatgaaatgggtgccctgaagttggggagacctccatttcatcgttgttcctaccccactatgaaag

SEQ ID NO: 2266 - DNA, 1954 bp, Rattus norvegicus
ggactctcactgggtggagactgaggtcaggttcttggctcttggcagaatcctctccactggccagcggttgcaaacatctaaattgacttcagtgaactcggtgactgcattgagtctaaacgcaggtgtgctgggccagcaatggatctgcctataaacttgacctccttttctctctctactccctccactttggaacctaaccgcagcttggacacggaagccctgcgcactagtcagtcttttctctcagctttccgagtgctagtcctgactttgctgggctttctagctgccgccacgttcacttggaacctgctggtgctggccaccatcctcagggtacgcaccttccaccgagtaccacacaacctggtagcatccatggctatctcggatgtgctagtagctgtgctggttatgcctctgagcctggtacatgaactgtctgggcgccgctggcagctgggccggcgtctatgccagctgtggattgcgtgtgacgtcctctgctgtactgccagcatctggaatgtgacagcaatagctttggaccgctactggtcaataacgcgccacctggagtacacactccgtgcccgcaagcgtgtctccaacgtgatgatcctgctcacttgggcactctccgctgtcatctctctggctccgctgctctttggctggggagagacttactcggagctcagtgaagaatgccaggtcagtcgcgagccttcctacaccgtgttctccactgtgggcgccttctacctgccgctgtgtgtggtgctctttgtatactggaagatttacaaggctgcgaagttccgcatgggctccaggaagaccaacagcgtctcccccatacctgaagctgtggaggtgaaggacgcttcacaacatccccagatggtgttcactgtccgtcacgccaccgtcaccttccagacagaaggggacacgtggagggaacagaaggagcaaagggcagccctcatggtgggcatcctcattggggtgtttgtcctctgctggttccccttctttgttacggagctcatcagtccgctgtgctcctgggatatccctgccctctggaagagcatcttcctgtggctgggctattccaactccttcttcaacccgctcatctacacggcgttcaacaggagctacagcagtgcttttaaggtcttcttctccaagcagcagtgagaggccacatgggagtgccttcttcccgtagcttgtagctcggtggactgtcctgcctcacaaacccctgtagtctgcccagctgtccagaggaacaagatccatctgccaagggcaccagggtcacatcagagctcagctcacttcagttctgtgcccgtgtgctggaaggtgtctcctataggctctggtagcttgtgtccccagtctgggcactcttcctcacactgtaccagcagccacaggcctggcccacaacgtgcccatttctcctccaactccactccagcgggaccatgagaagtttgatcagaacgaacaggaggaaggaagagagacaataaggcaggcagagagaggcagaaagaacaaggctgaaagccagtgggatcacatacctggaaccctcacaccaaggagacttaggcaggtagaacaggaatttggagccatcctgggctacatagtaagttcataaatcagtctgagctgtctgacacagacttagcaacagcaatgcactagagaggctatttgaaaagcagagaccataagggcaaacttccataacagcctcacttcacagttctgctctgtggtcctgcagtgtatggcccaattctgggtccttctgaatatctgatcacaagattctgtccccaaacatatcaaagcaccatcccatttgtgataacagtgattcctgtctttaccatttgttcattgtgaacccaaa

SEQ ID NO: 2267 - DNA, 4715 bp, Rattus norvegicus
gcaggtggagcgggcagggcgcggggcaccatgagcagcggcgccaacatcacctatgccagccgcaagcggcgcaagccggtgcagaaaacagtaaagcccgtccctgctgaaggaattaagtcaaacccttctaaacgacacagagaccggctgaacacagagttagaccgcctggctagcctgctgcccttcccacaagatgttattaataagctggacaaactctccgttctaaggctcagcgtcasstacctgagggccaagagcttctttgatgttgcattaaaatccaccccggctgacagaagtagaggccaggaccagtgtagagcacaagtcagagactggcaggacttgcaagaaggagagttcttgttacaggcgctgaatggctttgttctggttgtcacggcagatgccttggtcttctatgcgtcttccactatccaagattacctgggctttcagcaatctgatgtcatacatcagagcgtgtatgagcttatccatacagaagaccgagctgagttccagcgccagcttcactgggctctaaacccctcacagtgcacagactctgcacaaggagtagacgagactcatggcctcccacagccagcggtctactacacgccagaccagcttcctccagagaataccgctttcatggagaggtgcttcagatgccggctgaggtgcctgctggataattcatctggtttcctggcaatgaatttccaagggaggttaaagtatcttcatggacagaacaagaaagggaaagacggagcgctactccctccacagttggctttgtttgcaatagctactccacttcagccaccgtccatcctggaaattcgaaccaaaaacttcatcttcaggaccaaacacaaactggacttcacacctattggctgtgatgccaaagggcagcttattctgggctacacagaagtagagctgtgcaacaaaggatcgggatatcagtttatccacgccgctgacatgcttcactgcgcagaatcccacatccgcatgattaagactggagaaagtggcatgacagttttccggcttcttgcaaaacacagtcgatggaggtgggtccagtccaatgcacgcttgatttacagaaatggaagaccagattacatcatcgcaactcagagaccgctaacggatgaagaaggacgcgaacatttacagaagagaagtatgacactgccattcatgtttgccactggagaggctgtactgtacgagatctccagccctttctctcccataatggatcccttgccaatacgcaccaaaagcaacactagtaggaaagactgggctccccagtcaaccccgagtaaggattctttccaccccaattcccttatgagtgccttgatccaacaggacgagtccatctatctctgtcctccttcgagccccgcaccattagacagccattttctcatggactccatgagtgagtgcggcagttggcaaggcagctttgcagycgcaagcaatgaagctctgctgaaacacgaggaaatcagacacactcaggacgtgaaccttacactctctggaggcccctcggagctcttcccagataataaaaataatgacttgtatagcatcatgagaaacctagggatcgatttcgaagacatcagaagcatgcagaatgaggagttcttccgaaccgactcctccggtgaggttgacttcaaagacatcgacataacagacgaaatcctgacgtacgtgcaggattctctgaacaattcaactctgctgaattcagcttgccagcaacagcctgtgagccagcacctaagctgcatgctgcaggagcgcctgcagctggagcaacaacagcagcttcagcagcagcaccccactcagacactggagccccagcgccagttgtgtcaggtggaggtcccccagcacgagctgggtcagaaaacgaagcacatgcaagtcaatggcatgttcgycagttggaaccctgcccctcccgtgtctttcagctgtcctcagcaggaacgaaagcactatagcctcytctccggcttacaggggactgcacaggagtttccctacaagtcagaggtggacagtatgccttacacacagaactttgctccctgcaaccagtcactgctaccagaacattccaagggtacacagttggacttccctggaagggattttgaacgatccctgcaccctaacgyttctaatttagaagastttgtcagttgtttacaagttcctgaaaaccaaagacacgggataaactcacagtcagccatggtcagtcctcaggsgtactaygctggggccatgtccatgtaccagtgccaggcagggcctcagsacacccctgtggaccagatgcaktacagccctgagattccaggctcccaggcgttcctaagcaagtttcagagtccgagcattttaaatgaagcctactcggcagacttgagcagcattggccaccttcagactgctgctcacctccctcgcctggcagaagcccagcctcttcctgatatcacacccagcggattcctgtagctcsakgccaggatgaatttcagttcattcaggaacaggacaccagaactgtgagggttggacttcagtacgctttctccaaaacagatctcaatgctggtgtttggtgaaggagtttaagaccatattgctagttacctataaggtgggatgctctgaggggcacagggagcggccacgtgcattcacagagctccagcacctcggagtgcacagtgcttactgtggagaactcttggattctctgctcagtaacttcagctggaaaaacagtgaagtactctgagctttgaacttgtggattcttgttagtataccaaatacggagttacaggattaatcggttttctatttttaacctctgtttttgtcccagatgttaaaataaatggtttggtgcttttctcaaaagaaaatgttttccttctgcactgttaatataaaaskgcckcamgkttttgtttttgttttttttttctatctacctgtaacacagggtgtgtattttatatgaaatatttttatctcttttgaattaatattctttctacacacagaaagtttctcaaatcccaactttctttttttttaatgaatccaggcatgtttttactgcactactcatcccctttcttcagataaagggcaaaggataaatgaaagttaactatttattgtgtaatatacttgcttctgaacgttagatgttcctctgtgccttatgttgaaaaatttgaarataacatattgccaaaattatttaattactgcgtactattaagagagtagcaattgaattttaacagtgttttctgagaaatgagccctgctggctttccctgagacctccaagatgaaatcagaaggtcaccatagaaaatgctaaagatggctgtgcccattagcctgcagtgaagggaggtggcgcttgttaagctagttagctaaattaagcagagcactcatttcattgtctgaattctctttaaaaaactgtcttgggtctgtaatccttttcgttatattgactttataaattccacttctactagtggaactatagttttctcatattgaggagtgttaagattgaagatgcgtgttgtgcagtattatgactgaaatgaatggtgcattgtgtaaaggtaacgaacaaaataatctataaaatgttttcaggtttcacttaagaatagttcttacctcatatgcatatgttttttcagtgtatcttgttaagaaatcaaataatgaattgaggcttttgagctggcattaagataaagataagtacaattcacttccctccatacagtaagttgtttgtgtgatagaacctttgctaccaagatggctaatctgtcactccgccgaatgtagttctggaattcccaatgtcaacacaatgtaagcaaccaaaccaaacaacagagaaaacctcacatgaagaacttgctccacacggccaggtgacattttctgttgaatatggaaatgaaaaagagggtatagtaattagtctctttggaaactcttaaaaagtacacagcaacaattgtcagtatgctgcataaaaattcaaaatctgatgggttgaaagatgatggatttctttctagtatgttgcaaagaagggacaaggaacgatggtatctatattttgatcacaactctatgagtagggctctgtgtgtagaaggaactgaggtttaacaagattacttgtgtccaagtgatgatagaactttcttggttgctgtgtttcgttttgagacagggtcccactttgaatcgctgactggcccggaactctctgtgtagatgagtcaggctgctcttgaactcacagagctcctcctgcctctgcgccaccatgtccacctattagaaccttattgaggtagcaggtgtggagagttgaggtcatcagtgtctctagtccaagtgtaaggtgttatcagtgtgtagcagggtgggaaggagctcctgacttcgttacctgtgccgtggagtgtgacttagtcaggtgactcatattacaacactcaagctgcacacacatttggagggtaattgcccacagccagactaaagttgaattgtttattgttttttctgcctct

SEQ ID NO: 2268 - DNA, 2567 bp, Rattus norvegicus
askyamgggacacggaagaaacggggagcaaaatgaagggagagctgttgtgcgtcctgctgctttgtggagtggcgttcacgttgcctgaccagggrrtmcacaggaggttcagaagaggagctcggtcckwywsagcgacctgcagagatgaacagactcagacaacttaccaacagcatcagtcatggctacgtcccatgctcagaggcaatcgggtggaatactgccggtgcaacagcggcctggcacagtgccactcggtgcccktsmsargtygyagtgaaccgagatgcttcaatgggggtacgtgtcagcaggccctgtatttctctgacttcgtctgccagtgccctgacggatttgttgggaaacgctgtgmtatagrtamswgagcaacctgcttcgagggccagggcatcacctacagaggcacatggagcacagcagaaaatggggctgaatgcatcaactggaatagcagtgccctgtcccagaagccctacagtgcaaggaggccaaatgccatcaagctgggccttgggaatcacaattwytkcagrwammcagaccgagacgtgaagccctggtgctatgtctttaaggcagggaagtataccacggagttctgcagcacgccggcttgccstwmrggwscarctgaggactgctatgttggaaaaggtgtgacttaccgtggcacccacagctttaccacatccaaggcctcctgcctcccatggaattccatgatcctgataggcaagacttacacagcgtggagggccaactcccaggcacttggcctgggcagacacaattattscmggwasycagatggggatgccaaaccttggtgccacgtgatgaaggaccgaaagctgacatgggaatattgcgacatgtcyccatgctsyamskgcggcctgaggcaatacaaacagcctcagtttcgaattaaaggaggactcttyacagacatsacctcacacccttggcaggccgccatctttgtcaagaacaagaggtctccaggagagagattcctgtktggaggggtgctgatcagttcctgctgggtgctatctgccgcccactgstttgtmsasaggtwtsywccccatcatcttaaagtggtcttgggcagaacatacagagtggtccctggaraggaggagcagacattygagatcgaamagtacatagtccataaggaatttgatgacgacacttatgacaatswcmtygyawwactgcagctgaggtcagattccagtcagtgtgsccaggagagcagytctgtcggcactgcctgsctccctgamcccgacgtacagctycctgactkgacagagtgtgagctttctggctacggcaagcatsmkkcatyhhstsctttcttctctgaccggctgmasgaggstcacgtcagactgtatccgyccagccgctgtacctcacagcatctgtttaacamaaccatcacgagcamcatgctgtgtgcmggagacasccgaactgggggcaaccmasacgtccatgacgcgtsccasggwgamkcaggaggccctctggtgtgcatgatcgataagcggatgactttactgggcatcatcagctggggcctcggctgtgggcagaaggacgtgccagggatatacacaaaggtcactaattacctgaactggatccaagacaacatgaagcaatgacaaagaaagcccagctccttaaacccagaggacctgccttcctcttcctcttccacagaagatacgcctgaaaggccaagcgttcttcgcaggcwcgwsstcctgagctgccgctcagcagagggagtgacagtctttakgcacagacagmgtttactttgtgacaggtacttcacaaacttgtacgttttaagggtgaaggtctgactttagaatcagttctgtcagatgagmkgacagggaaatgccaaccttcctatractctargwttttaaaaagagaagtmgaccaaagtccacccttcctggaccactattttgtacaytgamccacaagatcgtgtctcaacagtgaaatwcmacttgatctttcaggagtaaaagtmtgcmctgaggacamgaatgtgtttywmtagttacacaggggcccagcatggcctccaaragaaggaaggggttasctgatcagaccacagccccctaaarcccttgaaatcaaatattccccatcctcccmcaatcctcaactcttggsscataycccyttgtacacagygtagaygtyytyttyttthtaaactttccagayggctgggmgaactgtatgatyyyaatattcgatgaaatgacrctagtatatttawatttgaatctatttagtttttmctgtgytactagaactctgtattatgctgtactsaaataataaattccaaggtatttttcmcmmwwwwwmamwrrwrmawawmwawwmaaykyctktkcyktttttctttgagtcaattgaaagacttcctttcatttagtcagcatgtggaaattctgcgtacccccaaggcaatatgctgggtgcca

SEQ ID NO: 2269 - DNA, 1271 bp, Rattus norvegicus
attcggcacgagggcggtccgtcccggcgaggtgacrgcmcrasswsgasgccaggcccagccgacsccgccatgagcgccgctcttktcagcctagacagcccagcacgcggcgcaccytggcccacagagcccgcgscvttstacgagccrggcagggtgggcaagccaggacgagggccggagcctgggratctgggggagccgggctccacgacccbtgccatgtatgacgacgagagcgccatcgacttcagcgcbtacattgattccatggctgccgtgcccaccctagagttgtgccacgaygagatcttcgccgacctcttcarcagcaatcacaaagcgrccggcgcgggcagcctggagctgctgcagggcggcchtacgcgacccccgkgtgtggggtcaatcgccaggggcccgctgaagcgcgaacccgactggggcgacggcgacgcgccgggctccctgctgccggcgcaarwrgcagtgtgcgcgcagacagtggtragcttggcggscgcsgsacagcccacaccacccacttcgcccgagcctcctcgaggcagccctggaccgagccttgcgcctggccccgtccgagagaagggcgccggcaagasgggtccggaccggggcagccctgagtaccggcagcgacgcgagcgcaacaacatcgctgtgcgcaagagcmgggacaaggccaagcgccgcaaccaggagatgcagcagaagctggtggagctgtcggccgagaacgagaagctgcatcaksgtgtggagcagctcacccgggacctggccagcctccggcagttcttcaaagagctgsccagcccgsctttcctgccgcccaccggcacmgactgscggtaacgcgcggtgtgggccttagagactccgaacgaccgatacctcagaccccgacggcggggagcasacgccgsccsaatkgctacagtttcttgggcactsswctgcsagagaagctawatgaatcccccttaaattakttttttawaatggtagcgttttctacgtcytattaccattgcagctaaggtacattgtagaaaagacttttccgacagacttttgtagataagaggaagagactgcgcatgcttttyatattcatttttacagtatttgtaagaataaagaagcatttaaattgcaaaaaaaaarwrrmammarmwmwdrmkgscctcktkctaggctacggtgatcctgagcatcttttgttacctgctggtagaaatgatcct

SEQ ID NO: 2270 - DNA, 3435 bp, Rattus norvegicus
gagaaggggtgcccgctccttgcgtcgtctccgtgctcccggctcctcactccttccccctcctcctcgcctcctccctccccgcccccacctccttcctcctctccgaagggctggtaacttgttgtgcggagcgaacggcgacaacgacgccgcgacggaggcaccatccgggcgggcagcatgggcacgtccgcgcgttgggcgctgtggctgctgctcgcgctgtgctgggcgccccgggacagcggcgccactgcaagcgggaagaaagccaaatgtgacagctcccaattccagtgcacaaatggtcgctgcattactctgctgtggaaatgtgatggagacgaagactgtactgatggcagtgacgagaagaactgtgtgaagaagacatgtgctgagtcagacttcgtgtgcaaaaacggccagtgtgttcccaacagatggcagtgtgatggggaccctgattgtgaagatggttctgatgaaagcccagaacagtgccatatgagaacatgccgcataaatgaaatcagctgtggcgcccgttctactcagtgtatcccagagtcctggagatgcgatggtgaaaatgattgtgacaatggagaagatgaagaaaactgtggcaacattacatgtagcgcggatgagttcacttgctccagtggccgctgtgtctccaggaactttgtgtgcaatggacaggatgactgtgacgatggcagtgatgagctggactgtgctccaccgacctgcggtgcccacgagttccagtgcaggacctcctcctgcatcccgctcagctgggtgtgtgacgatgacgcagactgttccgaccaatcagacgagtctcttgagcagtgtggccgtcagcctgtgatacacaccaaatgtcccaccagtgagatccagtgtggctctggcgagtgcattcacaaaaaatggcggtgtgacggagacccggactgcaaggacggcagcgacgaggtcaactgtccttctcgaacctgcagacctgaccagtttgaatgtgaggacggtagctgtatccatggcagcagacaatgcaacggcatccgagactgtgttgacggctctgatgaagtcaactgcaaaaacgtcaatcagtgcctgggccctggaaagtttaagtgcagaagtggggaatgcatagacatcaccaaagtatgtgaccaggaacaggactgcagagactggagcgacgagcccctgaaggagtgccatatcaacgaatgcttggtcaataacggtggctgttcccatatctgcaaagacctagtcataggttatgaatgtgactgtgcagctgggtttgaactgatagacaggaaaacctgtggagatattgatgaatgccaaaatccggggatctgcagtcaaatttgtatcaacttaaaaggcggttacaaatgtgaatgtagtcgtggctatcaaatggatcttgccactggcgtgtgcaaggcagtaggcaaagagccaagtctgatcttcactaatcgaagagacatcaggaagattggactagagaggaaggaatacatccaacttgtagaacaactaagaaacacggtggctctcgatgctgacattgcagctcagaagctattttgggctgatctaagccaaaaggccatcttcagtgcctcaattgatgacaaggttggtagacattttaaaatgatcgacaatgtctataatcctgcagccattgctgttgattgggtgtacaagaccatctactggactgatgcggcttctaagactatttcagtagctactctagacggaaccaagaggaagttcctgtttaactctgatttgcgagagcctgcctccatagctgtggatccgttgtctggctttgtttactggtcagactggggtgagccagctaaaatagaaaaagcaggaatgaatggatttgatagacgtccactggtgacagaggacatccaatggcctaatggaattaccctcgaccttgtcaaaagccgcctctactggctggattccaagttgcacatgctctctagtgtggacctgaatggtcaagatcgtaggatagtgctcaagtctctggagttcctagctcatcctcttgcactcaccatatttgaggatcgtgtctactggatagatggagaaaatgaagcagtgtatggtgccaataaattcactgggtcagagctggccactctagtgaacaatctcaatgatgcccaagacatcattatctaccatgaactcgtccagccttcaggtaaaaactggtgtgaggaagatatggagaatggaggatgtgaatatctctgcctgccagcaccacagatcaatgatcactctccaaaatatacctgttcctgtcccaatgggtacaatcttgaagaaaatggacgcgagtgtcaaagtacttcaactcctgtcacttacagtgagacaaaagatgtcaacacaacagacatcctacgaactagtggacttgttcctggagggatcaatgtgaccacagcagtatcagaagtcagtgttcccccaaaagggacttcagctgcctgggccatccttcctctcttgctcttagtgatggcagcagtaggtggctacttgatgtggaggaattggcaacataaaaacatgaaaagcatgaactttgacaatcccgtgtacttgaagaccactgaagaggacctctcaatagacattggtagacatagcgcytctgtaggacacacatwcccagcaatctcagttgtaagcacagatgatgatttggcttgagttctggaacaagtcttgctctatgaggtctacacccataacaccctactccggaatggtaacagagccagcagcwsrmgkttctttttcttcctcccatctggaagaacwtcaagatatcttttcgtggatcaagcttgtgtacttgatcatttttatattacttttgtaaatattcttggccacgttctacttcagctttggatgtggttaccaagtatctgtaacccttgaatccctagacagtattgccatctctggccaaatatgcactttccmtagaaagccatattccagcaatgaaccttgtgctatagtgactcccacctgtacatatactgtataggccacctgtacatatcccagaraacaatcactattcttaagcactttgaagatatttctatgtaaattattgtaaactttttcaatggttgggacaatggcaataggataaaacgggttactaagatgaaattgccaaaaataaatttgtaactaattttgtacggatgaatgaaacctttgacctctgtagaggtttgcaaagactgaattcaaactactgtacattttttttcaagtgctaaaaaaaaattaaaccaagcagcttaaaaaaaaaaaaaaaaa

SEQ ID NO: 2271 - DNA, 1578 bp, Rattus norvegicus
ggaccgagcccttgttctggcattctcccaggaggatgcagaaaaggggctgacccaacattctgcagagaatttcatccagttccttcctgcatcctgatcccacgtgccagggagatggagccacacttgctgatgttggggtttctctcattcaccatagtacccggctgttgggcagagctgtgtctgtatgacccaccggaggtccccaatgccacgttcaaagccctctcctacaagaacggcaccatcctaaactgtgaatgcaagagaggtttccgaagactgaatgagctggtctatatggcttgtctaggaaactcctggagcaacaactgtcagtgcacaagcaactcccatgacaactcaagagagcaagttacacctcaacctgaaggacagaaagagcaacagaccacggacacgcagaaatcaacacagtctgtgtaccaggagaaccttgcaggtcactgcagggagccccctccttggagacatgaagacaccaagagaatctaccacttcgtggaaggacagatagttctctacacgtgtattcmrggatacaaggctctacagagaggtcctgctatcagcatctgcaagacagtgtgtggggagataaggtggacgcatccccagctcacgtgtgtagatgaaaaagaacaccatcaatttctggctagtgaagaatctcaaggaagcagaaattctttcccagagagtgaggcttcctgtcccacccccaacacagacttctcacaactcacagaagcaactacaactatggagacattcgtgttcacaaaggagtatcaggtagcagtggccagctgcatcttcctgctcctcagcatcctcctcctgagtgggttcacctggcaacatagatggaggaagagcagaagaaccatctagcaagctagaacagttggagcccaagggaagatgatggactcatgaagctcaagaaacacctgaggggtcaaacgtgcactcgacgggtgcctgtctcctttcgatccctcgggtcctggaaagttatgaagtcccgagacacaatggcacatcgggaaatagcaacttcatcactaaaccgaactttccattgaagaataggatctgaccatttcagtgcagcagttctaaagctttaacgggagggagggcccaacggtgcctgtgtgttttgttttgtgtacatgtgttgatgggagctgcgatggtgtggtcacttttcgtggaacacacaatatagaaaagttgctttatgttgacttcttttggagagcccagcactaatgtaaatactccctcctgctcttccttcctcttcctcttctcttcctccttactcctcccctggtccacccacctgcacccatctacttttcttcttcctttctgttctcacaaggtcatcctaggcatcatgtatggctggctcctttctcaacctctgtttgcctaactggttctttggatttcatcacttactgatcagttttttaaaactctgggctgacaatgaggactccatgtttttagaaggaaaccccctttccactgaagctt

SEQ ID NO: 2272 - DNA, 2422 bp, Rattus norvegicus
tgaccctgcttgctcaactctacgtcttgtttcgttttctgttctgcgccgttacagatccaagctcctcgagcccgggctgcaggaattctgcggccgccgcttagcagagctaagtgggacttcactggagccatggagctgctcaagctgaaccgcagcgtgcagggaccaggacccgggtcggggtcttctttgtgccgcccgggtgtctcccttctcaacagcagtagtgccgggaacctcagctgtgacccccctcgtatccgcggaaccgggaccagagaattggagatggcgattagaatcaccctttatgcagtgatctttctgatgagtgttggcggaaacgtgctcatcatcgtggtcctgggactgagccgacgcctaagaacggtcaccaacgccttcctgctctccctggcagtcagcgacctcctgctggccgtggcttgcatgcccttcacactcctgcccaacctcatgggcacattcatcttcggcacagtcatctgcaaggccatttcctacctcatgggggtatcagtgagtgtatccactctaaatctcgtggccatagccctggagcgatacagcgccatctgccgaccactgcaagcacgagtatggcaaacacgctcccacgcagctcgggtgatcttagccacgtggctgctgtctggactgcttatggtaccctaccctgtgtacaccatggtacagccagtgggacctcgagtgctgcagtgcatgcatcgctggcccagtgcacgtgtccaacaaacctggtccgtgctactgctactgcttttgttcttcatcccgggtgtggttattgcggtggcctatggactcatctcccgcgaactctacctaggactccactttgatggtgaaaatgacagcgagacccaaagccgggcccgaaaccaagggggcctgccgggtggggcagcaccagggcctgtccaccagaacgggggctgccggcctgtaaccagcgtagctggggaagacagtgatggctgctgtgtgcaacttccgcgttcccgactggagatgacaacgctaaccacacccactcctgggccagtccctggccctcggcccaaccaggccaagctgctggctaagaagcgggtggtgcgaatgctgctagtgattgttttgcttttcttcctgtgttggctgccagtgtacagcgtcaacacgtggcgcgccttcgatggcccaggcgcacaacgagcactctcaggggcccctatctctttcatccacttgctgagctacgtctctgcttgtgtcaaccccctggtctactgtttcatgcaccgccgcttccgccaggcctgcctggacacatgtgcccgctgttgcccacgccctccacgagctcgcccacagcctcttccagatgaggatcctcctaccccctccatcgcttcgctgtccaggctaagctataccaccatcagcacactggggcctggctgaggggttgggagattggagaaagagacaagatacataattactatcaaatgacccatccaaacacataagaaacaaaattcagaattaatcaggtgaacacccaacaccatggacagacccctacacacagaaaatagtatctttgctgccctacctgaaacagataggagtctcataggaaaggaggctcacttctgataaggggctgagtcccttcctagacatcttgcactgaccccattacatggacagacacaaggtccgtagcagtaaactttacctataaaggggaactctgacaagggctgattggctcctcatatgaacatattactgacactattctgtagtgcccatagcctagtgcagaagtgacttaggacattgtggctgttcccgtttgacttcattattgccttcctcatccagcactgaaattatcaaccacacgcctttcacctttcggagctgccgatcgttcagcactgaaaagtcccccccccccactcctttccattggagactgtggaaagtcctcttccctcctgcctmtcctccctcmccagaccacatcwtaaaaggataagtgacttrgtgycctcctggacttcttgaggtagktgaacaggtgtggtttatgggaagcttcttcatttattggctcccatgabtaatctaccccatakccamccttgtgcaaaaagsccagggtatgaagatagggatgagcgtaccctctcttggttgtcatcttggacctaaccatactccagtgatgtagtagctgggactcattgtggcaggtgggatggccatgacacttcatgactcctcgtttggtgccattgttaaagtacgacactaatgsccscctgttgattttttgatgaaaagwtaaargwtgaaggsctaaaaaaaaaaaaaaaaa

SEQ ID NO: 2273 - DNA, 1226 bp, Rattus norvegicus
cacgaggccacagccaggaatttgctgccacctctgagtcargcagggggtggggatgggggtgcacaatcccattagaaaatgcccagyacatttagtccgtgggagtcacatttcttatttggactagtgaagacagaagcaaaccakctyacttgtktcctgggacagwtgatttaggggatggctttcgcagagcaaacacctctgacccttcaccgccgggacctctgtagccgttctatctggctagcaaggaagattcgttcagacctgactgctcttatggaatcttatgtaaaacatcagggcctgaataaaaatatcaaccttgactcagtggatggtgtaccagtggcaagcactgatcgttggagtgagatgactgaggcagagcgactccaagagaacctccaggcttaccgtaccttccaagggatgttaaccaagctcttagaagaccagagagtacatttcaccccaactgaaggtgacttccatcaggcaatacatactcttatgctccaagtttctgcctttgcctaccagctagaggagttaatggtgcttctggaacagaagatccctgaaaatgaggctgatgggatgcctgccacagttggagatggtggtctctttgagaagaagctatggggcttgaaggtccttcaagagctctcacagtggactgtgaggtctatccatgaccttcgtgtcatttcttctcatcagatgggaatctcagcacttgagagccattatggggccaaagataagcagatgtarmmwttmgctcrtamctctgtctccctttttgatctaatgaaatattgatagttccctggagcctagttttctcagcatcaattttggaacactttagaccacatgcatttcatcaagtagggttgscccacatatgamtagatagatatacatggttattctggctatgcaaatgtgtgcacccattttggtttscattgggtggtataataaatggatggcccacctatccctttcammawarwarwrmhwwaaccttcctgatactaagtaaccttttcaggtgtttaacagtcttacaggcagaagagaaattgtaactcgttttggttgacttctgaaaagactgaataaacaaattggaagtcctaramwawmwwmawwmaaamwammmraawaaaaagagtattgttgtacagaggcaaaaaaaaaaaaaaaaa

SEQ ID NO: 2274 - DNA, 1493 bp, Rattus norvegicus
gtcaccgcactaattaaatgccatctgggtggctcctctgggttttttgagtccatcacccagttcagatcagtcagaggccaaggaggagaacatgatgatggacctttttgaaactggctcctatttcttctacttagatggagaaaatgtgactcttcagccattagaagtggcagagggctctcctttgtacccagggagtgatggtaccctatccccttgccaggaccaaatgccccaggaagccgggagcgacagcagtggagaggaacacgttctggctcccccaggccttcagccaccccactgcccaggtcagtgtctgatctgggcttgcaagacttgcaagagaaaatctgcccccacagatcgtcggaaagcagctaccctgcgcgaaaggaggaggcttaagaaaatcaacgaagcctttgaggccttgaagcgtagaactgtggccaaccccaaccagaggctgcccaaggtggagattctgagaagtgccatcaactacattgagcgtctgcaggacctgctgcaccggctggatcagcaagagaaaatgcaggagctgggggtggacccttacagctacaaacccaagcaagaaattcttgagggtgcggatttcctgcgcacctgcagcccgcagtggccaagtgtttcggatcattccaggggcctggtgataactgctaaggaaggaggagcaagcgtcgatgcttcagcctccagcagtcttcagcgcctttcttccatcgtggacagtatttcctcagaggaacgcaaactccccagcgtggaggaggtggtggagaagtaactcagtcagcatttggaacattcttcgctcagcaggaagagcccctttccgcctaatcatttagattagggctcacagaccccagaatttatgaaaggcaagagacttagtgttaaaaaagaaacctctccccacctcaagtgaaaatccttcggcttggggcttttattataactattattgtatctgaaccgmkrgtggcttagctctagaaccctaattttgtttttagtttggttggttttttataacatattaacttttgctatgatcacgtgaccctttcctgtcagttgcaaacgaagttcattcctgtctaaatcaaagtgggaacgtttaatcctaagagtatttaatgtacttttgtaaatagtcttagtactttcgtttttatgtaaacctaaargacatattttaaatgtggmattaagcattgtatataaaatgtgtgagagtctgatattgtwatattaaaatattaatacgtttcwamamrwaaaaacaaaaaaaaaaaaatgggagcggccgcaagcttattccctttactgagggttaattttaccttggcactggccgtcgttttacaacgtcgtgactgggaaaaccctggcgttacccaacttaatcgccttgcagcacatccccctttcgccagctggcgtaatagcga

SEQ ID NO: 2275 - DNA, 4409 bp, Rattus norvegicus
ccacgcgtccgatggggaagaagcagccgagggcagcagcaagtgctgctccaaactgtgagctaaaatcctattctaagagcacagatcctcaggtatctaccatggtgttggatcctgaagaaaagattccagacgatggtgcttctggggaccatggagactcggccagcctcggtgccatcaaccctgcttacagcaactcttccctcccacattccaccggggattctgaggagcccttcaccacctactttgatgagaaaatccccattcctgaggaggagtactcttgttttagtttccgtaaactctgggccttcacaggacctggttttcttatgagcattgcctacctggatccaggaaacattgaatctgatttacagtctggagcagtggctggatttaagttgctctgggtgctcctgctggccactattgtggggctgctgctccagcgtctcgcagctcgactgggagtggtcaccggcttgcaccttgctgaagtgtgtcaccgtcagtatcccaaggtcccacggatcatcctgtggctaatggtggagttggcaatcattggttctgatatgcaggaagtcattggctcagccatcgccatcaatctcctgtctgccggaagggttcccctgtatggtggagtcctcatcaccatcgcagatacttttgtatttctctttttggacaaatatggcttgcggaagctggaagcattttttggctttctcatcactatcatggccctcacatttggatatgagtatgttacagtgaaacccagccaaagccaagtactcaggggcatgttcgtgccatcctgttcaggctgccacacccctcaggtggagcaggcggtgggcatcgtgggagctgtgatcatgccacacaacatgtacctgcactctgccttagtcaagtctagacaagtgaaccgggccaataagcaggaagttcgagaagccaataagtacttcttcatcgagtcctgcattgcactctttgtttccttcatcatcaatgtctttgtcgtctccgtctttgctgaagcattttttgagaaaaccaatgagcaggtggttgaggtctgcagaaatagcagcagcccccatgctgacctctttcctaacgacaactctaccctggctgtggacatctacaaagggggtgttgtgcttggatgttacttcgggcctgcggccctctacatctgggcggtggggatcctggctgctggacagagctccaccatgactggaacctattctggccagtttgtcatggagggattcctgaacctaaaatggtcgcgctttgcccgcgtgatcctgaccaggtctattgccatcatccctaccctgcttgttgctgtcttccaagatgtggagcatctgacagggatgaatgatttcctgaatgttctgcagagcctacagctcccctttgccctcatccctatcctcaccttcacaagcctgcggccagtgatgagtgagttctccaacggaataggctggaggatcgcaggcggcatcttggtccttctcgtctgctccatcaacatgtactttgtcgtggtctacgtccaggagctagggcatgtggcactgtatgtggtggctgcagtggttagcgtggcttatctgggctttgtgttmtacttgggttggcagtgtttgattgcgttgggcctgtcgttcctggactgtgggcgctcggtaagcatctstaaagtcctgctgagcgaagataccagcggtggcaataytaagtaaacactgggtcagcctgtctgtctgtctttgcagggagccatcagagccagtgtgtttmtatggtttactgtgtgaacatagccacaagtatgtgccgttgcacrgactgcatttagggmccaactgttagttgggaaacactggggtgggtgtktggtgtgtgtgtgtgtgttgtttcctkctgtmwttgtcaaatagcatgctgmtattaartgsktggtgkccyaraacwmwrwrwarmmwargctgccttcaaacttacagcaatcctcctggctcagcctcctgggtgctgggattccaggcatgtctaccgctcctggctgtcacgagtgcttacaagatgactggttttgtcaggggaggtcttaccctgtagcattaggcagcaccttgaaaaggtgagccttgagctgttttgaacactaaattcctaaatagctgtccaaggccatggctcggttttagttctgagaaacccaaccagactgttgtcatcatttgaattgcagaattagagaccgctatttttgagttcaggatttctgtttgtttggtgcatttcattttgtttttcaagacaagggtttcttccttgttgtcctggaacttactctgtagaccagcctggctttgaactcacagagatcctcctgcctctgcctctgcttcccgactgctaggattagaggcatacaccaccactgccctgctaagctcagagttttttatttctactttggaattcctcagtggaaagaaaggtagagcaggagagggggtgtggtcaagtgatggctcccctccaggtccttgcaggtttaccttaaggagtggagcttagcagggcttcatctgtagtcctgaggctagtgacttccctgttaatagcaagcatcccgatagtgtttcatctcgagtacacacagtcctggaatctccgccttcctctcctgagagagtgcggatggcaaaagactactgtagcacttgtgaactggctcacagcaaatcccagagctgaccgcactactcccgaaagtacccttcaccaaatcttggctctgacccaccgctgtttsatgcccaagataactcagaaggcaacctcaggagctctggacccaaaccttgcaaagtcagyagttgtcactgtgatgcraagtcctctccctgcaaggtgggactaggctgcctcctcacagcccttccctmggagagaaagcctcttgagaccaggctgcggagctctggagattcagcacgggactacagaactgctgctctcagttcagccacttctgtcctggcacgtgggagacatgattctgtcacatcaagtcctgtctgtttgctggaaaggaataatacaagtttgtataatcattgccttggtggcaacaggagctacagtgacttcraaggatgtcgtcctctttgccgctttcccagtkcgactgtcccgacaaatgacctgcrttgtggtgccactgtggcattagtgctagcatttcacacagtcagaagctcagcctgcatagagtcctgtgaggcatgaagggtaaatgcagtttcactcagcmtggttgacctcagccccacagctaacacaacacagtcaggccgcgggtccctcactgcggcattctcaacccctgggttgccacccatttgcagcccctatatccaaaaccatttacattatgatttataacagtagcagcattagttgtgaaatagcaaagattttatggttgggggttaccaccacaaagggtcgcagcagcaggaagtttgagaaccctgcaccacagggtccatctcacacctgcctctgccaccattgttcccaaaactgactggaaactgagcttttgaaactgtctcgatgtggtgcttgaggsccagattgacagtagcagaattactggaatggatgctmtagtgacatctgcrtttgtacaggggcgggrttgggcggggcggggcggggttgggcagggtgtgttcagagtcactgtacttacagtccagcccagagctgmtggcagtcatgcccaggggtctgcyttgtgcgtgctagcaaggctgtgctgcagakctcacttcytgccccagarttckgcwskagtatgttcgtttacagtgatagacggttccaytgtgtacgrcggtctctgactctatgcstacagtatttacagtgtcaaagattaaaagtgtcgcctgtcmawwwrrmmrwmahwrrraaacartgcttccaacagtgctctgtacgtaacctgtaagcatttcaacccygccacgccagtgtggcctggcgttacgttggcgagccatcttgtacgttctcacttggtcctcgttcttctgcgacctgaaatagttgttccctctgctctgggagctggyggctggggaacagcagcagcttgtcttgtaaggtcctgccaggagggcaacaagtgactayaaggaggctgttagtgagcctctgacagcttgtgaacttgctgtaattaaaacaaaaacttccctgttwaaaaaaaaaaaaaaaaaaaaaaaaaaaaaaaaaaaaaaaaaaaaaaaaaaaaaaaaaaaaaaaaaaaaaaaaaaaaa

SEQ ID NO: 2276 - DNA, 2635 bp, Rattus norvegicus
gccaagcagcgttgggcgatatcagatatccgttctatttatttttacctaaggaaaaactccagctctcttcccactcccagctgccttgccacccctcccaaccctcggcttgccctccacctggcctgctgggagtcagagcccggcagaacctgtttagacatatggacaagaatcccagcgctacacagcacacagtccgctacttcgtcccggggttgccagcgcttcctgggagtcctgaagctcacacagcgcagtgagttcatgcaccctcttgccaagcctcagtctttgggatctggggaggacgcctggttttcctccccctttctactggggtctcctccttgccaggcctccccagtcccctggcctcgttcctgggttcacacatgaagatgcacttacaaagggctctggtggtcctggccctgctgaacttggccacagtcagcctctctctgtccacttgcaccaccttggacttcggccacatcaagaagaagagggtggaagccattaggggacagatcttgagcaagctcaggctcaccagcccccctgagccgtcggtgatgacccacgtcccctatcaggtcctggcactttacaacagcacccgggagttgctggaagagatgcacggggagagggaagaaggctgcactcaggaaacctcggagtcagagtactatgccaaagagatccataaattcgacatgatccaggggctggcggagcacaatgaactggcagtctgccccaagggaattacctctaaggttttccgtttcaatgtgtcctcagtggagaaaaatggaaccaatctgttccgggcggagttccgggtcttgcgggtgcccaaccccagctccaagcgcacagagcagagaatcgagctcttccagatacttcgacctgatgaacacatagccargcagcgctacataggtggcaagaatctgcccacgagaggcaccgcagagtggctgtccttcgatgycactgacactgtgcgcgwgtggctrttgcggagagagtccaacttgggtctggaaatcagcatccactgtccatgtcatacctytcagcccaatsgmgacatactggaaaatgttcacgmggtgatsgaaatcaaattcaaaggagtggacaacgaagatgaccatgsccgtggagacctggggcgtctcaagaagcagaaggatcaccacaacccgcacctgatcctcatgatgattcctccacaccgactggacagcccaggccagggcgggcagaggaagaagagggccctggacaccaattactgcttccgcaacttggaggagaactgctgtgtgcgccccctctacattgacttccggcaggatctaggctggaaatgggtccacgaacctaagggttactatgccaacttctgctcaggcccttgcccttacctccgcagctcagacacaacccacagcacggtgcttggactatacaacaccctgaacccggaggcatcggcctcgccatgctgtgtgccccaagacctggagcctctgaccatcttgtactatgttggcagaacccccaaggtggagcagctgtccaacatggtggtgaagtcgtgtaagtgcagctgaggccagtctgcaacagaggaggggaaactgccaccaccgactgctgctccttggaaaaccaaagcaacagacctcaccctagagcctggagcccacaagccctggctcccgatggcgaaaggccgagagggaggcttccttctggaacatttctttctgctagctctgagaatcactgtggtaaagaaagtgtgggttggttaggggaaggcaaactggtgagaacatggatttctgtggtgcaggcagaggtggtsrsgwrgagaagagataatgagtggacgttgtgagtggcaaggctccggctaccctagggaagatgaagggcagagtggtcaggtgaaggccagactggaaggcacttcagatatgaggtcagctttgctcatggcagtacatctgctctagggaatcgggatgttgttaaaggcaacagcatttttcttcagtttaccaagccaaagtcccctggaattgkatsttgaactgcctggaattaaggmcaatckgywckkttgcaaacagtcttttcmcctcgatcagcatcatgagtcattacagataatgtaattagtttytgggccagcaactagctatctcaggtccctcararatgctggactcaaaggcagaggtcagaattggttctctcatgtattccctsgggccccctccttctgccttccttcttggccgtatttccccttggacatttggctaracaccttccgggtcagggkscmttctctggatyctggaycccacacagcmtggggcatcagacatcgtttycctcctrccctagaccccgkgcctccccgggtsttcctsgaagcaggtgmtacatgcaggagttatccggggagcctcccatgtytsacatgatgactcggccccaratgcacagactgaagtatacagacaaatacaaatattactctcagaatctttgtataaataaatatttttggggaawmwwrraaaaaaaaaaaaaaaaa

SEQ ID NO: 2277 - DNA, 2535 bp, Rattus norvegicus
cgcccggggagccacgggcggccaagcccgagagccgcccgagccgctcggactcaagcgctcgcgcgggcccgaggcagcccagccgccggcggcgcgtggggagggggaagcccgagcccgcgctcccgaccaaagtgaactttaatcgggaaggttggatgcggagcccgggcggcaggacctgctagaagtagctgaagatgaatccccagcagcagcgcatggccgcgatagggaccgacaaggagctgagcgacctgctggacttcagtgcgatgttttctccacctgttaatagtgggaaaacgagaccaacgacactgggaagtagtcagttcagcgggtcaggtatggatgagcgtggaggaacaacgtcttggggaacaagcggtcaaccaagcccctcctatgattcatctagaggttttacagacagcsctcattacagtgatcacttgaatgacagtcgattaggaacccatgaaggcttgtccccaacacctttcatgaactcaaatctgatagggaaaacctcagagagaggctcattttccctgtacagcagagactstggattatcaggctgtcagtctagtctcctgagacaagatctaggactcgggagcccagcacagttgtcttcttcaggaaaacctggaacaccatactactcatyctctgccacaagttctagaagaagaccgctccatgattctgtagctctagatcctttacaagcaaagaaagtaagaaaggtgcctcctggcctaccttcttctgtgtatgcaccatccccaaattctgacgatttcaaccgtgaatctcctagttacccatctcccamgmsrccaaccagtatgttcgctagcactttctttatgcaagatggcacycacagttcttctgacctttggagttcatcgaatgggatgagccagcctggttttggtggaattctggggacctccacttcccacatgtctcagtccagtagttatggcagtcttcattcacatgaccgcttgagttatcctccacactcagtgtcaccaacagacataaacacaagtcttccgccaatgtccagcttccaccgtggtagtaccagcagctcaccatatgttgccgcctcacatactcctcccatcaatggatcagatagcatcctgggaacccgagggaatgctgctggaagctcacagaccggtgatgcacttgggaaggccttggcatctatttattctcctgaccacacaagcagtagttttccatcaaacccatcaacaccagtaggatctccttcacctctcacagcaggtaccagtcagtggcccagagctggagggcaagctccttcatccccaagctatgaaaactcacttcactccctgaaaaatcgagttgagcagcaacttcacgagcatttgcaagatgcaatgtccttcttaaaggatgtctgtgagcagtctcgaatggaagaccgtttrgacaggctggatgatgctatccatgtgctacggaaccatgcagttggaccttctaccagtctgcctactagccacagtgatatacacagtttattgggaccatcccataatgcaccaattggaaacctcaattcaaactatggaggatcaagccttgttacaaatagtcgatcagcttcgatggtcggracycatcgggaagattcggtcagtctcaatggcaawcattcggtcctgtctagtactgktgctgcctcaaacacagaactgaaccataaaacaccagaaagtttcagaggtggtgtacaaaatcagtctggaagtgttgttccaammgaaatcaagactgaaaacaaagaaaaagatgaaaaccttcatgaacctccttcatcagatgacatgaaatcagatgatgagtcctcccagaaagacatcaaagtctcatctagaggcagaacaagcagtaccaatgaagatgaggatctgaatccagaacagaaaatcgaaagggagaaggaaaggcggatggctaacaatgccagagagcgcttgcgtgtgcgggatatcaatgaggcattcaaggagctcggccgaatgtgtcagcttcatttgaagagtgagaaaccacagacaaaacttctcattcttcatcaagccgtggcagtcatccttagtctagaacagcaagtcagagagaggaacctcaaccccaaagcagcctgccttaagagaagagaagaagaaaaggtctctgctgcgtcagcagagccgcccaccacgttgccaggaacccatcctgggcttagtgagacaaccaaccctatgggtcatctgtaaacatcagccagttccagagtcatcagtaggctagatagaaggtgacctctcctcataaagatttggagaactcagattatctgaagacacaaacctggcaggagggagaagaaaaagcaaaacacttgaaacaagaaactcatatgtaatcctatgatcaaagcaactggtcaacacttccatcagaagtgaggataggaagctgcgg

SEQ ID NO: 2278 - DNA, 2343 bp, Rattus norvegicus
tttttttttaggagcccgcgcctcggtttcagcggacgcttcccctgatctccgttctaccaccatccactgccgtcttaccacccaccatggccctcctgcackscggtcgcgtcctctccgggatggctgctgcctttcacccaggccttgcagccgcagcctctgccagagccagctcctggtggacccatgttgaaatgggacctccagatcccatcctgggagtgaccgawgccttcawgagagataccaacagcamgaagatgaacctgggagttggtgcctaccgggacgataacggaaagccttacgtgctccccagtgttcggaaggcagaggcccagattgctgggaaaaatttggwcaaagaatacctacccatcgggggactggctgatttttgtaaggcttctgcagaactggccctgggcgagaacagcgaagtgttgaaaagcggccggtttgtaactgtgcagaccatttccgggactggagccttgagggtcggagccagctttctgcaaagattttttaagttcagccgagatgtctttctgcccaaaccatcctggggaaaccacacgcccatcttcagggatgccggcatgcagctgcaaggttatcgatactatgaccccaagacttgcggctttgacttctctggagccttagaagacatatcaaaaatcccagagcagagtgttctccttytgcacgcctgcgctcacaaccccacgggcgtggacccgcgtccagagcagtggaaggaaatggcggcggtggtgaagaaaaagaatctcttcgcattctttgacatggcctaccaaggctttgccagcggcgatggtgataaggacgcctgggccgtgcggcacttcatcgagcagggcatcaatgtctgcctctgccaatcctatgccaagaacatgggcctgtacggtgagcgtgtgggagccttcactgtggtstgcaaagatgcagaagaagccaaaagggtggagtcacagctgaagatcctgatccgccccttgtattccaacccgcctctcaatggagcccgratcgccgcaaccatyctgayktctssagackkscggaagcaatggttgcaggaggtgaaaggcatggctgaccgcatcatcagcatgaggacccagttggtctccaacctgaagaaagagggctcgtcccacaactggcagcacatcaccgaccagatcggcatgttctgcttcaccggcctaaagcctgagcaggtggagcggctgaccaaggagktctyagkctacatgacaaaggatggtcgratctctgkggccggggtcacctctggcaatgtgggctamctggcccacgccattcaccaggtcaccaagtaatcaccaggtgcaaggaaacagagatcacwkkccyttcagcctttgctctcatgagagtcacgtgcarggtgargsaggrdkratggwskwgrgtaratcctgttttcaaccamsgtgcataactcctgtcgattgaacgcgttcctcggaaaagaggtagggcagaggcwcmsrcggctgatatctggaacttcgtcggctctaaaccaaactstcmctcatccktttktctccagcttttctkraagtttacacatgcaaaaaaatcacagcmccaaaacctgtcagcatggsataggcacargkcagaagctttacytgaagcctcaggkggtgtcaggggttcccctgtggaccccggtagagcctctcatattagaggctgtaagagaagaataactagttctgtcattaacagttgtsgagtgtgtcctcgtggtgtggagcaactgtgtcascagaccacattatgraaatkatgctktacaamaaccaacagkgacagtagaagatgtaatgkcwygwsrtggctgttctgtarcytggagtttcatcccattytactgctcggttgaccatcaacmtmatccttaggagtgatstaagawtaargaatgtagttkwtctgttmawrmmrwaammwwmwrwctcagcaaagarccggggagagtgggaccstgcccttgatttcagagtcctcttcagtgattgattggctcmkacgggggtggggcctctgcccagytggacgtcmtcattcatcctgactgcagcctgtcttcacatgagtcagacatgcaggktaggatcggaaggagctattctggggtttgtatgctaccagcccggmtcagamtcagccmttgggaaagataaccaccatmtgctctaaccgtgtagacgtacctggttttctctgtkacaataaarttaytacvgrcccraaaaaaaaaaaaaaaaa

SEQ ID NO: 2279 - DNA, 5918 bp, Rattus norvegicus
cgttgctgtcgggtgcagcgcgcaggaatgcagcccgcctgactcaccagcgcctccttcctacctgcgccgcccgtccataaagcactgctggtcccgcccgccgccgcccgacaagctgtccggccgggctcgcccgcgcactcagctcgacccaacgcagcccaagtccgaggtagtcccactcaggaggaggaagaggaggatggcagggctatgttccagcccgtgggtgaagctgctactggcagtagtgctgagtgccggtctccctggaaacatggccaaccgctgtaagaaggctcaggtgaagagctgtacggagtgcatccgagtggacaagagctgtgcctactgcacagacgagctgttcaaggagcgacgctgcaacacccaggcggacgttctggctgcaggctgccggggagagagcgtgttggtcatggagagcagccttgagatcacagagaacatccagattgacaccagcctgcaccgcagccaggtatctccccaaggcctgcaagtgcggctgcggccgggtgaggagcgcaactttgtgttcaaggtgtttgagcccctggagagccccgtggatctgtatatcctcatggacttttccaactccatgtctgatgatctggacaacctcaagcagatggggcagaacctggccaagatcctgcgccagctcaccagtgactacactattggattcggaaagtttgtggacaaagtcagtgtccctcagacggacatgaggcccgagaagctgaaggagccgtggcccaacagcgaccccccattctccttcaagaatgttatcagcttaacagagaatgtggaagaattctgggacaaactgcaaggagaacgcatctcaggcaacctggacgctcctgaaggaggcttcgacgccatcctgcagacagccgtgtgcacaagggacattggctggagagcggacagcacccacctgctggtgttctccaccgagtctgccttccactatgaggctgatggtgccaacgtgctggccggcatcatgaaccgcaatgatgagaagtgccacctggatgccacaggcgcctacacccagtataagacccaggactacccatctgtgcccacactggttcgcctgcttgccaaacacaacattatccccatctttgccgtcaccaactactcttacagttactacgagaagctccataaatatttccctgtctcctctctgggagtcctgcaggaagattcatccaacatcgtggagctgctggaggaggctttctatcgaattcgctccaacctggacatccgggctctggacagcccgagaggcctgaggacagaggtcacctccgataccctccagaagacagagactgggtcctttcacatcaagcggggggaagtgggcacatacaatgtgcatcttcgggcagtggaggacatagatgggacacacgtgtgccagctggccaaagaagaccaaagaggtaacatccacctgaaaccctccttctccgatggcctccggatggacgcgagcgtcatctgtgacatgtgcgcctgcgagctgcaaaaggaagttcagtcagctcgctgtcactacagaggagacttcatgtgtggacactgtgtgtgcaacgagggctggagtggcaaaacctgcaattgctccacgggttccctgagtgacacgcagccctgcctgcgtgagggtgaggacaaaccatgctcgggccatggcgagtgccagtgcggacgttgtgtgtgctacggtgaaggccgctacgagggtcacttctgcgagtatgacaacttccagtgtccccgcacctctggattcctttgcaatgaccggggacgctgctccatgggagagtgtgtgtgtgagcctggttggaccggccgcagctgtgactgtcccctcagcaatgccacctgtatcgatagcaatgggggcatctgcaatggactaggcttctgtgagtgtggccgttgtcactgcaaccagcggtcttcgctctacacggacaccacctgtgagatcaactactcggcgatacgcctgggcctctgtgaggacctccgctcctgtgtacagtgccaggcctggggcactggggagaagaaagggcgcacgtgtgaggaatgcaactttaaggtcaagatggtagacgagcttaagaaagcggaagaggtggtggagtactgctccttccgggacgaggatgacgactgcacttacagctacaccgtggagggcgacggcagccctgggcccaacagcaccgtcctggtccacaagaagaaagactgcctcccggctccttcttggtggctcattcccctgctcatcttcctcctgttgctcctggtgttgcttctgctgctctgctggaaatactgtgcctgctgcaaagcctgcctgggacttcttccttgctgcaaccaaggtcacatggtgggctttaaggaagatcactatatgctgcgggagaacctgatggcctctgaccacctggacacgcccatgctgagaagtgggaacctcaagggacgagacacagtccgctggaagatcaccaacaatgtgcaacggcctggctttgccacccatgctgccagcatcagccccacagagctcgtaccctatgggctatccctgcgccttggccgcctctgcactgagaacctcatgaagcctggcacccgagagtgtgaccagctacgccaggaggtggaggaaaatctgaatgaggtatacagacaagtcaacggcgtacacaagctccagcagacgaagttccgacagcaacccaacgctgggaaaaagcaagaccacaccattgtggacacagtgttgctggcgccccgctctgccaagcagtcgctgctgaagctgacagagaagcaggtggagcaggggtccttccatgaactcaaggtggcccctggttactacaccctcacagcagagcaggatgcccggggcatggtggagttccaggagggggtagagctggtggacgtgcgtgtgcccctcttcatccggcctgaggatgatgatgagaaacagctgctggtggaggccattgatgtccccgtgggcactgccacccttggtcgacgcctggtaaacatcaccatcattaaggagcaagctagcgggatagtgtcctttgagcagcctgaatactcagtgagtcgtggagaccaggtggcccgcatccctgtcatccggcacatcctggacaacggcaagtcccaggtctcctatagcacacaggataatacagcacatggacaccgggattatgtccctgtggaaggggagctgttgttctaccccggagagacctggaaggaactgcaggtgaagctcctggagctgcaggaagtcgactccctccttcgtggccgccaggtccgacgcttccaagttcaactcagcaaccccaagtttggagcccgcctgggccagcccaacacagccactgttatcatcggggaacaagatgaaacggacagaagtctcataaatgagatatccgcatcgccgccactaccccgtggagacctgggtgccccgcagaaccccaatgccaaggctgccggatccaggaagatccatttcaactggctgccccctcctggcaagccaatggggtatagggtgaaatactgggtccagggcgactctgagtccgaagcccacctgctggacagcaaggtgccctcagtggagctcaccaacctgtatccctattgcgactacgaaatgaaggtgtgcgcctacggggcacacggggaggggccctatagctcactggtgtcctgccgcacccaccaggaagtgcccagtgagccaggaaggctggctttcaatgtagtttcttctacggtgacccagctgagctgggcagaaccagctgaaaccaacggggagatcacagcctatgaggtctgctatggactggtcaacgaggacaaccgacccattggacctatgaagaaggtgcttgtggacaaccccaagaaccggatgctgctcattgagaatcttcgagagtcccagccataccgatacacggtgaaggcgcgaaacggggcaggatggggacccgagagagaggctatcatcaacctggccacacagcccaagcggcccatgtccattcctatcatcccagacatccccatagtggacgcccagggtggagaagactacgaaaacttcctcatgtacagtgacgacgttctgcgctccccagccagcagccagaggcccagcgtttcagatgacactgagcacctggtgaatggccggatggactttgcctatccaggcagtgccaactccctgcataggatgactgctgccaacgtggcctatggcacacatctaagcccacaccagacccaccgaatgctgagcacgtcttctacccttacccgggactaccactctctgacgcgcacagaccactctcagtcaggcacacttccccgggactactccactctcacttccctttcctcccaaggcctccctcctatctgggaagatgggaggagcaggcttccgctgtcctggacccttgggtcctggagccgggctcagatgaagggtgtgcccgcatccaggggctcaccagactctataatcctggccgggcagtcagcagcgccctcctggggtacagattcccgtggggctatgggtgtgcccgacacacccactcggctggtgttctccgccctggggcccacatctctgaaggtgagctggcaggagccacagtgtgatcgagcactgctgggctacagcgtggaataccagctactcaacggcggcgagatgcatcggctcaacatccctaaccctggccaaacctctgtggtggtagaggatctcctgcctaaccactcctatgtgttccgggtacgggcacaaagccaggagggctggggccgggagcgagagggtgtcatcaccatcgagtcccaggtgcacccgcagagccctctctgccccctgccaggctccgccttcaccttgagcacccccagcgccccaggccccctggtgttcactgccctaagcccagactctctgcagctgagctgggagcgcccaagaaggcccaacggagatatccttggctacctggtgacctgtgagatggcccaaggaggaggaccagccagaaccttccgggtggatggggacaaccctgagagccggctgacggttcctggcctcagtgagaacgttccttacaagttcaaggtgcaggcccggacaacagagggctttgggcccgagcgtgagggtatcatcaccatcgagtctcaggatggaggccccttcccacagctgggcagccattctgggcttttccagaacccactgcaaagtgagtacagcactgtcaccagcactcacagcactaccaccaccgagcccttccttatagatggactaaccctggggacccagcgcctggaagcagrgggctccctcaccyggcwtrtgayssaskaaytkgkgasccrgmscctgascassrgtssctctctcagcactcatatggaccaacagttcttccaaacctgaatcccccaggaacctgggcccctccttgcctcctcgccctggcgccttcttcctctgctgttgtacccacctgcatgctgatcacagagccagcacctgtagtcagagagcgggggtaggtgctgtctgggaggcatgaagtgggtagaggtgacacaagacctctgactgcatcctgccctgggtccaaacccacatgtaaccaaaaagctggagccgacacaaggacccagcctttgttctgcacttaataaaagactttgctmctgcgtaaaaaaaaaaaaaaaaa

SEQ ID NO: 2280 - DNA, 1599 bp, Rattus norvegicus
ggcacgagggaaaacgttaggcttgtgttagagggacagagttccagcaccaggagcacaagtcagaacgaggtaaagcagggtcaggacctcagtctactttgtgtgtccacccatttctgtaggagcactggttttggtctggtagcacattctgtgctcttacgttcttgagatcatgataacagcagcaaacaaacctgtctttacagtaagtttgaggccaagaagtggaggcattttcttccagcgatgaactcctcgtctcacctgactttattggatcttaccctgaacgcctcggaggacaacatcctaggacaaaatgtcaataacaagtcttccgcctgcgaagacatgggcattgccgtggaggtgttcctaactctgggtctcgtcagcctcttggagaacatcctggtcatcggggccatagtgaaaaacaagaacctgcactcacctatgtacttctttgtgggcagcctagcggtggccgacatgctggtgagcatgtccaacgcctgggagaccatcaccatatacttgataaataacaaacacgtggtgatagcagacacctttgtgcgccacatcgacaacgtgttcgactccatgatctgcatttctgtggtggcctccatgtgcagcctgttggccattgcggtggacaggtacatcaccatcttctacgccctgcgctaccaccacatcatgacggccaggcgctcgggggtgattatcgcctgcatctggaccttttgcataagctgcggtatcgtcttcatcatttactacgaatccaagtacgtgatcgtctgcctcatctccatgttcttcaccatgctgttcttcatggtgtctctctatatacacatgttcctcctggcccggaaccatgtcaagcggatagcggcttcccccagatacaactctgtgaggcaaagggccagcatgaagggtgctatcaccctcaccatgctgctggggattttcattgtctgctggtcccccttcttccttcaccttatcctaatgatctcgtgccctcagaacgtctattgcgcttgctttatgtcttactttaacatgtaccttatactgatcatgtgcaattccgtgatcgatcccctcatctacgccctccgcagccaagagatgcggaggacctttaaggagatcatctgttgtcatgggttcaggcgaacttgtacgctccttggcaggtattaaaacaccttcccctctccgtgcctctcatctctcagtcaattaggttcagccagggcatgagcagggccgctaaggagctcagatggactcctcctccttatctccttggcagctcggtttggttatggcgtgttggaagtgtgcatgtgtgagtcgtctccgtggtgagactggcctgagacagttgtctttttactcctttgctcactcctgctcccccagttccattttagaaggttttcaccattcctgcttgacctggtaagtggcctcaggagatgcataacctcctgggtgagttgtcattgaaagaaaccgcgtggcggcctatattaccattagtggcctttgtgtttctctagcttccct

SEQ ID NO: 2281 - DNA, 2019 bp, Rattus norvegicus
gaattcggtctcagacgggtgggagggaayymmrgtcgccggtaaaggcggctctgacccgctcggagcgccaacgcagcctccgtagcccgcaagtcttcgtcgcttgctccgggctctcgagtccgggccaccaggggcgcgcgctggggggtcgttcgagctgcgaggatccgggctgcccgcgaggcgaagggcgggtgcccaggatgggatgtgtgaagtccaggttcctccgagaaggaagcaaggcctcaaaaatagagccaaatgccaaccagaaaggccctgtgtatgtgccggatcccacgtcccctaagaagctgggaccgaacagcatcaacagcctgcccccggggktcgtggagggctctgaggacaccattgtggtcgcactgtacgactatgaggccattcaccgtgaagacctcagcttccagaagggagaccagatggtggttctggaggagtctggggagtggtggaaggcccgttccctggctaccaagaaagaaggctatatcccaagcaattatgtagctcgagttaactctttggagactgaggagtggttcttcaagggtatcagccggaaggatgcagagcgccacctgctggctcccgggaacatgctgggctccttcatgatccgggacagtgagaccaccaaagggagctactcactttctgttcgagactttgacccccagcacggagacacggtgaagcattataaaatccggacactggacagtggagggttctacatctctccgaggagcaccttcagcagcctgcaggaacttgtcgtccactacaagarggggaaggatgggctctgccagaagctgtcagtgccctgtgtgtctccsaaaccccagaagccatgggagaaagatgcctgggagattcctcgagaatccctscagatggagaagaaactgggagccgggcagtttggagaagtgtggatggccacctacaacaagcacaccaaagtggcggtgaagacaatgaagccagggagcatgtctgtggaggccttcctggcagaggccaacctgatgaagacgttacagcatgataaactggtgaagctrcacgcygtggtctctcaggagcccayctttattgtcaccgagttcatggccaaaggaagcctgctggactttctcaagagtgaagaaggcagcaagcagccactgccaaaactcattgacttctcagcccagatttcagagggcatggctttcattgagcagaggaactacatccaccgagacctccgggctgccaacatcttggtttctgcatcactggtgtgtaagatcgctgactttggactggcacggatcatcgaggacaatgagtacacagctcgggaaggagccaagttccccatcaagtggacagctcctgaagccatcaactttggctccttcaccaysargtcagatgtctggtcctttggtatcctgctgatggaaatcgtcacctacggccggatcccttacccaggtatgtcaaacccagaggtgattcgagcactaragcatgggtaccgtatgcctcgaccagataactgcccagaggagctctacagtatcatgatccgctgctggaagaaccgtccagaggaacggcccactttcgaatacatccagagcgtgctggatgacttctacacggccactgagagccagtatcakcagcaaccttgatgggccggaagaacatgagcacagccagaagccccatcagggccttgacatgctcgacctgctgggcccactctcagacgccccctcccccacattccagctgtcgagtggagggagaggacttcacaatctctttttgactctagtcatctgcaatctgccattctcagggcctccaagttagtgtttctcatttgcctggaatgaactgaattcaatctatagctgtgatttaagtgggaagctgttaaaatagtatttaaataaaagatgtgagtgtcaaaaaaaaaaaaaaaaa

SEQ ID NO: 2282 - DNA, 3612 bp, Rattus norvegicus
  misc_feature (3424)..(3424): n is a, c, g, or t
aattccggtcgctggtctggcatgacgaagcatggctcgcgctccaccagctcgctgccgcccgagcccatggagatcgtgcgcagcaaggcgtgctcgcgccgggtgcgcctcaacgtcgggggcctggcgcacgaggtgctgtggcgcactctggaccgcctgccccgcacgcggctgggcaagcttcgggactgcaacacgcacgactccctgctccaggtgtgcgacgactacagccttgaggacaacgagtacttcttcgaccgccaccctggcgcctttacctccattctcaatttctaccgcaccggccggctgcacatgatggaggagatgtgcgcgctgagcttcagccaggagctggactactggggcatcgatgagatctacctggagtcctgctgccaggcccgctatcaccaaaagaaggagcagatgaacgaggagctgaagcgcgaggccgagacgctgcgggagcgggagggcgaggagtttgacaacacgtgctgtgcagagaagaggaagaaactctgggatctgctggagaagcccaactcgtcggtggccgccaagatcctggccatcatctcgatcatgttcatcgtcctgtccaccatcgctctgtcactcaacacgctgcctgagctgcagagcctagacgagttcggccagagcacggataacccgcagctggcgcacgtggaggcggtgtgcatcgcatggttcaccatggagtacttgctgaggttcctgtcctcccccaagaaatggaagttcttcaagggccccctcaacgccattgacctactggccatcctgccctactacgtcaccatcttcctcacagaatccaacaagagcgtgctgcagttccagaacgtgcgccgcgtggtccagatctttcgcatcatgcgcatccttcggatcctgaagctggcccgtcactccactggcctgcagtccttgggcttcaccctgcgcagaagctacaacgaactgggcctgctcatcctcttcctcgcgatgggcatcatgatcttctccagcctggtcttcttcgcggagaaggatgaggacgacaccaagttcaaaagcatccccgcctctttctggtgggctaccatcaccatgacaactgttggctatggagacatctacccgaagactctcctggggaaaatcgtgggggggctctgttgcattgccggggtcctggtgattgctctccccatccccatcatcgtcaataacttctccgagttctacaaggagcagaagcgccaggagaaagccatcaagcggagggaggctctggagagagccaagaggaatggcagcatcgtgtccatgaacatgaaggacgccttcgcccggagcatcgagatgatggacatcgtggtggagaaaaatggcgagagcatagctaagaaggataaagtgcaagataaccacctgtcccccaacaagtggaaatggaccaagagggcactctccgagaccagctccagtaagtcctttgaaaccaaggagcagggatcccccgaaaaggccaggtcctcgtctagtccacagcacttgaacgtccagcagctggaagacatgtacagtaagatggccaagacacagtcccagcccatcctcaacaccaaggagatggccccgcagagcaagcctccagaggagctggagatgagcagcatgcccagccccgtggcccctctgcccgcacgcacggagggcgtcatcgacatgcggagcatgtccagcattgacagcttcatcagctgtgccacggacttccctgaagccaccagattctcccacagtcctctggcatccctctccagcaaggctgggagcagcacagccccggaggtgggctggcggggggctctgggtgccagcggcgggaggctcacggagaccaaccccattcctgagaccagccgctctggtttcttcgtggagagtcccaggagttccatgaagaccaacaaccccttgaagctgcgagcgctcaaggtcaacttcgtggagggcgaccccaccccgctgctgccctccctgggcttgtatcacgatcctcttaggaacagaggaggggcagcggctgcagttgcgggactggagtgtgcctccctcttagacaagcccgtgctgagcccagagtcctccatctacaccacagcaagtgccaggacgccccctcgctcccctgagaaacacacagcaatagcattcaacttcgaggcgggagtccaccattacatagacaccgacacagatgacgagggtcagctgctctacagcgtggactccagccctcccaaaagtctccacgggagtaccagtcccaagttcagcactggagctagaacggagaagaaccacttcgagagctcccccttgcccacctcccctaagttcttaaggccgaactgtswckactcctcagaagggttgactggaaaaggccctggggctcaagagaaatgcaagctggagaaccatacccccccggatgtgcacatgctgcctgggggaggagcacacgggagcactagggatcagagtatctgagctccctaccacagagggcatctgcaggagaaatcaaggaggagggatgcttggcttgctgccactgagttctgcatgaactccaaggcccccaccaccacagagccccagcaagaggagagaccccgagagccatgaccaatctgtggacactaactagccacggggaccacacctaacaacatcttcctgagatggccggagcagagctgacagccaccactaagacctagcctaggacacacactcctagtctcgtctggaggctctctcagcctctggatacaccatcaccatctctcaaggcttcagctgagatgggtgttggagcgaggggttgctagtgaaagagtgggctgcccaagaagtactgggtgtcggtctcctgttaggagggtgcagaggacccttgatcatgagggattctytgctccgtcagccacactcctagkgcattgtgatgctkrcayragsaagtggctcaaatgattcagtattctgtggtccytggggctttattcggagactctgtcggggtgagytgacaatttagactcaattctttctgcccacctggccatccaggaagtgttccgacggttgkcacgcagccagggctggcacaggaacgtgggttccaaacaacgctcgtatggactgaaaagatacgcaggcgtcaaatatgcaaacgagatagattatttaaggagactgtgtgtgactgaaaagcaacattaaaaaataataaatttcattttctaywtkaaaaaaaaaaaaraaaargaaaaaaaatccttcactgaattgccctgtgcagagttgtgagtactttctgctgtancggggaaacacacctactctgagaggaagttctttttttttgtttgttcgtttgtttgattttcaattttcttttgttgttttttttgggggggttgttttgttttgttttttgtttcctgtggtattcgagctaaaaaatactaacaagttaataaaaaaaagcactttaaaaaaaaaaaaaaaaaa

SEQ ID NO: 2283 - DNA, 6181 bp, Rattus norvegicus
tcgaggagggaagaacctcagtggattatctaggagtgaggcagaaaagaacaaaggttcctggcaaggcgtggggccttctaaactcaggggttcgctgccatatagagaaggtgtagctgctggaaggagccatgtgatgaggatgggaaggctgtggcgcagatagtgagatgcctgggtcgggaggtcaggggagacccaggattggcgtcacctgtctgcgcagaggtgaagccaccaggcaactggcccagcactgagtccagaagaaaacaaggctaagataaaaccagagcttcggagactatcagcatgcaggtagggcgaggacgaagcgtgaggagggcagcggtccacgcgagaggcctcgaaggccaccgggcccgcgtccgagggtctgaggtgcctgcccacacctgcagggcctcttcccgagaagacaccctcgaaggccaatctaggatcggtctgctcagccctcgcaaaagacgtctgtggggagggggcgtggcggcgtgctgtcactcactgcccgctagccaatccacgggtgcgcccctccccggagagggtgcgcggagggcccgcccccgccgccaccgcgggtgtgaggcggccagcctggcgcggctccctccgccaggcagcctgcccaggtaacccggttcggcgggagggtcgggggtcgcgcggcaccctccactccctgggaggcgcgcacgctgcagtggggccggtgcgggccggaggcccgtgcgcgcagctgactgacgggccgcagcctgtgggcggggttgcgtgcgtgacgggcggttgtaccccgcgttgtgtcaggcctgcgcggggaaagctcggcaggaccgaggtgtgttaagtccgccttctgcggcctgccccgggtcgcggggcgcaggcgcggcggtgggcgggggtcgtcccttggagcgcctttgttcccggcgcgctgagggcggagccgagccccgccccgcccccgcgctcagtccccgccccgcgtccgcccgcaggagctgccaccgggtcccgctcgcctcccgggccgccgccgccgcctccgcctccgcctccgcctccgccgccccgggcccgccggcytgcgtcgccgaggtcgctgcagcatggcgggcgtcgggaccccctgcgccaacggctgcgggcccagcgcgccctccgaagcggaggtgctgcacctctgccgcagcctcgaggtgggcaccgtcatgactttgttctactccaagaagtcgcagcggccagaacggaagaccttccaggtcaagttggagacgcgccagatcacatggagccgcggtgcggacaaaatcgaggggtccatcgatatccgagaaatcaaggagatccgcccagggaagacttcccgggactttgaccgctaccaagaagaccctgccttccggccagatcagtcacactgttttgtcatcctctatggaatggaattccgcctgaagaccctgagcctgcaagccacatctgaggatgaagtgaacatgtggatcaagggcttaacttggctcatggaagatacgctgcaggcggccacacccctgcaaattgagagatggctccggaagcagttctactcagtggatcgtaaccgagaggatcgtatatcagccaaggacctgaagaacatgctgtcacaggtcaactaccgggtccccaacatgcgcttcctccgagagcggctgacggactttgaacagcgcagcggggacatcacctatgggcagtttgctcagctttaccgcagcctcatgtacagcgcccagaagacgatggaccttccgttcttggaaaccaacactttgaggactggagagcggccagagctttgccaggtgtccctttctgagttccagcagttccttcttgagtaccagggggagctgtgggctgtcgaccggcttcaggtgcaggaatttatgctcagcttccttcgagaccccttgcgagagattgaggagccatacttcttcttggatgagcttgtcacctttctgttctccaaagagaacagtgtgtggaactcacagctggatgccgtgtgcccagaaaccatgaacaacccactgtctcactattggatctcttcctcgcataatacgtatctgactggggaccagttctccagcgagtcctccctggaagcctacgctcgctgcctgaggatgggctgtcgctgcatcgagttggactgctgggatgggccagatgggatgccagtcatttaccatgggcacaccctcaccaccaagattaagttctcagatgtcctgcacaccatcaaggagcacgcgttcgtagcctcagagtaccctgtcatcctgtccatcgaggaccactgcagcattgcccagcagaggaacatggcccagcacttcaggaaggtgctcggtgacacgctcctcaccaagcccgtggacattgccgctgatgggctcccttctcccaaccagctcaagaggaagatcctgattaagcataagaagctggctgagggcagtgcctatgaggaggtgcctacctctgtgatgtactctgagaatgacatcagtaactccatcaagaatggtatcctctacttggaggaccccgtgaatcatgagtggtacccccactactttgttctgactagcagcaagatctactactctgaggagaccagcagtgaccagggaaatgaggatgaagaggagccgaaggaggccagtggcagcacagagctgcactcgagcgagaagtggttccacgggaagctcggggctgggcgcgacgggcggcacattgctgagcgcctgctcaccgagtactgcatagagactggggctcccgatggctccttcctagtgcgagaaagtgagaccttcgtgggggactacacgctgtctttttggcggaatgggaaagtccagcactgccgtatccactcccggcaggatgctgggactcctaagttcttcttgacagataaccttgtctttgactctctctatgacctcatcacacattatcagcaagtgcccctgcgctgcaatgagtttgagatgcgcctttcagagcctgttccacagacgaatgcccatgagagcaaagagtggtaccacgcaagcctgactagagctcaggctgaacacatgctgatgcgagtaccccgtgatggggccttcctggtgcggaagcgcaacgagcccaactcctatgccatctctttccgggctgagggaaagatcaagcactgccgagtacagcaggaaggccagactgtgatgctggggaactctgagtttgacagcctggtcgacctcatcagctactatgagaagcatcccctgtaccgcaaaatgaaactgcgctaccccatcaacgaggaggcgctggagaagattgggacagctgaacccgattatggggcactgtatgagggccgcaaccctggtttctatgtggaggccaaccctatgccaactttcaagtgtgcagtaaaagctctcttcgactacaaggcccagagagaggatgagctgacttttaccaagagcgccatcatccagaatgtggaaaagcaagatggtggctggtggcgtggggactatggtgggaagaagcagctgtggttcccctcaaactatgtggaagagatgatcaatccagcaatcctagagccggagagggagcatctggatgagaacagcccactgggggacttgctgcgaggggtcttagatgtgccagcctgccagatcgccattcgtcctgagggcaaaaacaaccggctcttcgtcttctccatcagcatgccgtcagtggctcagtggtccctagacgttgccgctgactcacaggaggagttgcaggactgggtgaaaaagatccgtgaagttgcccagactgcagatgccaggcttactgaggggaagatgatggagaggaggaagaagatcgccttggagctctccgagctcgtggtctactgccggcctgttccctttgacgaagagaagattggcacagaacgcgcttgttaccgggacatgtcctcctttccggaaaccaaggctgagaagtatgtgaacaaggccaaaggcaagaagttcctccagtacaaccggctgcagctctctcgcatctaccctaagggtcagaggctggactcctccaattatgaccctctgcccatgtggatctgtggcagccagcttgtagctctcaattttcagaccccagacaagcctatgcagatgaaccaggccctcttcatggctggtggacactgtggctatgtgctgcagccaagcaccatgagagatgaagcctttgacccctttgataagagcagtctccgaggtctggagccctgtgtcatttgcattgaggtgctgggggccaggcatctgccgaagaatggccggggtattgtgtgtcctttcgtggagattgaagtggctggggcagagtacgacagcaccaagcagaagacagagtttgtagtggacaatggactgaaccctgtgtggcctgcaaagcccttccacttccagatcagtaacccagagtttgcctttctgcgctttgtggtgtatgaggaagacatgtttagtgaccagaacttcttggctcaggctactttcccagtaaaaggcctgaagacaggatacagagcagtgcctttgaagaacaactacagtgaagacctggagttggcctccctgctcatcaagattgacattttccctgctaaggagaatggtgacctcagccctttcagtggtacatccctaagggaacgggcctcagatgcctccagccagctgttccatgtccgggcccgggaagggtcctttgaagccagataccagcagccatttgaagacttccgcatctcgcaggagcatctcgcagaccattttgacagtcgggaacgaagggccccaagaaggactcgggtcaatggagacaaccgcctctagtcatgcccctaccttgttggagagcagcagcgctgccacctgtggaatgccatgaactgggttcwckrggagcggtctactgtaaagccttcctggtctcacagcctggagcctggattccagcggtgaaggctagacaaaaccaagccattaatgagatgtactgttttgggcctccatgcccagctctgggtgaaggcaaaaaactgtactgtgtctcgcattaagcacacacatctggccctgaatgtggaggtgggtccctccatcttgggccaggactagggctgaagccccttggaaagagaagttgcctcagttggtggcataggaagcttcaaggagctgctgacacattcctgaaagaggaagaggaggaggargaagagccttgctgggccaggggaacaaagtttacattgtcctgtagctttaaaaccacagctggtcagggtgaaagagtagatgccctgaggcttggccctggagccaggtcagaggaatgcagggcctgtaaggagaaggctctgctctgcctgaggaggaagacagcacaagggcacattgccaccgtgggtatactacccagcctgaaagatacaggggatcatgataaatagcagtattatttttttttttcttctcagtggtattgtgactaagttattctgtcctgctcctcaccttggaagggaagacccagcacagagcctttaggaacagcagctctatggggtgttgttactggaagagggcactgtccagaagggtggaggggcagaaagagagaaaatcgatgtctaccctggtgagcgtttttgtttttatggcaaggaaggctcattatgctctcccaaaggaatggagacatgggtaagtggagtcaggcagtaggcaccaaatgaagctgctgcttggtagtctctgtgtggttggtaaaaagatgcaaaggmgryrsgarggtaagcctcacctctgaggacagggtggggtccaggcctgtgggtgcaaaggtgcctmagcatagccagcattcagcacacgcaaacccactgcccacatttgggctcagggttggccatttgctagttctgctgccctcttaagatctgactgccaaataaatcatcctcatgtcmwwhhwmdwdwaaaaaaaaaaaaaaaaa

SEQ ID NO: 2284 - DNA, 2318 bp, Rattus norvegicus
tagcagcagaatggagtctcccgaaagcctgccggggctgatgtgaaattggaccatctgcttccagttggtctgtttcctcctcttcttgtattttcttcccttgccatccaccgtggagtgaattactgaatcttgctccgttccaagagaggcgatgaggatgaagtgaacctaccctgtccaccacaaggaaaagcacaaagaagaaatgacaatggccaagttaactgaatccatgactaatgtcctggagggggattccatggaccaagacgtggaaagcccagtggccattcaccagccaaagytgcctaagcaggccagggatgacctgccaagacacatcagccgagacaggaccaaaaggaaaatccagaggtacgtgaggaaggatgggaartgtaacgtccaccacggcaacgtgcgggagacgtaccgatacctgacggacatcttcaccaccctggtggacctaaagtggagattcaacctattgatctttgtcatggtctacacagtgacgtggcttttctttgggatgatctggtggctaattgcatacatccggggagatatggaccacatagaggacccctcgtggactccctgtgttaccaacctcaacgggtttgtctccgcttttttattctcaatagagacagaaaccaccattggttatggctacagggtcatcacggacaagtgcccagaaggaatyattctcctcttaatccagtccgtgttggggtccattgtcaacgccttcatggtaggatgtatgtttgtgaaaatatcccaacccaagaagagggcagagaccctggtcttttccacccatgcggtaatctccatgcgggatgggaaactatgcctgatgttccgggtaggggacttgaggaattcccacatwgtggaggcctccatcagagccaagttgatcaagtccaaacagacttcagagggggagttcattcccctcaaccagacggatatcaacgtagggtactacaccggggatgaccgactctttctcgtgtcaccgctgattattagccatgaaattaaccaacagagtcccttctgggagatctccaaagcccagctgcctaaagaggaactggagattgtggtcatcctggagggaatggtggaagccacaggaatgacgtgccaagctcgaagctcctacrtcaccagtgagatcctgtggggttaccggttcacaccagtcctgacactggaggacgggttctatgaagttgactacaacagcttccatgagaccyatgagaccagcaccccgtcccttagcgccaaagagctagccgagctggctaaccgggcagagctgcccctgagctggtctgtgtccagcaaactgaaccaacatgcagaactggagacggaagaggaagagaagaacccggaagaactgacagagaggaatggtgatgtggcaaacctagagaatgagtccaaagtgtagacctcagctggctagcctcccccactcagacatgacccctccttgtagacccagctgggtcaacctcttccactcagatatgacccgcccttgtaggtccagctgggtcagcctcccccactcagacatgacccctccttgtttcccatttccttcttttctgtctctcttactttgaccttgatttatttatatttaattttggcatttccagaaaacaaatcttcaaggtgtaaaatacctacctgcccctctcagacgttcagatggacaagcagacagggatttggttaaggtacaaggtaccttcattgtgcccaagcctggtctccactcacagaagagacttttagctacttgatccactttattgtccaatccaaatcactcaaaagagctgtcagagctctgacccagtgtcacaaagagcgaggtctgtttaccatggccacaggtcagtcttacagagccctgtccatctcacccaacacagggcaggtacttaaccatagacactgatgggaccggacccaggtgagggaaggatagaccactgtacatagatctgccctgcggaattattttctttcggcaattagaaacaaacccagcatgcaccagagtaccgtggagcagaactcctagtgatgtacatatcattcctgtagctttagacgtacactttagaaataagaagaaaaaagactcccaatgtacagtaggcatttccgttctgatatctgagtcttctgactattttgatccccttgactgctggccctctaaatgcatggcctttgttccaggtcccagactgacagttgttaga

SEQ ID NO: 2285 - DNA, 6060 bp, Rattus norvegicus
tcctggctataagtcaccatggcccagcaggctgcagacaagtacctctatgtggataaaaacttcatcaataacccgctggcccaggccgactgcggtgccaagaagctggtatgggtgccttccaccaagaatggctttgaaccagccagccttaaggaggaggtgggagaagaggccattgtggagctggtggagaatgggaagaaggtgaaggtgaacaaggatgatatccagaagatgaacccacccaagttctccaaggtggaggacatggcagagctcacgtgcctcaacgaagcctcggtgctgcacaacctcaaggagcgatactactcagggctcatctatacctattcaggcctgttctgtgtggtcattaatccttataagaacctgcctatctactcagaggagatcgtggacatgtacaagggcaagaagaggcacgagatgccgccccacatctatgccatcacagacactgcctacaggagcatgatgcaggaccgagaagatcagtccatcctttgcacgggtgagtctggagcaggcaagacagagaacaccaagaaagtcatycagtacctggcacatgtggcctcctcacacaagagcaagaaggaccagggggagctggagcgccaactgctgcaggccaaccctatcctagaggcctttggaaacgccaagacggtgaagaatgacaactcttcacgatttggtaaattcattcgtatcaactttgatgtcaacggctacatcgttggggccaacattgagacttatcttctggagaaatctcgtgctatccgccaagccaaggaggaamgaaccttccacattttttactacctgctgtctggggccggagagcacctgaagactgatctcctgttggagccatacaataaataccgcttcctgtccaacgggcatgtcaccatcccagggcagcaggacaaggacatgttccaggagacaatggaggccatgaggattatgggtatcccagaggatgagcagatgggcttgctgcgggtcatctctggcgtccttcagcttggcaacattgtcttcaagaaggaacggaacactgaccaggcgtccatgccagataacacagctgctcaaaaggtgtcccacctcctggggatcaatgtgaccgacttcaccagaggcatccttaccccgcgcatcaaggtgggcagagactatgtgcagaaggcacagactaaagagcaggctgactttgccatcgaggctttggccaaggctacctacgagcggatgttccgctggctggtgcttcgcattaacaaagctctggacaagaccaagaggcagggcgcctcatttatcgggatcctggacatcgctggcttcgagatctttgatctgaactccttcgagcaactttgcatcaactataccaacgagaagctgcagcagctgttcaaccacaccatgttcatcctggagcaggaggagtaccagcgagagggcatcgagtggaacttcatcgactttggccttgacctgcagccttgcatcgacctcattgagaagccggcgggtcccccaggcatcctggccctgttagatgaggaatgttggttccctaaagccactgacaagagcttcgtggagaaggtggtgcaggagcagggcacccaccccaagttccagaagcccaagcaactgaaggacaaggctgatttctgcatcatccactatgcaggcaaggtggactataaggccgatgagtggctgatgaagaacatggaccctctgaacgacaacattgccaccctgcttcaccagtcctcagacaagtttgtctctgagctgtggaaggatgtggatcgaatcattggcttggaccaggtggctggaatgtctgagacagcgctacccggtgccttcaagactcggaagggcatgttccgtactgtggggcagctgtacaaggagcagctggccaagctcatggccacactgaggaataccaaccccaactttgtctgctgcatcattcccaaccacgagaagaaggccggcaaactggacccacacctggtgctggaccagttacgctgcaatggcgtccttgaaggcatccgaatctgccgccagggctttcccaacagagtggtcttccaggagttccggcagaggtatgagatcctcacacctaactccattccgaagggcttcatggatgggaagcaggcgtgtgtgctcatgatcaaagccttggagcttgacagcaacctgtaccgcatcggccagagcaaagtgttcttccgttccggagtcctagctcacctggaggaagagcgggacctgaagatcactgatgtcatcattggcttccaggcctgctgcagaggctacctggccaggaaggcctttgccaagaggcagcagcagctgactgccatgaaggtcctacagaggaactgtgctgcatacctcagactccggaactggcagtggtggaggctcttcaccaaggtcaagcccctgctgaactcaataaggcatgaggatgagcttttagccaaggaggcggaactgacaaaagttcgagagaagcatctggctgcagagaacaggctgacagagatggagactatgcagtctcagctcatggcagagaagttgcagcttcaggagcagctgcaggcgaaaaccgagttgtgtgctgaggctgaggagctccgggcccgcctgacagcgaagaagcaggagttggaggagatctgccatgacctggaggccagggtagaggaggaggaggagcgctgccagtatctgcaggcagagaagaagaagatgcagcagaacatccaggaactcgaggagcagctggaggaggaggagagtgcccggcagaagctgcagcttgagaaggtgaccactgaggccaagctgaagaaactggaggaggaccagatcatcatggaggatcaaaactgcaaactggccaaggagaagaagctgctggaagacagagtagctgaatttactacagacctcatggaagaggaggagaagtccaagagcctggccaagctcaagaacaagcatgaggcgatgatcaccgacctggaagagcgccttcgtagggaggagaagcaaaggcaggagttggagaagacccgccgcaagctagagggagactccacagacctcagcgaccagattgctgagctccaggcgcagatcgcagagctcaagatgcagctggccaagaaggaggaggaattgcaggctgccttggccagagtggaagaagaagctgctcagaagaacatggccctgaagaagattcgagaactggaaactcagatctctgagctgcaggaagacctggagtcggagcgtgcctgcaggaacaaagctgagaagcagaaacgggatcttggagaagagctagaggctctgaagacagagctggaggacactctggactccaccgctgcccagcaggaactgaggtcaaagcgtgagcaggaagtgagcatcctgaagaagactcttgaggatgaggccaagacccatgaggcccagatccaggagatgaggcagaagcactcgcaggccgtggaggagctggccgagcaattggagcagactaagcgggtaaaagctacccttgagaaggctaagcagaccctggagaatgagcggggagagctggccaatgaggtgaaggccttgctgcagggcaagggcgactcggagcacaagcgcaagaaggtggaggcgcagctgcaagaactgcaggtcaagttcagcgagggagagcgtgtacggaccgagctggctgacaaggtctccaagctgcaggttgaactggacagcgtgaccggtctccttaaccagtcggacagcaagtccagcaagcttacaaaggacttctctgcgctggagtcccagctccaggacacacaggagctgctccaggaggagaaccggcagaagctgagcctcagcaccaagctcaagcagatggaggatgagaaaaactccttcagagagcagctggaggaggaagaggaggaggccaagcgcaacctggagaagcagatcgccaccctccatgcccaggtgactgatatgaagaagaagatggaggacggtgtagggtgcctggagacagcagaggaggcaaagcggaggcttcagaaggacctggaaggcctgagccagcggcttgaggagaaggtggctgcctatgataagctggagaagaccaagacccggcttcagcaggagctggatgacctgctggtggacctggaccaccagcggcagagcgtctccaacctggaaaagaagcagaagaagtttgaccagctcctagctgaggagaagaccatctcagccaagtatgctgaggagcgagaccgagctgaagctgaggcccgtgagaaggagacaaaggcactgtcactggcccgagcacttgaggaggccatggagcagaaggcagagctagaacggctcaacaagcagttccgcacggagatggaggacctcatgagctccaaggatgacgtgggcaagagtgtccatgagctggagaagtccaacagggcattggagcagcaggtcgaggagatgaagacccagctggaggagctggaggatgagcttcaggccactgaggatgccaagctccgtctggaggtgaacctgcaggccatgaaggcccagtttgagcgggatctgcagggccgggatgaacagagcgaggagaagaagaagcagctggtcagacaggtgcgggagatggaggcggagctggaggatgagaggaagcagcggtccattgccatggctgctcgcaagaaactagagatggatctgaaggacctggaggctcacatagacacagccaacaagaaccgggaggaggccatcaaacagctacggaagcttcaggcccagatgaaggactgcatgcgggacgtggacgacacgcgagcctcccgggaggagatcctggcccaggccaaggagaatgagaagaagctcaagagcatggaggccgagatgattcagctgcaggaggaactggcagccgccgagcgtgctaaacgccaggcccagcaggagcgggatgagctggccgatgagatcgccaacagcagtggcaaaggggccctagcattggaggagaagcggcgactagaggccctcattgccctgctggaggaagagctggaggaggagcagggcaacacagaactgatcaacgaccggctgaagaaggccaatctgcagatcgaccaaataaacaccgacctgaacctggagcgcagccacgcccagaagaacgagaatgcgcggcagcagctggaacgccagaacaaggagctcaaggccaagctgcaggagatggagagtgctgtcaagtccaaatacaaggcctccatcgctgccttggaggccaagattgcacagctggaggagcagctggacaacgagaccaaggagcgccaggcagcctccaagcaggtgcgccgggcggagaagaagctgaaggatgtgctgctgcaagtggaagacgagcggaggaacgcggagcagttcaaggaccaggccgacaaggcatccactcgcctgaagcagcttaagcggcagctagaggaggccgaggaggaggcccagcgggccaatgcctcccgccggaagctgcagcgtgagctggaggatgccacagagactgccgatgctatgaaccgagaggtcagctccctgaagaacaaactgaggcgtggggacatgccatttgttgtgacccgccgaattgtccggaaaggcactggcgactgctcagacgaggaggtcgacggtaaagcagacggggctgatgccaaggcrrccgagtagggacttctgctacccaagacggatggacagacggctccacctcccttccccagccctccayacccctgccttgagactgctctgcccatgcccctcttcctcccaggccttcytgarggcattggcttcctctgctgcatccccttccagctccct

SEQ ID NO: 2286 - DNA, 2638 bp, Rattus norvegicus
ggagcaggagatggccgtggacccagtctccagtaggactgcagggaacatatcgtcacaactccatgttgcagccagggcttgtgtcctcagctctgcctctcggatgtgatggccaccgtagacctttcgtggcgtctgcccctctacatcctcctcttgctcctggctacaacttgggtgtctgcagcagtgaacgactgttcccatcttaagtgcttctacaactcaagagccaatgtctcctgcatgtggagccctgaagaggccctgaacgtcacatcctgtcacatccatgccaagtcggatatgcgacactggaataaaacctgtgagctaacccctgtgaggcaggcatcctgggcctgcaacctgattctcgggcccctcccagattcccagtcactgacctccgtagacctcctcagcctaagtgtggtgtgctgggaagagaaggggtggcgtagggtgaagacctgcaccttccatccctttgacaaccttcgcctgattgcccctcattccctacaagtcctgcacattgaaacccggagatgtaacataagctgggaggtgtcccaggtctctcactacgttaatccatacttggaatttgaggcccgtagacgtcttctggaccgtagctgggaggatgcatccgtattcagcctcaagcagaggcagcagtggatcttcttggagacgctgacccctgacacctcatatgagctccaggtgagggtcatagctcaacgtggcaaaaccaggacctggagcccctggagccagcccatggcctttcggacaaggccagcagatcctaaggagatcttccccctgccatggctcagatgccttctactggtcctcggctgcttctttggcttcttgtcctgcgtctgcgttttggtcaagtgccgctaccttgggccatggctgaagacacttctcaagtgccacatcccagatccgtctgagttcttctcccaactgagctcccagcatgggggagaccttcagaaatggctctcctcgcctgtcccccaatccttcttcagccccactggctctgcacctgagatctccccactggaagtgcttgacagagattccaagaccatgcagatgctcctgtttcagaaggagaaggcctcttcaccctcgcccagtggccactcacaggccagctgcttcaccaaccaaggttacttcttcttccatttgtccaatgccttggagatcgagtcctgccaggtgtacttcacctatgacccctgcatggaggaggatgtggaggaagatgggccaaggctgcccgaggaatctcccctcccacctctgctgcctttcactggagaacaggatgactactgtgccttcccgcccagggatgacctgctgctcttctccccaagcatgagcacccccaacactgcctatgggaacagcataaccccggaagaaaggcctcccctctccctgcaggaggggctgccctccctagcatcccctgacctgatgggcttacagcaccctctggagctggagctgggagatgatggagaagggatgtctaccaatagctctgggcaacaggccagtgtcccggaagcagctctcatgggcacgaccaagacagaggccaggcctgtcctgactctaaacactgatgcctatctgtctcttcaagaactacaggcccaagattcagcccacctaatataggaggggtgaccaggactgggatctagctacctgaggtcaggtcaggcttgagggagattgcttaaggagtctcttgaggacagtccactattaagggatgtctctggttatccccacccgcaaacttagtcatccacttctgacctccacttgatgcttcctggtctaaccagggtttggggtggggagcggtggtcagttccaccctctatttagtcatgaggtctatagcttcctgtacctgcctcactctctcswcgwgrccttcacagggcagccagaacttgcttcccaaatacaaatgcaaccttgctctcttctatcctgagcttgctgtggctccctaccactctctgccccatttctggtcccaactcttgccccgtcagcactgctgtgggtcagctgtcctcaggatgtgatctggctgwacactgtcttaatcagggcggctttgacaagccaaacgaagagatcctgataagactgggtgcagcctgttgacggttgagggtccctsatagaaggaggggatgggaaggatcataaatccaccacctgagaaatcttagccactttcctgcacccacccccaamyagtgtaactckkcccctggtgcakkcattattttatgtgttcttggaagatgctggtatatgtagaggggatgaattgaagtgagggctccatctatgttgctttggggaccttgtcgtctactctgggcgggttttctgtgaagcagcttctttggatttattcacctgtcagtaagcctgacagactcagaggttcaccaagmtggacttgagtgtacttgtgcctttgatgtcgtatctgggagaagtacttacttgttaatgtatctcycraagccaagaaaagcttacaggacaaaaaaaaaaaaaaaaa

SEQ ID NO: 2287 - DNA, 2150 bp, Rattus norvegicus
cgaactgtccgctacttcgagtccccttgagcgccgtgtgccggctctgaacattggcgttcgcagctgttttgtgggctggagggttcgtggagtcctggaactgaagcgacgctgggtcctctggttgtccccttgagggagggcacacgagcggggacatcggggcgctcccttcccacagcgtggtgcatttgggcgtaactcaccgsgaggcgkwkcckgmgwcccycgkssmksktasagkcgagccaagactgaagttcaaggccctgccttccctgtgaactgacatttgtgactggtcaagctcaggacacaagacgttgtcatcacagattggtgctctgtggcccgcctggccacaaccattcaacatggtggacacagagagccccatctgtcctctctccccacttgaagcagatgacctggaaagtcccttatctgaagaattcttacaagagatgggaaacattcaagagatttctcagtccctcggagaggagagttccggaagctttagttttgcggactaccagtacttagggagctgtccaggctcggagggctctgtcatcacagacaccctctctccagcttccagcccctcctcagtcagctgccctgctgtccccaccagtacagatgagtcccctggcaatgcactgaacatcgagtgtcgaatatgtggggacaaggcctcaggataccactatggagtccacgcatgtgaaggctgcaagggcttctttcggcgaactattcggctaaagctggcgtacgacaagtgtgatcgaagctgcaagattcagaaaaagaaccggaacaaatgccagtactgccgtttccacaagtgcctgtccgtcgggatgtcacacaatgcaatccgttttggaagaatgccaagatctgagaaagcaaaactgaaggcagaaatccttacctgtgaacacgatctgaaagattcggaaactgcagacctcaaatctctggccaagagaatccacgaagcctacctgaagaacttcaacatgaacaaggtcaaggcccgggtcatactcgcaggaaagactagcaacaatccgccttttgtcatacatgacatggagaccttgtgcatggctgagaagacgcttgtggccaagatggtagccaacggcgttgaaaacaaggaggcagaggtccgattcttccactgctgccagtgcatgtccgtggagaccgtcaccgagctcacggaatttgccaaggctatcccaggctttgcaaacttggacttgaatgaccaggttaccttgctgaagtacggtgtgtatgaagccatcttcacgatgctgtcctccttgatgaacaaagacgggatgctgatcgcgtacggcaatggcttcatcacccgagagttcctaaagaacctgaggaagccattctgcgacatcayggarsccaagtttgacttcgctatgaagttcaatgccctcgaactggatgacagtgacatttccctttttgtggctgctataatttgswgtgkagatcggcctggccttctaaacataggatacattgagaagttgcaggaggggattgtgcacgtgctcaagctccacytgcagagcaaccatccggatgatacctttctcttcccaaaactccttcaaaaaatggtggacctccggcagctggtcacggagcatgcgcagctcgtgcaggtcatcaagaagaccgagtcakacgcggcgttgcacccactgttgcaagagatctacagagacatgtactgatttttcctgagatggtaggccgttgccactgttcagggacctytgaggtctgcggccccatacaggagagcagggatttgcacagatggcctccctccttacccttggagatgaagagggctgagcctaggcaatgcaggctcctcccacatccttactttctgaatgagcacttctaagacttcctgctactgaaatggtggtgatcagaggctagtaggattcagacaattacagrcaatggcrgccscccccccccaccagtctgatcttaactggcccaatgttaatcattgcacagtactctacgttgcatatataatttgccattaattaacgggtaacctcaaaaaaaaaaaaaaaaaa

SEQ ID NO: 2288 - DNA, 1970 bp, Rattus norvegicus
cagtactcaccgtctttggttcgtcctcagtgcagggcaacaggactttgggctcaggatggtggcagcagctatgttgctacggtcctgtccagtgctctctaagggccccacaggcctcctaggcaaagtggctaaaacttaccagttcctatttggtattggacgctgccccatcctggccactcaaggaccaacctgttctcaaatccatcttaaggcaaccaaggctggagcagactctccgtcttggactaagagccattgtcctttcatgctgtcagaactccaagacaggaagagcaagattgtgcagagggcagctccagaagtccaagaggatgtcaagactttcaagacagacctgctgagcttcatggagtcaactacccgaagccaatcagtgcctcgtttccaggatccagagcagactggaggggcacctcccctgctgattcagaataatatgactggaagccaggcttttggttatgaccaattttttagagacaagatcatggaaaagaagcaggaccacacataccgtgtgttcaagactgtgaatcgctgggctaatgcctacccctttgcccaacacttctccgaggcatctatggactcaaaggatgtttctgtctggtgcagtaatgactatttgggcataagcaggcaccctcgtgtcttgcaggccatagaggagaccctgaagaatcatggagctggagctgggggcactcgcaatatctcaggtacaagcaagtttcatgtggagcttgaacaggagctggctgaactacatcataaggactcggctctgctcttctcctcctgttttgtggccaatgattctactctctttacactggccaagcttctgccagggtgtgagatctactcagacgcaggcaatcatgcctccatgatccaaggcattcgtaacagtggtgcagtcaagtttgtcttcagacacaatgacccaggccacctgaagaaacttcttgagaagtccgatcccaagacaccaaaaattgtggcttttgagactgttcactccatggatggtgccatctgtcctctggaggaattgtgtgatgtggcccaccagtacggggccctgaccttcgtggatgaagtccatgccgtaggactatatggaacccggggtgcagggatcggggagcgtgatggaattatgcacaagcttgacatcatctctggaactcttggcaaggcctttggctgtgtcggtggctatatcgccagcactcgggacttggtggacatggtgcgctcctacgctgcaggcttcatctttaccacttcactgcctcccatggtgctctctggagctctagagtctgtgcgtctaswmwwsgsasmgrrgggtcaagccctgaggcgtgcacaccagcgcaacgtcaaacatatgcgccagctactaatggacaggggctttcctgttatcccctgtcccagccacatcatccccataagggtgggtaatgcggcactcaacagcaagatctgtgatcttctgctcgccaagcacagcatctatgtgcaggccatcaactacccaactgtgcctcgtgstgaggagctgctgcgcwtggccccstccccccaccacagccctcagatgatggaaaactttgtggagaagttgctgctggcctsgactgaggtggggttgcccctccaagatgtgtctgtggctgcatgcaacttctgccgtcgtcctgtgcactwtgagcttatgagcgagtgggagcgatcctactytgggaacatgggaccccaatmtgttacyacctatgcstaaggagccasctgccttagatgccaaccscacstgcactccccctggggatggtcttcctcctactstctgctwtgctgtstgcttctagctgacttgattctaaaaataaagagcamcctgaammawwwrwaaaaaaaaaaaaaaaaaa

SEQ ID NO: 2289 - DNA, 5012 bp, Rattus norvegicus
cacgaggtgctcgctctctctgacctaggaagaagcgcctaccgggacagccgaccctcggctgcctccagcgmmyyccksttttgcaccccaagccgaggactccggggaccctcctctcccaggcgccaccatgctggacccttcgtccagcgaagaggaatcggatgagatcctggaagaggagagcggcaaggaggtgctgggctcggccgcgtccggagcgcgcctgtctccaagccgcaccarcgagggctcggcgggcagcgccggcatggggggcagtggcgccggggccggggtgggcgccggcggcggtgggggtagcggcgcgagcagcggcggcggggccggggggctgcagcccagcagccgcgccggcggcggccggccctccagccccagcccgtcggtggtgagcgagaaggagaaggaagagttggagcggctgcagaaggaagaggaggagaggaagaagaggctgcagctgtacgtgttcgtgatgcgctgcattgcctaccccttcaacgccaagcagcccaccgacatggctcggcggccaaggaagatcagcaaacagcagctgcagactgtcaaggaccgattccaggctttcctcaatggggagacccaaatcgtggcagatgaagcctttatgaatgctgtccagagctactatgaggtgtttctcaagagtgaccgtgtggcccgcatggtacagagtgggggctgctcagccaacgactctcgggaggtcttcaagaaacacatcgagaagagggtacgcagcctacctgagattgatggcctcagcaaggagactgtgctaagctcctggatggctaagtttgacgccatctaccgtggtgaggaggaccccaggaagcagcaagcccggatgacagccagtgcagcttctgagttgattctgagcaaggaacagctctatgagatgttccagaacattcttgggatcaagaaatttgaacatcaactcctatataatgcgtgtcagctggacaatccagatgagcaggcagcccagatcagacgagagctggacggacgtctccaaatggcagaccaaatagccagggaacgcaaatttcctaagttcgtatccaaagaaatggaaaatatgtacatcgaggagctgaagtcctccgtcaacctactcatggccaacttggagagcatgccggtgtccaagggtggagagttcaagctgcagaaactgaaacgcagtcacaacgcgtccatcattgacatgggtgaggagagcgagaaccagctgtccaagtcggatgtcctgctgtccttctccttggaggttgtcatcatggaagtccaaggccttaagtccttggctccaaaccgaatcgtgtactgcacaatggaggtggagggtggagagaaacttcagactgatcaagcagaggcttctaaaccaacctggggcactcaaggcgacttctctacaacccacgcgctgccagctgttaaagtaaagctattcacagagagcactggtgtcctggccttggaagacaaggaactcgggcgggttatcctccatcccaccccaaacagccccaaacaatccgagtggcacaaaatgacagtctccaaaaactgccccgatcaagacctcaaaatcaaactcgctgtccgaatggataagcctcaaaacatgaagcactctgggtacttatggaccattggtaagaatgtgtggaagaggtggaagaaaaggttctttgtgttggtgcaggtcagccagtacacttttgccatgtgcagctatcgagaaaagaaagcagaacctcaggaactcctacagctggatggctacaccgtggattacaccgaccctcagccaggtttggagggtggccgagccttcttcaatgcagtcaaagaaggagacacggtgatatttgccagtgacgatgagcaagatcgaatcctgtgggtccaagctatgtacagggccaccgggcagtcgcacaaacctgtgccccctacccaggtgcagaagctcaagccaagggcggaaacgtgcctcagcatggatgcccccatctcccagttttacgcagatagagctcaaaagcatggcatggatgaatttatctcgtccaacccctgtaactttgaccacgcttccctctttgagatggtacagcggctgactttggatcacagactaaacgattcctattcttgcctgggctggttcagtcctggccaggtgtttgtgttagacgagtactgcgctcggaatggagtccgaggatgtcatcggcatctctgttaccttagagacttgctggaacgggcagaaaatggcgccatgatcgaccccacgcttcttcattacagctttgccttctgcgcatcccatgtccacgggaacaggcctgatggaatcggaactgtgactgttgaagaaaaagagcgctttgaagaaatcaaagagagactccgagttctgctggaaaatcaaattacacatttcaggtactgctttccgtttggtcgacctgaaggtgctttgaaagcgactctctcacttttggaacgggttttgatgaaagatattgtcactccagtaccccaagaggaggtcaaaactgtcatccgyarakgcctagagcaggctgctctagtcaactactctcgcctatctgagtatgccaaaatcgaagaaaatgtaggccgcttaatcactcccgccaaaaagctcgaagacacaatccgtcttgctgaactagtcattgaagtgctgcaacaaaacgaagagcaccacgccgaggcctttgcgtggtggtcagacttaatggtggagcacgcggagacgttcctgtcactctttgcagtggacatggatgcagcattagaggtgcaacccccagacacgtgggacagtttcccactcttccagctgctgaatgactttctccgtacagactataacttgtgcaatggaaagtttcacaaacacctgcaggatctgttcgccccactcgttgttagatacgtggatctgatggagtcctcaattgcacaatctatccacaggggctttgagcgggagtcatgggaaccagtcaataacggatcgggtacatcagaagatttgttctggaaacttgatgcccttcagactttcatccgtgacctacactggcctgaggaagagtttggaaagcacttagagcagcggctaaaactaatggcaagcgacatgattgagtcctgcgtcaagagaaccaggattgcatttgaagttaagctgcaaaaaaccagtcgatcaacagattttcgagtcccacagtcaatatgcaccatgtttaatgttatggttgatgccaaagctcaatcaacaaaactttgcagcatggaaatgggccaggagcatcaataccattcaaaaatagacgaactaattgaagaaaccgttaaggaaatgatcacactcttggtggcaaagtttgtaactatattggaaggcgtactggcaaagttatccagatacgacgaggggactttgttttcttcgtttctgtcatttacggtgaaggcggcatctaagtatgtggacgtacctaaacccgggatggatgtggccgacgcctacgtgactttcgtccgccactctcaggatgtccttcgtgataaggtcaatgaggagatgtatatagaaagsttwtttsakcaatggtacaacagctccatgaacgtcatctgcacctggctgaccgaccggatggacctccagcttcacatttatcagctgaaaacactaattaggatggtaaagaaaacctacagagatttccgattgcaaggggtcctggattccaccttaaacagcaagacctatgagaccattcgaaatcggctcactgtagaggaasstaccgcgtccgtgagtgagggagggggcttgcaaggcatcagcatgaaggacagtgacgaggaagatgaagaagacgactagatcattctctgggtccaagagtccackrggatggagtcctgtaatcaatgcatgtctttagtctgttagttaaccccattagggaattttctgtcaaccaccatgcccatgagatgtttaccaatacagacaccattttagctgcgtkktammaagatymgcacaytggttthvtgswwkacwrkswytaymcmwkycttamamrcwrkkccawggagakayacatwsttmarctgctaggtgtgyccctyktgttagcaraacaaaacgatgcttcaccctgtgctycgtatgtacygataggaagcagacgtgggagccagtgtgtttccaagkctctgtttcacatatgtgggkatcaggkacytaaattagkacataaataaawkaatktamgcacwtwrawmwrmwwrrwwwwrrwmwmmrttttgttctcatcccccgaaactgaaagcaatgggcgtttgtgtcctggcaaacacagctttgcatttttccttgtagtttccccccmccmccaaaaaagttaattattgattaacttggattaataataaagtgrattaattattttaattgtcatggtcaaggggccatgtgatcagacgtagcatcaagcaaggttcagaccaattgtcttctgtggaagtttatcctagtacatgtcacgttttctgtttcaataactgtatatgtaaaaaaaaagtatcgaaatgacaaccctagactataaatgtatttrtaataagatatggatatctcctccagtagactgtaaccatgatttccattatkttgttccacactgtttttatatctgtcacgtacattgcactctgatctgtaactgagcgaccctggggtcctctgtagagctgtttctttctgtggaaagtagtggatccatcttgctttttgccttatataaaagcctacagttgtaaaarwrwrrrraamwrtggcttctcaataaacaattattcaaacgtcmwaaaaaaaaaaaaaaaaa

SEQ ID NO: 2290 - DNA, 3413 bp, Rattus norvegicus
attccatacggcttggttctgcctggatgcacagcatgcctgactgagggctccagacagagttctgcaggaaaattctaaagatcccgagacatttccctgatagattgtgaacatactgactagaagatacaatcttctttcctgctgattgcatgggagaaatttttgaccttcgaacgtggagatgaggttgctatggaaactggtaattctgctgccactcataaactcttgtgcaggtgagagtcgttttactcgtcctatttttatccaggagccacaggatgtcatttttccgttggatttatctagatctgaaattattctgagttgtactgcaagtggatacccttctccccactacaggtggaaacagaatggtacagacattgacttcagcatgacttatcactataggttggatggaggcagtttggccatcagcagccccagaacagatcaagatattggcatataccagtgtctggccaccaatccggtgggcaccattctgagtagaaaagccaaactacagtttgcatatattgaagactttgaaaccaaatccagaagcacggtctctgtccgggaaggtcaaggagtggtactcctctgtggcccaccaccacattttggagaattatcatatgattggaccttcaatgataaccctttgtatgttcaagaggacaagcgacgatttgtatctcaaaacacagggaacttgtacattgccaaagtagaaccgtctgatgtgggcaattatacttgctttgtcacaaacaaagaggcccacagaagtgtccaaggaccacctactcctttagtgcagcgcactgatggtgtcatgggggaatatgagccaaagattgaagtgcgttttcctgaaacaatacaagctgcaaaggattcatctgtaaaactggaatgctttgcccttggaaatccagtccctgatattagttggaggcggttggatggaagcccgatgccagggaaagtcaagtacagcaactcccaagctacccttgaaatccccaagtttcaacaagaggatgaaggcttctatgagtgcgttgcaggtaaccttcgaggaagaaaccttgcaaagggtcaactcattttctatgctcctccagaatgggaacagaaaatccaaaatacatacctttctatctatgacagcttgttttgggaatgcaaagctagtggaaacccaaatccttcgtacacgtggctaaagaatggtgaacgtctcaacacagaagagagaattcagactgaaaatgggactcttatcatcaccatgctgaacgtgtcagactctgggatctaccagtgtgctgcagaaaacaaatatcagacaatttatgcaaatgcagaattgagagttttagcctcagctccagatttctcaaaaaatcccattaaaaaaatttcagttgttcaagttggtggtgacatttcaatcgaatgcaaaccaaacgctttccccaaagcatctatttcctggaaaagaggaacggagaacctgaagcaaagtaaaagagtttttttcttggaggatggtagccttaagatatgcaatgttaccagatcagatgctggatcttatacttgcgtagccacaaatcaatttggcaatgggaaaagcagtggtagtctcatcgtaaaagagcgaacggtcattacagtaccaccgtctaaaatggatgttacagttggagagagcattgtcttaccctgccaggtgtctcatgatcccaccatggaagttctctttgtttggtacttcaatggagatgtcatagatttaaagaaaggagtggctcattttgaacgaattgggggtgaatctgttggggatttgatgataaggaatattcaattaggccattcgggaaaatatctatgcacagtacaaacaacactagaacgcttgtctgctgtcgctgatatcattgtgagaggtcctcctggtcccccagaagatgtaaaagtggagcacatctctagtaccacgtcccagctcagctggagacctggtcctgataataacagccccattcaaatttttaccattcagactcggacacccttctctgtgggctggcaagctgttgccacagtccctgaaattctcaatggacagacatacaatgcaacagtcattggtttgagtccttgggtggaatatgaatttcgtgttgttgctgggaacaacattggaattggagagccaagcaaaccatcagagttgctgagaaccaaagcatcaatccccaatgtggcaccagtaaatatcaatggaggtggtgggagcagatcggaacttgtcattacgtgggagcctattccagaagaactacagaatggagaggggtttggatatatcatcatgttccggccagtgggctcaacaacctggatgaaagaaaaggtggctcttgtagaatcttcaaagttcatctacagaaatgaaagcatcatgcctttgtctccctttgaagtcaaagtgggagtgtacaacaatgaaggcgaaggttccctgagtaccgtgtctattgtctactctggggaagatgaacctcggctggctccaagaggaacttctgtccagagtttttctgcttctgacatggaggtttcctggaatgccattgcttggaatagaaacactggaagagtgctgggctatgaggtcttatactggactgacaactccaaagaatctatgattgggaaaattagagtcagtggaaatgtcacaaccaagaatattacagggctaagagctaatacgatttactttgcttctgtgagagcctacaacactgcagggacaggaccctcaagtccaccagttaatgtcaccacgaaaaagtccccacctagccaaccaccagcaaacattgcctggaagctgtcaaattccaaattatgcctgaactgggagcatgtaaaaactatggaaaatgagtctgaagtgctgggctacaagatcctctatcggcagaaccgacagagtaaaactcatgtcttggaaacaaataatacatcagctgagctactggttccatttgaagaagactatttgatcgaaatcagaacagtcagtgatggtggagacggaagcagtagtgaggaaatcagaattccaaaaatgtcaagtttgagttccgtgggagttcagatcttgaagcccagtacccagttcctgacaatggttggatttttttactgttttgttattcagccactttcacgatgaatcaatctatggatctttgggaattttctgagagcaaatcattctgtaaatacgttctccagcctccatcacgagacatattcttaatacagacttgtttggaaagaaaatgtatattactaagctcttgtctcgtgcc

SEQ ID NO: 2291 - DNA, 487 bp, Rattus norvegicus
agaacagacaagtcccacacagcaactcggtgcagacctagcagacaccatgaggaccctctctctgctcactctgctggccctgactgcattctgcctctctgacctggcaggtgcaaagcccagcgactctgagtctgacaaagccttcatgtccaagcaggagggcagtaaggtggtgaatagactccggcgctacctcaacaatggacttggagccccagccccctacccagatcccctggagcctcacagggaggtgtgtgagctcaaccccaattgtgacgagctagcggaccacattggcttccaggacgcctacaagcgcatctatggcaccaccgtttagggcatgtgttgccctggagcccaacggcagcttcagctttggctactctccagsactcgaccctccctgttccctctctctgcctcgaaagtatggacggcacagctgctccaaaataaagtccagatgaggaacggt

SEQ ID NO: 2292 - DNA, 2159 bp, Rattus norvegicus
  misc_feature (2143)..(2143): n is a, c, g, or t
ccggtgatggccggcagacagtctggttggagccaggcggctcttctccagttccttcttggcatgtgcctaatggtgatgccacccatacaagcccggagtctgcgctttgttaccttgctgtatcgacacggagatcggtcaccagtgaaggcatatcctaaggacccctatcaggaagagaaatggccccagggatttggtcagctaaccaaggaagggatgctacagcattgggagctgggccaggccctgcggcaacgctaccatggctttctgaacgcctcttaccacaggcaagaggtttacgtgcgaagcacagactttgaccgtactctcatgagtgcagaggccaacctggccggactcttccctcccactgaagttcagcacttcaacccgaacatttcatggcagcctatccctgtccacaccgtgcccattactgaagacaggttgctgaagtttcctttgggtccatgtccccgttatgagcagttgcagaacgagactcggcagacaccagagtatcagaacatgagtattcagaatgcacaatttctggacatggtggccaatgagacagggcttatgaacttgaccctagagaccatctggaatgtgtatgacacactcttttgtgagcaaacacatgggctgctcctgccaccctgggcctctccccaaaccgtgcaggctctgagccagctaaaggacttcagcttcctcttcctcttcgggatccacgatcaagtacagaaggcccggcttcaggggggagttctgctggctcaaatattgaagaatctgaccctaatggcaactacctctcaattccctaagcttctggtttattctgcgcatgacactaccctggttgctctgcaaatggcactgaatgtctacaatggtaaacaagccccctatgcttcctgccacatatttgaactgtaccaggaagataatgggaatttctcagtcgagatgtactttcggaatgacagtaagaaggcaccctggccactgaccctgcctggctgtcctcaccgttgcccactgcaggacttccttcgcctcacagaacctgtcatacccaaggactggcagaaggagtgccagctagcaagcgatactgcagacacagaggtgattgtggcactggctgtctgtggctccatcctcttccttctaatagtgttgctcctcactgtcctcttccggatgcaggcccagcctcctggctaccaccatgttgcagacagggaagaccatgcttgacaaccactcagtccccttccctctgcctcctaggggatgtgggctgagtccttgctcctgactattgccgatcccagagggacaggtttagccttcctgattacctacgcccamaygartgagtgaggctgggctggtcgcacgtcacctgtgacttaccatcctcatgcctgatgtttmccatgtactgtgttggacactggctttctctaaatgggatttgcctcttctatacwccctaaggacttgagatacagacaagcattcaggttttactcaagaccttgggattaaawaamcaaaacaacaacagaaaaaaaamcccaamccctgaagaagctggwacttratctgtctagctcttcccccwasccttgmtmtttgtmttstagcccatatctttggcaaatggyttggagmcattgtcccytgrtayttttgcagttcatataaatggctcattttatatggatcacccaacagcaaagtttccctctgaytgaggcctgccgtcagtgtcaacctcaggcaggttgaaggacactggtgytscacmtggwtgacagtgggasgacacaggagtgaaacacatggaatcatgacgtgactctccctcagctgggctggactmwtcagggacttgaagtaaatgcagctggtgaactgtacaccttgactgtggcccgaaacagagctgaagtaactccgaggaaawraaggttttghctgvggwrmwrrwwmwrwrmmwwwtttttttccttccccatttctgacatccaagaagcactcttaccaggtcagtactaggtctcaatacaaaagatatgcttttattggttatgtcaaaatgaacataaaaatttanaaaaaaaaaaaaaaaa

SEQ ID NO: 2293 - DNA, 2716 bp, Rattus norvegicus
ttttktttttttttttttdkgackgtcctaagttgtttattggatatgaattttacaaatattacgtcaattakcggtaacggwggagctgaaragtgttgcgccttctccaggctgcacggcgagacccaccaatggwgtggtggaacttgtggccctttccaaggccacggbtcttrcggycascaratgtcagcccacgcatctccctgtgcttgtggactggbytsgtrmyscattgggtgtcgggatttcttctgatagctttatggmatggatcaatgaggataacctyaaaaaatttatatgtggaatcttcaccaacccagtaggaattcaggactctcawagctycacaatggbgcccagctctcyyctmarcawcagactgaaggsttcggcwasttywgtgcgtywacammgsktkgasmggmwtyktagstkcsscwhmswaskvvsysswgckcytccagctaattcccgcgacttctctccagacaccagctccagacagtgactgatgcctctctggttgtgattccagcgcagaaactcgaaggagccctttgcccgccgtcctatttagtcaactctttcctagccgcgaatgaccatgtgtagcggagcaaggttggccctgttggtctacgggataataatgcataacagcgtctcctgttcacctgccgccggactcagcttccctgggatcagaccagaagaagaggcttacgatcaggacggaaacccgctgcaagacttctacgactgggaccctccgggcgcagggagccccgcctccgcgctgcgtgacgcctacgccctttactacccagccgacaggagagatgtcgcccacgaaatccttaacgaagcctaccgcaaagtcttggaccagctgtccgccaggaagtacctgcagtccatggtggccaggggcatgggcgagaacctcgccgccgccgcggtggacgaccgggcaccccttaccaaacgccactcggacggcatcttcacagacagctatagccgctaccgaaaacaaatggctgtcaagaaatacttggcggccgtgctagggaaaaggtataaacagagggttaaaaacaaaggacgccgaatagcgtacttgtagcgatgagttgccagctaccgtgtgtataaaatgaaaagtcgttttccaaattgactgaccagtcatcactcatgtgttctttccaaacatgtatttatgtatcaagtaaagccattaaatgactattttgataataatattgtttttctttttacgaagcactggagaatgcacagatatactttgtggaccaattattgatatatattataagtatatattaagaatatatataggtatagcagagagcaattcataagcgtgcacaaagattgaaaattcgcctgagctgtttatgtttttatataaaatgaatagagaaaatagacaaccattgttttgaatattactcctatttttgtaaactggaattaaaggatagtatttttatccacaaccggcttgaagataccaataatggccatttgtacaaaaaaatgatgccctgctccaggagaattctgaggtaatgacttcccaaattgctgaagggctttctttccttgtgagtctctggggcaggctgcttgaaccccagcctaactaactcaagtgggcattgtcccactggttgcgggacaattccaacactttcattttctttgactatacctttatgtgtatctgtctctcctcagagtcccagcccataaggaaattctaattactgaacagctcgatccaaattgtgcttctccccaaaattcatgtcatttccttggagaagagtcgaggaactgtacagaagagaccagcttggagagaaagcgctcttttttgtacttcctgattcttcagggaactgactatcctaaagctagggcaattggaacaaagtgaaagataaagagaggactggaaggggcagagcatggggtgtggaggaggaccctgtagagggactgatttgagagttgcctcaggtctgagaatctgggggcaagtctagtccctctgcaggttccactgcctgacagatcaggtgctggtgttggaatgaatgaatgcaaagtacaatgtgtttttctccagtgctgtccatgcttttcatgtcgtgaaatsacsaggatcctcccctttgaacactgctctgcagaagccacccctattctttgtggtttttctggagaacctccttcctacccttgccctcctgcactgtttaagaatctcgtatgccattttccactcacttatcttaaatttgtgaatgctagttattttttgttgttgtttgatgcaagcagttactgtgaagtttaggaacccctgtttagctaccacagagtgagtatgcactaaatatgaaccttttgtttcttgtttattgagtttgtaggtaaaatgtatttttctatattatggcttattgcttagtaaakywakyycarmwwmmwrmrrrrmmwwwtgtcctgttagcaattgaggcatttgcagaacactgtacagaccccgctctcccctgtacattcctccctggtggtgcccggtccccacttggggatgggagttttgtagactgtacagaaatcggcaccctattttcttgcagctctcagattttgttaatctggattatac

SEQ ID NO: 2294 - DNA, 2379 bp, Rattus norvegicus
gcggycrcactcggacccgggaagctgtgcgcttttcccgattctccgcggwggatcctakaaacattgtgcamtgaatggtgacacgcgggccgcagtggtgacctcaccacctcswacyacagyccctcacaaggagaggtactttgacagagtcgatgasaacaatccakaatatttgcgggagaggaacatggcaccagaccttsgtcaggacttcaatatgatggagcagaagaagagggtgtctatgattctgcagagtcccgccttstgtgaasagctggagtctatgatacaggagcagtttaagaaggggaagaaccctacaggcctgttggcattacagcagattgcggatttcatgacggcgagtgtgcccaatgtctacccggcagctccacaaggaggaatggccgccctgaacatgagtcttggtatggttactcctgtgaatgaccttagaggatctgwkyckawtkcwtatgacaagggggaraagttactgcgatgtaagctggcagcattttacagactagcagacctctttggctggtctcagcttatctacaatcacatcacaaccagagtgaactctgagcaggagcacttcctcatcgtgcctttcggacttctmtacagtgaagtgactgcgtccagcctggttaaggtcaatctacaaggagacatagtagaccgcggaagtactaacctgggagtcaaccaggccggcttcaccttgcactcggccakkymtsstgcacgaccagatgccaagtgcattgtgcacattcacacaccagcaggggctgcggtctctgcaatgaagtgtgggctcttgcctatttccccggaggcgctttcccttggagaggttgcttatcatgactatcatggcattctggttgatgaagaggaaaaaattttgattcagaagaatctgggccctaaaagcaaggttctcattctccggaatcacgggctcgtgtcagttggagagagtgtggaggaggccttcttttatatccacaaccttgtggttgcatgtgagatccaggttcgaactctggcaagtgctggaggaccagacaacttagttctgctggatcctgggaagtacaaagccaaatcccgttctccagggactccagcaggggaaggctctggatcacctcccaagtggcagattggggagcaggaatttgaagctcttatgcggatgctcgataatctgggctacagaactggctaccccyatcgataccctgctctgagagagagatctaaaaagtacagcgatgtggaagtccctgccagtgtcaccggccactcctttgctagtgacggcgattcgggcacttgctcgccgctcagacacagttttcagaagcagcagcgagagaagacaagatggctgaactctggccggggtgatgacgcttctgaggaggggcagaacggaagcagtcccaagtcgaagactaagtggactaaagaggatggacatagaacttccacctctgctgtccctaacctgtttgttccattgaacactaacccaaaagaggtccaggagatgaggaacaagatycgagagcagaacttacaggacattaagacggcaggacctcagtcgcaggttttgtgtggtgtgatgatggacagaagccttgtccagggggagctcgtgacggcctccaaagccatcattgagaaggaataccagcctcatgtaattgtgagcaccacaggtcccaaccccttcaacacgctcacagaccgtgaactagaggaataccgccgagaggtggagcggaagcagaagggctctgaagagaacctggacgagacaagagagcagaaagagaagagtcctccagaccagtcagctgttcccaacactccgcccagcactcccgtcaagcttgaaggaggccttccccaggagccgacatccagggatggcagcggatgccacrcctccaagccgactccccctgacctctcccctgatgagccttcagaagcacttgscttcccaacagtggcagaggaagcccatgcttccccagacaccactcagccccttgctgaggctgaccctgagccagcctcagcctcagctccaggagctgaagaggtagcctcccctgccactgaggaggggtctcccatggaccctggcagcgatgggtctccaggcaagtccccatccaagaagaagaagaagttccgcaccccgtccttcctgaagaagagcaagaagaagagtgactcctgaaggcccaccctgcatactgtcgtgtctgaaggcctggctctgccaggactccctcctctgtcttgtgttctgtcctctcgtgtaatggaatgcaaaaa

SEQ ID NO: 2295 - DNA, 3893 bp, Rattus norvegicus
aacacgtgactatcaagccaaataagacggacacatttttgtagacggtgggggcgggggactgagttccatcaagcctgggcttggcatcgtatcgctgaaggtgagggtcgactataattaaattctgaacatttcataaaccgctggagttgggagcattgtggaggcgaaaactgagaatgtttctctttgaaatcccaagcttcagaaacttaaaggcccttggaagctgtgtggctggctgtaagatgctcctattatctggtaagaacgaggacagtgcagaaaggagagagctagcggggggggggggggggggggggggggggaaaccgcagcctctgcaaggctgagaaatgtggtcctgcaaatattgaatgaacactgcctctctctgtaggtgccgcctccctgcttccccagtgccgcgtctgcagtaactacaaactatttggtatgctgcgttagtgacgctgccttctcagatatatcgttactaccgaaataacactggcgtgatgttggagcccagtgtcctttttaattattaaactgaggccagtgactgagtcattccacatcccagattctcctcctgtgcttctatttcaagtgcctagtatcttagctttttttttttttttttcacctacacctgagttggttcttagccagttacccaatctgcaaagcccttgcagaacaaatagtattatccaatctccaaacacacactgatggcataaaaataaccaaacccacacaaaaaaactttagggtgagatcatcaggaaaaccaagataggaaaaggtctatctcccatttgctaacccccaacttaccaagcgggagagcgatgaagaaggggagccaacataagatgaacattccgagtacaatgcccaaggttttggcttctttcttttccctggagaacttaaaaagttttacagctatggaactcctggggttgtggcccttggccttggtactgctgagggtgtcctcatgaaagttcttggagtggatcctgctctgctcccagccccatccccgcagagggagcggtgcggggcgcggctgatctccaggccgacccggctggcgctggcgtcggggctgcgcgccttggctggacccgcattgccccctagtgcgaaagtcagggcgcccgggcttccccgcctgatgtcaccgccgtgcagtcagcccagaggcgctcattgaaagcagaccctcttcgcgatcgctgggcggagaaggcaccgcggtccgcagacccgctgcggccgggcacaggcaccccggcccgcgctgctcctcccagcgttccgccagcccggccaggcgcgcctgacgtggaccattaaaacttggagctgtcgcgcctcgtcccctctctcctcctcctcctcctcctccttctgacaggcgagcgagccgctgggtgcaggcaggcgacgtgctgccgggctaggctgcccggggagatgacttctcgccaggaggacgcctctggaaagaagaccacggagggagcaaagtttcagggtagctgaggtgccttggtcgcagcccttccgagcccaatctcctccctggctatggagggcggactttaaaatgaatcccgatctggacaccggccacaacacatcagcacctgcccactggggagagttgaaagatgacaacttcactggccccaaccagacctcgagcaactccacactgccccagctggacgtcaccagggccatctctgtgggcctggtgctgggcgccttcatcctctttgccatcgtgggcaacatcttggtcatcctgtcggtggcctgcaaccggcacctgcggacgcccaccaactactttatcgtcaacctggccattgctgacctgctgttgagtttcacagtactgcccttctccgctaccctagaagtgcttggctactgggtgctgkkgmgywtcttctgtgacatctgggcagcggtagatgtcctgtgctgtacggcctccatcctgagcctatgtgccatctccattgaccgctacattggggtgcgatactctctgcagtaccccacgctggtcacccgcaggaaggccatcttggcgctcctcagtgtgtgggtcttgtccacggtcatctccatcgggcctctccttggatggaaagaacctgcgcccaatgatgacaaagaatgtggggtcaccgaagaacccttctrcgccctcttttsctccctgggctccttctacatcccgctcgcggtcatcctggtcatgtactgccgggtctacatcgtggccaagaggaccaccaagaatctggaggcgggagtcatgaaggaaatgtccaactccaaggagctgaccctgaggatccactccaagaactttcatgaggacaccctcagcagtaccaaggccaagggccacaaccccaggagttccatagctgtcaaactttttaagttctccagggaaaagaaagcagccaaaaccttgggcattgtagtyrgartgtwcawctwatgytgkctsycyttcttcatcgcwcyccygcwtggctccctgttctccaccctaaagcccccggacgccgtgttcaaggtggtgttctggctgggctacttcaacagctgcctcaatcccatcatctacccgtgctccagcaaggagttcaagcgcgccttcatgcgtatccttgggtgccagtgccgcggtggccgccgccgccgccgccgtcgccgtctaggcgcgtgcgcttacacctaccggccgtggacccgcggcggctcgctggagagatcacagtcgcggaaggactctctggatgacagcggcagctgcatgagcggcmmgmagaggaccctgccctcggcgtcgcccagcccgggctacctgggtcgaggaacgcagccacccgtggagctgtrcgccttccccgagtggaaacccggggcgctgctcagcttgccagagcctcctggccgccgcggccgtctcgactctgggccactcttcaccttcaagctcctgggcgatcctgagagcccgggaaccgaaggcgacaccagcaacgggggctgcgacwccacgaccgacctggccaacgggcagcccggcttcaagagcaacatgcccctggcgcccgggcacttttagggtcccttttcatcctccccctcaacacactcacacatcggggtgggggagaacaccatcgtaggggcgggagggcgcgtggssggagtgtcagccctaggtagacacagggtcgcaagggsmcaaggggggaggggggcggggagagggscagctgcttttcyggcaggggcatgggtgccaggtacagcgaagagctgggctgagcatgctgagagcgtggggggccccccbagysgktccgggacttaagtctctctctcttctctctctgtatatacataaaatgagttcskmtattcgtatttatctgtgggtacacgtgcgtgtgtctgttcggtgtacgtgtgggctgcatgggtgtgagtgtgaggcctgcccgcacgcgcgtgccggggcagagcgagtgcgccccstggtgacgtccaggtgtgttgtttgtctcttgactttgtacctcycaagcccctccctgwwctctagtcaatgctggcactttgataggatcggaaaacaagtcagatattaaagatcatttctcctgtgmramwwwrarwrawwwrtgaaggagagccttgcccttcctcttccttcaggtccaatcaaatcctaggacttttctttgggggcagacaagggaactactattattcgtgacattcttagtattgtcatatttattattacaattatatttattcatctttatcatatttac

SEQ ID NO: 2296 - DNA, 4136 bp, Rattus norvegicus
cgggactctccaggccggctcaggcaccggactgtaggtgtatttggagggatttggaggctggagaccccaggaagcacgcaggcgggagcaggcaaggggcggagccccgggcccggccaaggtggccgtcagagggtctgcggggaggcagtagcttgacccaaggcgaccagggaacttcagacggtagcacgccactcaaacaaattaacttgacatcgcaagctgggcgggctggtacgacatcctgacttcagcatccagctgttcctgggcagacagagggccaacaggtgttcctgtggaagaagccaggacaaggactccagaaaacatctcgggcagcctctacatgatgtcacttctcaggactcgaggaccagccaccctacacctctactacagagaaggcagaaatggagacccaaaggccatcactcctgctctgtcactaaccactctgtaatcatgtctccccaccagaaggtgtgaaccgcaccagggccgtggagttctcgggctcccaatccactgacacctttacctgtcccctgaagagaaggcaacgctatggcatcgtacagctgctgtttggccctmttggctcttgcctggcactcctctgcctatgggcctgaccagcgagcccaaaagaagggggacattatcctaggaggtctctttcctatccattttggagtagcagccaaagatcaagatctgaagtcaagaccagagtctgtggagtgcattaggtataacttccgtggattccgatggttacaagccatgatattcgccatagaggagataaacagcagcccctcccttcttcccaacatgacactgggatataggatatttgacacctgtaacaccgtctccaaggcgctggaagccaccttgagttttgttgcccagaacaaaatcgattctttgaacctggacgagttctgcaactgctctgagcacatcccttcgaccattgccgtggtgggagccaccggctccggtgtctccacggcggtagccaacctgctgggacttttctacatcccccaggtgagctacgcctcctccagcaggctcctcagcaataagaaccagtacaaatccttcctccgcaccattcccaatgacgaacaccaggcaaccgcgatggccgacatcatcgagtacttccgctggaactgggtgggcacaattgcagctgatgacgactatggcagacctggcattgagaagttccgagaggaagccgaagagagggatatctgcattgattttagcgagctcatctcccagtactctgacgaggaagagatccagcaggtggtcgaagtgatccaraactctacggccaaggtcattgtcgttttctccagcggcccggacctagaacctctcatcaaggagattgtgcggcgtaacatcacaggcaggatctggctggctagcgaggcctgggccagttcctcgctgattgctatgcctgagtatttccatgtagtcgggggcaccattgggttcggtctgaaggctgggcagattccaggcttcmgagaattcctacagaaagttcatcctaggaagtctgtccacaatggttttgccaaagagttttgggaagaaacttttaattgccacctccaagaaggcgcaaaaggacctttacctgtggacaccttcgtgagaagtcacgaagaaggtggcaacaggttactcaatagctctactgccttccgacccctctgcacaggggatgagaacatcaacagtgtggagaccccttacatggattacgaacatttacggatatcctacaatgtgtacttagccgtctactccattgcgcatgccctacaagatatatacacctgcttacccggaagagggcttttcaccaacgggtcctgtgcagacatcaagaaggttgaggcctggcaggtcttgaagcacctacggcacctgaacttcaccaacaacatgggggagcaggtgaccttcgatgagtgtggtgatctggtggggaactattctatcatcaactggcacctctccccagaggacggctccattgtgttcaaggaagttgggtactacaatgtgtatgccaagaagggagaaagactcttcatcaatgaggagaagatcttgtggagtgggttctccagagaggtgcctttctccaattgcagccgggactgtcaggcagggaccaggaaggggatcatcgagggagagcccacctgctgctttgagtgtgtggagtgtcctgatggagagtacagtggagagacagatgcgagtgcctgtgacaagtgcccggatgacttctggtccaatgagaaccacacttcttgcattgccaaggagattgagtttctggcgtggaccgagccctttggaatcgctctcactctctttgcggtgctgggcattttcctgaccgcctttgtgctgggtgtcttcatcaagttccgaaacacacctatcgtcaaggccaccaaccgagaactgtcctacctcctgctcttctccctactctgctgcttctccagctccttgttcttcattggggagccccaggactggacgtgccgcctgcgacagcctgctttcggcatcagctttgtgctctgtatctcgtgcatcttggtgaagaccaatcgcgtcctcctggtatttgaagccaagatacccaccagcttccaccggaagtggtgggggctcaacctgcagttcctgctggttttcctctgcaccttcatgcagatcctcatctgcatcatctggctctacacggcgcccccctctagctaccgcaaccatgagctggaagacgaaatcatcttcatcacgtgccatgagggctcactcatggcacttggctccctgatcggctatacctgcctgctggctgccatctgcttcttctttgccttcaagtccaggaagttaccagagaacttcaacgaagccaagttcattaccttcagcatgctcatcttcttcatcgtctggatctccttcattccagcctatgccagcacctacggcaagtttgtctctgccgtagaggtgatcgccattttggcagccagctttggcttactagcctgcatcttcttcaacaaggtctacattatcctcttcaagccttcccggaacaccattgaggaagtccgctccagcaccgcagcacatgctttcaaagtagcagcccgcgccactctacgccgtcccaacatctcccggaagcggtccagcagccttggaggctccaccggctccattccctcctcctccatcagcagcaaaagcaacagcgaagaccggttcccgcagccagagaggcagaagcaacagcaaccgctgtccctgacccagcaagaacagcagcagcagcccctgaccctccacccacagcaacagcagcagccacagcagccgagatgcaaacagaaggtcatcttcggcagtggtacggtcaccttctctctgagttttgacgagcctcagaagaatgccatggcccacaggaactccatgcgtcagaactccctggaggcccagaggagcaacgacaccttgggcagacaccaggccctgcttcccctacagtgtgcagatgcggactcagaaatgaccattcaggaaacgggcctgcaagggcccatggtgggggaccaccagccagaratggaaagctcagatgaaatgtccccagcgctggtcatgtccacctctcggagcttcgtcattagtggtggaggtagctctgtgacggaaaacgtattacactcctaatggagggaaaggctatccagttgagaggtttttcttagagccctgagcaaaaggatgggtccttcctttcttcccaggaagccagggagagtaggtacgtcaaagcctgtactcagttgcactgctttgaatgacagtgaactgactggtgtgctctttagagttaaaagaagagccatgttttggggtcgttttccagagctcagtatcacacctgggtttgctgaagtcttttcctctgctctatccaccatcagttcagacgaaagcaaggctctaagctacccatctgcttccctcaaaaaaaaaaaaaaaacctgcag

SEQ ID NO: 2297 - DNA, 2078 bp, Rattus norvegicus
gcctagaggcagacactcactatggggcgcctggaggttctgtttcttggcctcacctgctgcttggcagctgcttgtgctgcaaagttgggtgctstgtacacagaaggcggttttgtggagggcgtcaacaagaaactcagtctcttgggtggtgactctgttgacatcttcaagggcatcccctttgctaccgccaagaccctggagaatcctcagcgtcaccctggctggcaagggacactgaaggctacagacttcaagaaacgatgtctacaagccaccatcacccaggatgatacctatgggcaagaagactgcctctatctcaacatctgggtccctcagggcaggaagcaagtgtctcatgacctgcctgtgatrgtctggatctatggaggtgccttcctcatggggtctggccagggagccaattttctcaagaattacctgtatgatggggaagagatcgccactagagscaatgtcattgtggtcaccttcaactaccgtgtcggacccttgggtttccttagcaccggagatgctaaccttccaggtaactttggacttcgagatcagcacatggctattgcctgggtgaagaggaacattgcagcctttggaggagaccccgataacatcaccatctttggggaatctgctggagstgccaktgtctctctgcagaccctctccccatacaacaagggcctcatccggcgagccatcagtcagagtggtgtggcactgagcccctgggccatccaggagaatccacttttctgggccaaaacgatcgctaagaaggtgggatgccccacagaggataccgccaagatggctgggtgtctgaagatcacagatccccgagccttgacactggcctacaggttgcccttgaaaagccaggagtaccccattgtgcactacctggccttcatccctgtcgtcgatggtgacttcattcctgatgatcccatcaacctgtacgacaacgctgctgacattgactacttagcgggtattaatgacatggatggccacctgtttgctacagttgacgtgcccgccatcgacaaggccaagcaggatgtcacagaggaggacttctacaggctagtcagtggacacactgtcgccaaggggcttaaaggcacccaagccacctttgacatctacactgwgtcctgggcccaggacccgtcccaggagaacatgaagaagacagtggtggcctttgagactgacatactcttcctgatccccacagagayggctctggcccagcacagagcccatgccaagagtgccaagacctactcttacctgttttcccacccttcacgaatgcctatctacccaaaatggatgggggcagrccacgctgatgacctccagtacgtctttgggaagccctttgccaccccactgggctaccgggcccaagacaggactgtctccaaggccatgattgcctactggaccaactttgccaagagtggggaccccaacatgggcaactcacccgtgcccacacactggtacccttataccayggagaatggtaactacctggacatcaataagaaaataaccagcacctccatgaaggagcacctaagggaaaagttcctcaagttctgggctgtgacattcgagatgctgcccactgtggttggtgaccacactccccctgaggatgactcagaggctgcccccgtcccacctacagacgactcccaggktgktcctgtcccacctacagatgactctcagacaacaccggtgcccccaacagacaactctcaggctggtgactctgtggaggctcagatgcctggtcccattgssttctaaagtcctataaaccggggctagagatggctcaggagctaagagctcttcttccactgttcttctgaaggtcctgtgttcaattcccagcacccacattsstkcttacagctgkctgattccgtctactggtgtgcagatgtacacgcagacaaagcgcctatatatagaaarttcatacataaataaagtcttataaccybkraawwmaaaaaaaaaaa

SEQ ID NO: 2298 - DNA, 1645 bp, Rattus norvegicus
cgtccttgtttctgacatcgtgagctaacaataaggtatctgcggctgtgggaaaccggatgagtagtcccagctgggagacctcaggcgcagctgaccccatggtcaagggtagaagcctggcttatctctccacctgccttgttccccgatactttatcaggaagagtggaaaggtgccgcagtttggaactccagcctctccctccccatgggacttgatccagatgtgaggggaactgtccccggggacccctgtcagcgtttaaaaaggcctcagatctcagtcttggcctgaccttctcaccatgaagagactactgattctgagtctgctgctggaagcagtctgtggcaatgagaactttgtgggacaccaggttctccgaatctctgcagccgatgaagcccaggtgcagaaagtgaaggagttggaggacctggagcacttgcagttggacttctggcgggacgctgcccgggccggtatccccattgatgtcagagtgcccttccccagcatccaatctgtgaaagcattcttggaatatcatggtattagctatgagatcatgattgaagatgtgcagttactgctcgatgaggagaaacagcagatgtctgccttccaggccagggccttgtccactgactctttcaattatgccacctatcatacgctggatgagatctacgaattcatggacctgctggtggctgagcacccacagcttgtgagcaagatscasatcggcaacacctttgaaggtykccccatycatgtgctgaagttcagcactggagggaccaatcgcccagcaatytggatcgacactggcatccattctagggagtgggtcacccaggctagtggggtctggtttgcaaagaagrtcaccaaagactatggccaggaccccaccttcacagccgttcttgacaacatggacatcttcytggagattgtcaccaaccctgatggttttgcctacacccacaaaacgaatcgcatgtggcgcaagactcgatcacacacccagggctccctctgtgttggtgtggaccccaacaggaactgggacgctggyttwsrsrwggccggagcaagtagcaacccctgctcggaaacttaccgaggcaaatttcccaactctgaggtggaggtcaagtccatcgtggactttgtgacgagccatgggaacatcaaggcctwcatctccatccayagctattcccagctcctkctctacccctacggctacacgtcggaaccagcccctgaccaggcagagctggatcagctagctaagtctgctgtgacagccttgacgtytytacacgggaccragttcaagtatggcagcatcatcgawwcaatctatcaagccagtgggagcactatcgattggacctacagccagggcatcaagtactctttcacttttgaactgagggacactgggcttagaggattcctgctgcctgccyyccagatcatccctacggcggaggagaymtggswggcccttttgaccatcatggaccacacagtcaaacacccctactgaaagcagcccttatcccccacctctttcttctccttagtcccaataaagtctgattgtataaraaaaaaaaaaaaaaa

SEQ ID NO: 2299 - DNA, 1494 bp, Rattus norvegicus
tgggccaatacaatcagggctcttctcaccgccatggctccagaagttgggggcggatcgtagtgtcaagcgctgattggctgagcagagaggacatcattcaactatgccatgaaggaggctgctgtggaggctctgaagaagaaaggatgggaggtggtcgaatctgacctctatgctatgaactttaaccccctcatttccagaaacgacatcacaggggagccgaaggactcggagaactttcagtaccctgttgagtcatctctggcgtataaggaaggcsgcctgagcccggatattgtagctgaacagaaaaagctggaagctgcagacctrgtgatatttcagttcccattgtattggtttggggtgcccgccattctgaaaggctggtttgagagagtgcttgtagcaggattcgcctacacgtatgccaccatgtatgacmarggtcctttccagaataagaagaccttgctttccatcaccaccgggggcagcggctccatgtactctctgcagggtgtccacggggacatgaacgtcattctctggccaattcagagtggcattctgcgcttctgwggcttccaggtcttagaacctcaactggtgtacagcattggccacaccccacccgatgcccgcgtgcaggtcctggaagggtggaagaagcgtctggagacygtctgggaggagtcaccactctactttgctccaagcagcttgtttgacctaaacttccaggcaggattcttactgaaaaaagaggttcaagaggagcagaaaaagaacaagtttggcctttctgtgggccatcatttgggcaagtccattccagccgasraccagatcaaagctagaaaataaggttttccataccatgtagttagacccaggtttctttttccccagtttgcctggcttgcyttcagttttcgcctttgttccacaaggataggaaaaggaggaggctcgcctcatgcgttttkggatagttctgccacggctgtgacagcaaaatgaacgaggtcagattakgggcctyargtggcmtgggatatgaatcagggagargkgtwgyyrmkmscggbgaaaatactcttctaggtcytttgtacactatargcttttttcttcgggctagccytgsctaaatgsmatycaatcctycacccacttgttgctattagtwacctctctgkggtttagggcagkagggaattgytmaaacawtggctgagggactaacttgtttagcrgttasctaaagcctgtttatgatccatcctggtttcaattactgtgcagtgactgacaagcctcgggggattgctctccagctcttctctgccttgtacatagcacacccaggtcctgggaaatgaatacaaaaacmggwmwmmrmmwmawwmwwrmwawwmwwwmwttgtgtgtgtgtgtgtggaaataaatggatatttcacacgtcaraaaaaaaaaaaaaaaaaa

SEQ ID NO: 2300 - DNA, 1398 bp, Rattus norvegicus
gccgcagcagccaggcgcggagatgggggtgccsgaacgtcccaccctgctgcttttactatccttgctactgattcctctgggcctcccagtcctctgcgctcccccacgcctcatttgcgacagtcgcgttctggagaggtacatcttggaggccaaggaggcagaaaatgtcacaatgggctgtgcagaaggtcccagactgagtgagaatattaccgtcccagataccaaagtcaacttctacgcttggaaaagaatgaaggtggaagaacaggctgtagaagtttggcaaggcctgtctctgctctcagaagccatcctgcaggcccaggctctgcaggccaattcctcccagccaccagagagtcttcagcttcatatagacaaagccatcagtgggctacgtagcctcacttcactgcttcgggtgctgggagctcagaaggaattgatgtcgcctccagacgccacccaagccgctccactccgaacactcacagcggatactttctgcaagctcttccgggtctactccaacttcctccgggggaaactgaagctgtacacgggggaggcctgcaggagaggggacaggtgacctgccactgccgtgtacccgccaactcgctcaccgtcactgtgtcacgccaaccctccaccactcccaaccctcatcaaacggggttgtttgttaccttcttaccggcctgtcctacggacactccagcagtgatattctgggggccagaagaacttcccagagctccattctgagcctgaggccccagagcaggagagactgagagaaccagctcggatttgtttagttttcgttsagasrggaaggtctcacatagcccaggctggcctggaactcgctatgtagtcaaggacgacgtcgttgaactcatgacctttctgcttccatttcttgagtgctgagattacaaatgccmtggccctatttacggggtgctggacgtggaagctggggcttcctgatgcraygtgagtgagcttccagaggctgacttagaactcaggggcagagacagccaaactcatctagtgccctgccggaactgtaatccacgccagccacctccccccccacmcccccccmcacacagggcaagctttgggctccaatctttgtggcatctacgaagaacacagggcctggagaatgtagggggcaagacatggattctttaggtctcatagggtttccccagacagcacgggccctgcactggacaacagagggtcacgaagccatgaagacagaatggccactgactctcagctttcatgggagggaaggggtttgaggttttgtgtcttttaaaaaataccactggcaacagccgaaatcaccaaaaaaaaaaaaaaaaa

SEQ ID NO: 2301 - DNA, 4335 bp, Rattus norvegicus
ccgggccggagccgcaatgatcatcatggagctggcggcctggtgccgctgggggttcctcctcgccctcctgccccccggaatcgcgggcacccaagtgtgtaccggcacagacatgaagttgcggctccctgccagtcctgagacccacctggacatgctccgccacctgtaccagggctgtcaggtagtgcagggcaacttggagcttacctacgtgcctgccaatgccagcctctcattcctgcaggacatccaggaagttcagggttacatgctcatcgctcacaaccaggtgaagcgcgtcccactgcaaaggctgcgcatcgtgagagggacccagctctttgaggacaagtatgccctggctgtgctagacaaccgagatcctcaggacaatgtcgccgcctccaccccaggcagaaccccagaggggctgcgggagctgcagcttcgaagtctcacagagatcctgaagggaggagttttgatccgtgggaaccctcagctctgctaccaggacatggttttgtggaaggacgtcttccgcaagaataaccaactggctcctgtcgatatagacaccaatcgttcccgggcctgtccaccttgtgcccccgcctgcaaagacaatcactgttggggtgagagtccggaagactgtcagatcttgactggcaccatctgtaccagtggttgtgcccggtgcaagggccggctgcccactgactgctgccatgagcagtgtgccgcaggctgcacgggccccaagcattctgactgcctggcctgcctccacttcaatcatagtggtatctgtgagctgcactgcccagccctcgtcacctacaacacagacacctttgagtccatgcacaaccctgagggtcgctacacctttggtgccagctgcgtgaccacctgcccctacaactacctgtctacggaagtgggatcctgcactctggtgtgtcccccgaataaccaagaggtcacagctgaggacggaacacagcgttgtgagaaatgcagcaagccctgtgctcgagtgtgctatggtctgggcatggagcaccttcgaggggcgagggccatcaccagtgacaatgtccaggagtttgatggctgcaagaagatctttgggagcctggcatttttgccggagagctttgatggggacccctcctccggcattgctccgctgaggcctgagcagctccaagtgttcgaaaccctggaggagatcacaggttacctgtacatctcagcatggccagacagtctccgtgacctcagtgtcttccagaaccttcgaatcattcggggacggattctccacgatggcgcgtactcattgacactgcaaggcctggggatccactcgctggggctgcgctcactgcgggagctgggcagtggattggctctgattcaccgcaacgcccatctctgctttgtacacactgtaccttgggaccagctcttccggaacccacatcaggccctgctccacagtgggaaccggccggaagaggacttgtgcgtctcgagcggcttggtctgtaactcactgtgtgcccacgggcactgctgggggccagggcccacccagtgtgtcaactgcagtcatttccttcggggccaggagtgtgtggaggagtgccgagtatggaaggggctcccccgggagtatgtgagtgacaagcgctgtctgccgtgtcaccccgagtgtcagcctcaaaacagctcagagacctgctttggatcggaggctgatcagtgtgcagcctgcgcccactacaaggactcgtcctcctgtgtggctcgctgccccagtggtgtgaaaccggacctctcctacatgcccatctggaagtacccggatgaggagggcatatgccagccgtgccccatcaactgcacccactcctgtgtggatctggatgaacgaggctgcccagcagagcagagagccagcccggtgacattcatcattgcaactgtagwgggcgtcctgctgttcctgatcttagtggtggtcgttggaatcctaatcaaacgaaggagacagaagatccggaagtatacgatgcgtaggctgctgcaggaaactgagttagtggagccgctgacgcccagcggagcaatgcccaaccaggctcagatgcggatcctaaaagagacggagctaaggaaggtgaaggtgcttggatcaggagcttttggcactgtctacaagggcatctggatcccagatggggagaatgtgaaaatccccgtggctatcaaggtgttgagagaaaacacatctcctaaagccaacaaagaaattctagatgaagcgtatgtgatggctggtgtgggttctccgtatgtgtcccgcctcctgggcatctgcctgacatccacagtacagctggtgacacagcttatgccctacggctgccttctggaccatgtccgagaacaccgaggtcgcctaggctcccaggacctgctcaactggtgtgttcagattgccaaggggatgagctacctggaggacgtgcggcttgtacacagggacctggctgcccggaatgtgctagtcaagagtcccaaccacgtcaagattacagatttcgggctggctcggctgctggacattgatgagacagagtaccatgcagatgggggcaaggtgcccatcaaatggatggcattggaatctattctcagacgccggttcacccatcagagtgatgtgtggagctatggagtgactgtgtgggagctgatgacttttggggccaaaccttacgatggaatcccagcccgggagatccctgatttgctggagaagggagaacgcctacctcagcctccaatcwssassattgatgtctacatgattatggtcaaatgttggatgattgactctgaatgtcgcccgagattccgggagttggtgtcagaattttcacgtatggcgagggacccccagcgttttgtggtcatccagaacgaggacttgggcccatccagccccatggacagtaccttctaccgttcactgctggaagatgatgacatgggtgacctggtagacgctgaagagtatctggtrccccagcagggattcttctccccggaccctaccccaggcactgggagcacagcccatakaaggcaccgcagctcgtccaccargagtggaggtggtgagctgacactgggcctggagccctcggaagaagggccccccagatctccactggctccctcggaaggggctggctccgatgtgtttgatggtgacctggcaatgggggtaaccaaagggctgcagagcctctctccacatgacctcagccctctacagcggtacagcgaggaccccacattacctctgccccccgagactgatggctatgttgctcccctggcctgcagcccccagcccgagtatgtgaaccaatcagaggttcagcctcagcctcctttaaccccagagggtcctctgmctcctgtccggcctgctggtgctactctagaaagacccaagactctctctcctgggaagaatggggttgtcaaagacgtttttgccttcgggggtgctgtggagaaccctgaatacttagtaccgagagaaggcactgyctstmcgccccacccttstmctgccttcagsccagcctttgacaacctmtattactggkaccagaactcatcggagcaggggcctccaccaagtaactttgaagggacccccactgcagagaaccctgagtacctaggcctggatgtacctgtatgagacgtgtgcagacgtcctgtgctttcagagtggggaaggcctgacttgtggtctccatcgccacaaagcagggagagggtcctctggccacattacatccagggcagacggctctaccaggaacctgccccgaggaacctttccttgctgcttgaatcctgagtggttaagagggccytgcctggctkgragagayggcactggacggcctctggattacagaccctkccctgacagactatagggtccagtgggtatcatggccatggcttcttgcctggcctggctctsttggttctgaggactgaggaaagctcagcctwgaagggaagaggtcyggagggaacatcctgggaacaggacaagcyactaggaytgagacacatgcatcccaacagggggctgcactttcatccagrmmarwmwwwrwamaragtgtattttgttctgtttttacttttgcttttttttttaaaaaaagwtgaaataarramamrrarrrararwrrawrwwarggaaaaaaaaaaaaaaaaaa

SEQ ID NO: 2302 - DNA, 3222 bp, Rattus norvegicus
gctcgaaktccgaagcagccccggggtgacacccagcacgtacgtctgtggcagagcaaagccaagcgggggacgttcgssgaggagtcgcgggagggtccagctccctgtggctgaatcgagcccgttcctgcgcccagaccgcgggggacacttgaacagtagagaccccaagaccaccgagctgatggcatcttccacgccttcgcctgcaacctcctcgaacgcgggagcggatcctaatactaccaacctgcgtcctacaacatatgatacttggtgtggcgtagcccatggatgcaccagaaaactgggcctgaagatctgtggyttcttgcaaaggaccaatagcctggaagagaagagtcgtcttgtgagygccttcagggagaggcaggcctccaagaacctgctttcctgtgaaaacagtgaccctggtgcccgcttccggcgcacagagacggacttctccaacctgtttgctcaagatctgsttccagctaagaacggggaggagcaaactgtgcagttcttactggaggtggttgacatactcctcaactatgtccgcaagacgtttgatcgctccaccaaggttttggacttccaccacccacaccagttgctggaaggcatggaaggttttaatttggagctgtctgaccaccccgagtctctggagcagatcctggttgactgtagagacaccctaaagtacggggttcgcacaggtcaccctcggtttttcaaccagctctctactggtttggatatcattggtttagctggcgaatggctgacatcaacykcswrtaccaatatgttcacatatgaaattgcacccgtgtttgttcttatggaacagatyacacttaagaagatgcgagagatcattggatggtcaaataaagatggtgatgggatattttctcctgggggagccatatccaacatgtacagcatcatggcggctcggtacaagtactttccagaagtgaaaacaaaaggcatggcggctgtgcccaaactggtcctctysacctcagmasacagtcactattccataaagaaggctggggctgcgcttggctttggaactgacaatgtgatcctgataaagtgcaatgaaagggggaagataattccagctgatttagaggcaaaaattcttgatgccaaacaaaagggatttgttcccctttatgtcaatgcaaccgcaggcacgaytgtttatggagckttkgakccgatccaggagattgcagacatatgtgagaaatacaacctttggctgcatgtggatgctgcctggggtggtgggctgckcatgtcccggaagcatcgccacaaactcagcggcatagaaagggccaattcagtcacctggaaccctcacaagatgatgggtgtgctgctccagtgttctgccatcctggtcaaggaaaagggtatactccaaggatgcaaccagatgtgtgcaggctacctcttccagccagacaagcagtatgacgtctcctacgatacaggggacaaggcgattcagtgtggccgccatgtggacatcttcaagttctggctgatgtggaaagcaaagggcactgtgggatttgaaaatcagatcaacaaatgcctggagctggctgaatacctctatgccaagattaaaaacagagaagagtttgagatggttttcaatggtgagcctgagcacacaaatgtctgtttctggtacataccacaaagcctccgaggggttccagacagccctgagcgacgagaaaaactacacagggtggctcccaagatcaaagccctgatgatggagtcaggaacaaccatggttggttaccagcctcaaggggacaaggccaacttcttccggatggtcatctccaacccagccgccacccagtctgacatcgatttcctcatcgaggaaatagagaggttgggtcaagatctgtaatccccccccctttgcagaaccgtaatcaccggccatagccctgcccctctggcaccctagaacgcagytctgtcagtagttgasasacctaggccatttcactgaaggaaattataatctcttaaagaatatttgtcacatctcacgtaagcttgtttgttagaattagcgggaaatratgttcttttaaaaaaattgcacattagaaacacagtatatatgtacagttatatatatatatatacctctctctatgtactatgtatgtatagtgaatgtggcttagtcctagaccacagcatgtcgctcgctcccagggaattagcctcacccccagcaattactaagaggctaaccatctcgcaagcaactgcaggacagatggtacccccactgcagtgtcctagggacccakggaaaggccgttgctgggagcctaccrccctgctagagctgtccccacctgaatggatggatgatggatggyaggaagtaccagtagatgacaaatgtcacaccctccctgttagtgccctgctwrgggatatagtagcagagtctttgtcacaattgtgctgttgctgcgttttagagattaatctgtgtaaactgtacattaccgttgtctatctttgggcagggggaagtgcatataatgatttaattgtacgtcagtgagatatttgcttatttatattcaaatatatatcatgttaaagagacatcttgtattttcttcccatttgtaatgtatcttatttawawawtaatggagtaagttctggawactgtttatggtattttcgtgcatttgtgagccaaagagaaaagatgaaaattagtgagacttgcatttatatttgagtgcccttaacataatgatttgaacacatgtgtactgtctggaaacgaattctgatactgwacatagagtggcgttatggaaatcttgcttcagtagcctttgctcttctctttcccccctcaggctgtacgtcaggtgttctcawagcttttctagtaactgttgaaaaataatgactagatctcctgtaattttgtagtagtatatgaccaatctctgtgactcgcttagctgaaacctaaggctatgtttccgaagatctccgatacactgaccagtcccacaagtgtttttgaagacatgaaacccacactgtgcatttagagtatgcaagaagaatataaataaaataaaaaatmttctccatgaamaaaaaaaaaaaaaaaag

SEQ ID NO: 2303 - DNA, 2713 bp, Rattus norvegicus
caggagccagcagaagcaggscaagatggagcggagacgtatcacctctgcacgccgctcctatgcctcctccgagacgatggtcaggggccatggtcctaccagacacctgggtaccattccgcgcctctccctgtctcgaatgacgcctccactccctgccagggtagacttctccctggccggggcgctcaatgccggcttcaaagagactcgggccagcgagcgcgcggagatgatggagctcaatgaccgctttgctagctacatcgagaaggtccgcttcctggaacagcaaaacaaggcgctggcagctgagctgaaccagcttcgagccaaggagcccaccaaactggctgacgtttaccaggcagaacttcgggagctgcggctgcgtctggaccagcttactaccaacagtgcccggctggaggtggagagggacaatctcacacaggacctcggcaccctgaggcagaagctccaagatgaaaccaacctgaggctggaggcggagaacaacctggctgtgtacagacaggaggcggatgaagccaccttggctcgtgtggatctggagaggaaggttgagtcgctggaggaggagatccagttcttgaggaagatccatgaggaggaagttcgagaactccaggagcagctggcccagcagcaggtccacgtggagatggatgtggccaagccagacctcacagcggctctgagagagattcgcactcagtacgaggcagtggccaccagtaacatgcaagaaacagaagagtggtatcggtccaagtttgcagacctcacagacgttgcttcccgcaacgcagagctsstccgccaggccaagcacgaggctaatgactatcgccgccaactgcaggccttgacctgcgaccttgagtccttgcgcggcacgaacgagtccttggagaggcaaatgcgcgaacaggaggagcgccacgckcgggagtcggcsagttaccaggaggcactcgctcggctggaggaggagggccaaagcctcaaggaggagatggcccgccacctgcaggagtaccaggatctactcaacgttaagctagccctggacatcgagatcgccacctacaggaaattgctggagggcgaagaaaaccgcatcaccattcctgtacagactttctccaacctccagatccgagaaaccagcctggacaccaaatctgtgtcagaaggccacctcaagaggaacatcgtggtaaagacggtggagatgcgggatggcgaggtcattaaggagtcgaagcaggagcacaaggatgtgatgtgaggtgkgcccagctgggcggcccttgccatacagtgtgagggcctaaagctccctcctcagatagtcttgtttgctaggcccaattcccatccacaccagtgctccccttscttctgttttwrtgcccacggctcggtcagtgcggagtctcatggacggcacagaccaccctgcatctccaactaacaggataycaccccaaaggcaatcaggaggggaggacccccctcccccagctggttagaactggaagaaagaggaaagacaggggcagggagacttaacaaatcccttccttcatccttsttgttatggaaaccgttgccagagctggaggtctctgggaactggacttttgaagttttcataggcatgctggagcaagacaaacattcagacagaaaggaaaasatcccgaggcaaagaatctctagccagaggcctaggcatctggaagaaccctgacgatgtaggagtgggtagggcagacttgctacctggaatggccactaaggcagtcctgaagggcccccctcykgaggatgaccctcgtgtatcggcccactgagcagccctgcaggttgatgccagagcstgtgaaacttggttcttggcatgtggcaggctctatagcataagctggagagggaaggtgtactggagggtatagaggaggctctctggcccctaagtrtggatgagtcgagaggggggagcccaggaaggctaccccgctcaggctgcaggggtgccatggcggaggaaccggtggagataacttggacaatggagttggaagggtgtgtaggaactagttacwcttggctctgaatccttggaatcaaggaaatgacctgtctctcaaagacctgaaacaggagagagggaktkcatcactgggcagggtacaggcgcgtctcagttgtgaaggtctatcctggttgctcagtcccaacykcgcrycaccctgggcttctcaacctgraagagtcacaaccatccttctgaggctccatcccacaaccactagctgttgttctcwagccaaggccccattccctttcttatgcatgtacggagtmtcgcstagacktaagcgtccatcctgtttgaagttggaactgmcacgttgtgttcaascagcytggtgtggagtgccttcgtattagtgtaccctctcggaagctggttggtgggcaggtgaggaagaaatggagctgaaagtgtcccmtcagttgtcctttcctccccctmtaaggtccctccytttccccaggacatcgtacactcccccccttgtcacctctgctaaccttcagagcagtactgtcacctttactcactgggcaggaaataaagacagtgtcagaggcwwmmaaaaaaaaaaaaaaaaaa

SEQ ID NO: 2304 - DNA, 6837 bp, Rattus norvegicus
ccgagaacggctgcagtcctctgacctgagaccaatagctgtgtctacccggactcagcgtccagctcaccgccactaacgcgccgcgcattggacacctgatccacacaccttcgggcaccagtgaaaaaccgcgacttgattttctggaagaacgcccccagggtgtgggagcggtcgtggaggaccagcaggaggaagcggaggggagaggggcagtagtggaggcagagaaagcgttgaaccagctgtgttggccgaaggcacgaaacggcaaaaggcagcggtgagcatctgtgtggttcccgctgggaacctgcaggcaggaccggcgtgggaacgtggctggcccgcggtggaccgcgtcttcgccacaatggtccggctcctcttgattttcttcccaatgatctttttggagatgtccattttgcccaggatgcctgacagaaaagtattgctggcaggtgcctcgtcccagcgctccgtggcgagaatggacggagatgtcatcatcggagccctcttctcagtccatcaccagcctccagccgagaaggtacccgaaaggaagtgtggggagatcagggaacagtatggtatccagagggtggaggccatgttccacacgttggataagattaacgcggacccggtgctcctgcccaacatcactctgggcagtgagatccgggactcctgctggcactcttcagtggctctcgaacagagcatcgaattcatcagagactccctgatttccatccgagatgagaaggatgggctgaaccgatgcctgcctgatggccagaccctgccccctggcaggactaagaagcctattgctggagtgatcggccctggctccagctctgtggccattcaagtccagaatcttctccagctgttcgacatcccacagatcgcctattctgccacaagcatagacctgagtgacaaaactttgtacaaatacttcctgagggtggtcccttctgacactttgcaggcaagggcgatgctcgacatagtcaagcgttacaactggacctatgtctcagcagtccacacagaagggaattacggcgagagtggaatggatgctttcaaagaactggctgcccaggaaggcctctgcatcgcacactcggacaaaatctacagcaatgctggcgagaagagctttgaccggctcctgcgtaaactccgggagcggcttcccaaggccagggttgtggtctgcttctgcgagggcatgacagtgcggggcttactgagtgccatgcgccgcctgggcgtcgtgggcgagttctcactcattggaagtgatggatgggcagacagagatgaagtcatcgaaggctatgaggtggaagccaacggagggatcacaataaagcttcagtctccagaggtcaggtcatttgatgactacttcctgaagctgaggctggacaccaacacaaggaatccttggttccctgagttctggcaacatcgcttccagtgtcgcctacctggacacctcttggaaaaccccaactttaagaaagtgtgcacaggaaatgaaagcttggaagaaaactatgtccaggacagcaaaatgggatttgtcatcaatgccatctatgccatggcacatgggctgcagaacatgcaccatgctctgtgtcccggccatgtgggcctgtgtgatgctatgaaacccattgatggcaggaagctcctggatttcctcatcaaatcctcttttgtcggagtgtctggagaggaggtgtggttcgatgagaagggggatgctcccggaaggtatgacattatgaatctgcagtacacagaagctaatcgctatgactatgtccacgtggggacctggcatgaaggagtgctgaatattgatgattacaaaatccaratgaacaaaagcggaatggtacgatctgtgtgcagtgagccttgcttaaagggtcagattaaggtcatacggaaaggagaagtgagctgctgctggatctgcacggcctgcaaagagaatgagtttgtgcaggacgagttcacctgcagagcctgtgacctggggtggtggcccaacgcagagctcacaggctgtgagcccattcctgtccgttatcttgagtggagtgacatagaatctatcatagccatcgccttttcttgcctgggcatcctcgtgacgctgtttgtcaccctcatcttcgttctgtaccgggacacacccgtggtcaaatcctccagtagggagctctgctatatcattctggctggtattttcctcggctatgtgtgccctttcaccctcatcgccaaacctactaccacatcctgctacctccagcgcctcctagttggcctctcttctgccatgtgctactctgctttagtgaccaaaaccaatcgtattgcacgcatcctggctggcagcaagaagaagatctgcacccggaagcccagattcatgagcgcttgggcccaagtgatcatagcctccattctgattagtgtacagctaacactagtggtgaccttgatcatcatggagcctcccatgcccattttgtcctacccgagtatcaaggaagtctaccttatctgcaataccagcaacctgggtgtagtggcccctgtgggttacaatggactcctcatcatgagctgtacctactatgccttcaagacccgcaacgtgccggccaacttcaatgaggctaaatacatcgccttcaccatgtacactacctgcatcatctggctggctttcgttcccatttactttgggagcaactacaagatcatcactacctgcttcgcggtgagcctcagtgtgacggtggccctggggtgcatgtttactccgaagatgtacatcatcattgccaaacctgagaggaacgtccgcagtgccttcacgacctctgatgttgtccgcatgcacgtcggtgatggcaaactgccgtgccgctccaacaccttcctcaacattttccggagaaagaagcccggggcagggaatgccaaktskaacgrcargtctgysymakggwcwgmacswggtggmagacagsckcycwrkgsacrksacgtgtggcagcgcctctctgtgcacgtgaagaccaacgagacggcctgtaaccaaacagccgtaatcaaacccctcactaaaagttaccaaggctctggcaagagcctgaccttttcagatgccagcaccaagaccctttacaatgtggaagaagaggacaataccccttctgctcacttcagccctcccagcagcccttctatggtggtgcaccgacgcgggccacccgtggccaccacaccacctctgccaccccatctgaccgcagaagagacccccctgttcctggctgattccgtcatccccaagggcttgcctcctcctctcccgcagcagcagccacagcagccgccccctcagcagcccccgcagcagcccaagtccctgatggaccagctgcaaggcgtagtcaccaacttcggttcggggattccagatttccatgcggtgctggcaggcccggggacaccaggaaacagcctgcgctctctgtacccgcccccgcctccgccgcaacacctgcagatgctgcccctgcacctgagcaccttccaggaggagtccatctcccctcctggggaggacatcgatgatgacagtgagagattcaagctcctgcaggagttcgtgtacgagcgcgaagggaacaccgaagaagatgaattggaagaggaggaggacctgcccacagccagcaagctgacccctgaggattctcctgccctgacgcctccttctcctttccgagattccgtggcctctggcagctcagtgcccagttcccccgtatctgagtcggtcctctgcacccctccaaatgtracctacgcctctgtcattctgagggactacaagcaaagctcttccaccctgtagtgtgtgtgtgtgtgtgggggsggggggagtgcgcatggagaagccagagatgccaaggagtgtcaacccttccagaaatgtgtagaaagcagggtgagggatggggatggaggaccacggtctgcagggaagaaaaaaaaaatgctgcggctgccttaaagaaggagagggacgatgccaactgaacagtggtcctggccaggattgtgactcttgaattattcaaaaaccttctctagaaagaaagggaattatgacaaagcacaattccatatggtatgtaacttttatcgaaaaaaataataaaacgtaaaaataaaatcaacaaaaataatctcttcttttgctcaatcgtgcatacatatatctgcccacactcccgtggtaaaactagaagcgaagcaggccctgcgatggtgccaactgaatcctaagttcatcatcctagtgagcagatggagagagggcaggaggcgggggtaggttcggacaacagctcccatctcagaccttgactgtgctgagtcttcagactcctggactaaggaagacccggggactgaccttatgagggtccctttccactgctgtgatccattgccagcctgtagtcacccgggataaaggcacagtaaccttttgcattcctgtgattccctgtgtttaaggaaaaggaaagtatgagcaaagctatcaccaaaaagagcgccattagaagttacgggggagaaaaaaagagaagcaagatgatatataagcacagggccttgaacaaggtgagcgtgcttcacagattccgtattaatgtacagatacttttggagaggagaaagataacaaggagtgtcaggccgtttgtgaactcacttgcactgtgccaaccaggttctccgctgcccttcagcaaaagaggacaagccgcgttgccaggttttaccttccatttactgtagcaaatactatcaaccagtcggacttctaagattcagtttcagtttcagtacaatgcggtgccactgtttctcccatgtgctatggaaacgaatctatctttgaacttaatgatgtattcatagcaactattactggtttagattttttccttttgtcacaggagtccctggaactagtaactsaragkgttttcctgcgtttcttgtatacatgtgattatgaaattcgtgccatttaatgtcaatttagctgtcactagaagactgtcttttggatatagtataaatatttttatgtaccagtgatgttctccataccacggttaccatgtttctctggaggttgggtctgtggtctgatgtttctcatgtgcagcttcgatgggaattcttctaagtgggatttatttttcagatattttatgatatgagaatgttattaatgaagtaatttgaaagtgcattgtataaaaatggtcaccaagcaatgcgtgacagtaaaaggtccgtttttataaacctgcgcacattgttattaaaatgtaaggttgaaaaggcaatatttagaatatttcagatatatttttaaaaagtttttccacagctacttgagtttcatggtcttctagtatataacaacactcaagtctacccagagtgtctcaactatctgcttgtcaattctgcttaattttattttcatgcatttaaacttttatatctttgttagcatctcttccttatgatcctcatgtgtactattatgtaataaccacatacatgtaatatccacatacatgtaatatccacacatgtaacattcacatacatgtagtccagttattccatcttgaccctaccttttcgaacccaaaagaaaattgttcttgttatttttatttcttctgttatttgtgagatgaacccgttccctttaaataatctttgtttgtgccttatgttcagtcattttaatttgctgtcttcatgtcgaagctgctggtttctcagccaaaaagcatcatcttagactctctaaatagccaaagcatcatgagtttggaatttaacatcagctcccatgtcagagttgtgctcctcatgtgatcccacattctactgcccagtgtagtgaattcctttccaagaactcttgcctttgctttccaagttatttttgagcatcttggttgcagagatctcaagaatttacgtcttggattccacgttttcactacgaagaaacagaatgagaagaagaagaaaaattaggcagtgtagagctgggcgtagtggtccagktctttaagcccaggctagcctgatttagccaataaattctaggcctaaaaagagagacytgtctcaaaactcaaagcacacaacagatgctaagtagatgggtcyccataattgggaagccaatgagagaatgcatatttcttcctatgttctttaaaacttgaagcagttacatccgtctttcatcattacgggactcgtgcattcagagccttttgttgttctwttgccagaatagatgaggcamcatttgcctattcgaatgctgtaacaggcaagttgactstagggttttggtctgagacatttggtgaacaccttcaacactgattaaaatattactgaatkccwamwmwwawmmwrawwatgaatcttccagaataaatagaatattagctcatataattgttcagaattggagatgtatgcctactaccctgtacctaaagggcaaaaatatcttcactgtaatgtgtgtgcttcttcaaggtgttttgcttcttgtaaaagtgttttcctttggcttgttactgccttttgtcagataatcttgatgacgctgtatcataataaatattttctatttattaaaaaaaaaaaaaaaaa

SEQ ID NO: 2305 - DNA, 3918 bp, Rattus norvegicus
tcagacatctcttgagaaactcagcctagtttatccagctgttttgtccacatatgttcataaaatctagttatgaatattctgatcgtatggatgcacctaactcgacagtttctggggactttgctatcttttagagaatatatctaaattgctgactaattcctcaatgcgccactcaacgcagggcatcatttggctgtacctattggagctctgagtttcctccatcatgatatctttattagcttgaattcctttcctaaaatggtccttctgttgatcctgtcagtcctacttctgaaagaagatgtacgagggagtgcacagtccagtgagaggagggtggtggctcacatgccaggtgacatcattattggagctctcttctctgtccaccaccaaccaactgtggacaaagttcatgagaggaagtgtggtgcagttcgtgagcaatatgggattcagagagtggaggccatgctgcataccttggaaaggatcaactcagatcccacactcttgcccaacatcacacttggctgtgagatcagagattcctgctggcattccgctgtggccctagaacaaagcattgagtttataagggattccctcatctcttcagaagaggaggaaggtttggtacgctgtgtagatggatcttcttccttccgctccaagaaacccatagtgggagtcattgggcctggctcgagttctgtggccattcaagtccagaacttactccagcttttcaacataccacagattgcttactctgcaaccagcatggatttgagtgacaagactctattcaagtacttcatgagggttgtaccttccgatgcccagcaagctcgagccatggtagacatagtgaagagatacaactggacttatgtctcagctgtgcacacagaaggcaactatggagaaagtgggatggaggctttcaaagatatgtcagcgaaggaagggatttgcatcgcccactcttacaaaatttacagcaatgctggggaacagagctttgacaagctgttgaaaaaactcagaagtcatttacctaaagcccgggtggtagcttgcttctgtgaaggcatgacagttcgaggtctgctcatggccatgagacgcttaggtctagcaggggagtttctacttctgggcagtgatggctgggccgacaggtatgacgtgacagatggatatcagcgagaagctgtcggtggaattacaatcaagcttcagtctcctgatgtcaagtggtttgatgattattatctgaaactccggccagaaacaaacctcagaaacccttggtttcaagaattttggcagcatcgttttcagtgccggctggaagggtttgcacaggagaacagcaagtacaacaagacttgcaacagttctctgactctgagaacacatcatgttcaagattccaaaatgggatttgtgataaatgcaatctattctatggcttatggactccacaatatgcagatgtccctgtgtccaggctatgcaggcctctgtgatgcgatgaagccaattgatggacggaaacttttggattccctgatgaaaaccaattttactggagtttctggagatatgatcctgtttgatgaaaatggagactctccaggaaggtatgaaataatgaatttcaaggaaatgggaaaagattattttgattacatcaatgttggaagttgggacaatggggaattaaaaatggatgatgacgaagtgtggtccaagaaaaataacatcatcagatctgtgtgcagtgaaccatgtgagaaaggccaaataaaggtgatccggaagggagaagtcagctgttgttggacctgcacaccttgtaaagagaatgagtatgtgtttgatgagtacacctgcaaggcatgccaactgggctcctggcccactgacgacctgacaggctgtgacttgatcccagtccagtatcttcgctggggtgaccctgagccgattgcagctgtggtgtttgcctgcctcggtctgctagccaccttattcgttactgtaatcttcatcatttatcgggacactccggtggtcaagtcctccagcagggagctctgctacattatccttgctggcatctgcctgggatacttatgtaccttttgcctcattgcaaagcccaagcagatttactgctatcttcagagaattggcattggactctctccagccatgagctactcagcccttgtaaccaagaccaaccgtattgcaaggattctagctggaagcaagaagaaaatctgtaccaagaagcccagattcatgagcgcctgtgctcagttagtgatcgctttcattctcatctgtattcagctgggcattatcgtggccctctttatcatggagcctccggatataatgcatgactatccaagcatccgagaagtctacttgatttgtaacaccaccaacctaggggttgttactcctcttggatacaatggattattgattttgagttgcacgttctatgcgtttaagaccagaaatgttccagccaactttaatgaggccaaatatattgctttcaccatgtacacaacctgcatcatatggctggccttcgtgcctatctactttggcagcaactacaaaatcatcaccatgtgtttttcagtcagcctcagtgccacagtggccctgggttgcatgtttgtcccgaaggtgtacatcatcctagccaaaccggagagaaatgtgcgcagcgccttcacaacctctacagtggtacgcatgcatgtaggagacggcaaatcatcgtccgctgccagcagatccagcagcctagtcaacctgtggaagaggaggggctcctctggggaaaccctaagctccaacggaaaatctgtgacttgggcccagaatgagaagagtacccgggggcaacatttgtggcagcgactgtctgtccacatcaacaagaaggagaaccccaaccaaacggcggtcatcaaaccctttcccaagagcacagagaaccgggggcctggtgcagcggcaggtggtggctcgggtcccggtgtagctggtgctggtaacgcaggatgcacagcaacaggtggcccggagccaccggacgccggtcccaaagcgctttatgatgtggcggaggcagaggagagcttccccgcggctgccaggccgcgctcgccatcgcccatcagcacgttgagccacctcgcaggctcggcgggccgcacagatgatgatgcgccgtcgctgcactctgagacagctgctcgcagcagctcgtcccagggctcgctcatggagcagatcagcagcgtagtgacgcgcttcacagccaacatctccgagctcaactccatgatgttgtccaccgcggccacgccggggccccctggtactccaatctgctcctcctacctgatccccaaagagattcagctgcccacgaccatgacgaccttcgcagagatccagccgctgccggccatcgaggtgaccggaggagctcagggggcgacaggcgtatcacctgcccaggagacgcccacaggagctgaatccgccccgggcaaaccagatctggaggagcttgtggccctcactccaccatcgcccttcagggactcggtggactcggggagcaccaccccaaactctccagtctcagaatcggccctctgcatcccatcctctcccaaatatgacactctcatcatcagagattacacgcagagttcttcatcgttgtgagccactggaaacttccctgagataggcctgtgcagcagacctcggtgttccagatgggcgcagcgacacccatagtcaccccaacagagaacccgaggtgaaaaatgccaaggacacacacggtggagacatgag

SEQ ID NO: 2306 - DNA, 2472 bp, Rattus norvegicus
ccccgcatgtccccaagacggagtgtgtgttggttcgtactgggmsagctgctgtgcagctgcgcsstggcgctgcagggcgggatgctgttcccgaaggagaccccttcgcgggaactcaaggtgctggacggcctgtggagcttccgtgccgattactcgaacaatcggttgcagggcttcgagaagcagtggtaccggcagccgctacgggagtcgggcccaaccttggacatgccggtcccttccagcttcaatgacatcacccaagaagcagagcttcggaacttcattggctgggtgtggtatgaacgggaagcagtgcttccacagcgatggacccaggacaccgacaggagagtggtgttgagaatcaacagcgcccattactatgcagttgtgtgggtgaatgggattcatgtggtggaacatgagggaggtcacctcccctttgaggctgacatcaccaagctggtccagagtgggcccctgaccaccttccgggtcaccatcgccatcaacaacacactgaccccttatacccttccaccggggaccattgtctacaagactgatccttccatgtatcccaagggttacttcgtccaggacataagcttcgacttcttcaactatgcggggctgcaccggtctgtggtcctgtacaccacccctaccacctatatcgatgatatcactgtgaccactgacgtggaccgggacgttgggctggtgaactactggatttctgtccagggcagtgaccatttccagctagaagtgcgtcttctggatgaggatggcaaaattgtggcccgtggaacagggaatgagggtcaacttaaggtgccgcgtgcccacctctggtggccttacctgatgcatgagcatccagcctacctgtactccttggaggtgacgatgacaacacctgagtctgtgtctgacttctataccctccctgtcgggattcgaacagtggctgtcacaaagagcaagttccwcrwrratgggaagcctttctacttccaaggcgtcaacaagcatgaggattcagatatccgagggagaggcttcgactggcctctgctgataaaggatttcaacctcctccgttggctcggggcaaattcctttcgtaccagccactatccctactcggaggaggtacttcagctctgtgaccgatatggaattgtggtcatcgatgagtgtcccggtgtgggcatcgtgctgccccagagttttggcaacgtgtctcttcggcaccacctagaggtgatggacgagctggtgcgcarggacaaaaatcaccctgcggtcgtgatgtggtctgtggccaatgagcctgtctcttctctgaaacctgccggatattacttcaagacgctgatcgcccacaccaaagccctggaccccacccgtcctgtgacctttgtgagcaataccagatatgacgcagacmtgkgggccccgtacgtggacgtgatttgtgtgaacagttacttatcctggtatcatgactacgggcatctggaggtgattcagctgcagctgactagccagtttgagaactggtataagatgtaccagaagccaattatccagagcgagtatggagcagacgccgtctcggggcttcatgaggatccacctcgcatgttcagtgaggagtaccagacagctctcctggagaattatcatttgatcctggatgagaaacgaaaagaatatgtcatcggagagctcatctggaattttgctgacttcatgacgaaccagtcaccactgagagtaacaggaaacaagaaggggatcttcactcgacagagaaaccccaagatggcagccttcattttgcgagagagatactggaggattgccaacgaaaccagaggttacggttcagtgccgaggacccagtgtatgggaagcagaccgttcacattctaaagctacgactacctcaccgcagacagggcctgatgaagtgaaaggtattctctcagcagaagagyttwtcctmtggagtttgtgaaccaacacaagsrsgackttrgaagtgacatggaagttttcmttgtgtggggataatgacttgcagtgccttakgctcagtaatgtgtcctsctgagaagtgtcccarbtcrkywckgwmargttytttttgsccytgsctttgtghactcttgaaamcctrytrtktgawwactcacaytargmgmkbctkrttaccggctragggacggctcacaatttaagaatactgactvttytaycaggggttccagattcgattcmtagcacccacgtggtcgtyaactatgagctgttgccccatttctcaggtgatgtacgaacatacatgtggggsgaggggaatagtcataygtgtaaaatgaaaataaatmtaaataaaactgttttctttcvytrwwmaaaaaamaaaaaramammaamwaatagaaacgt

SEQ ID NO: 2307 - DNA, 3783 bp, Rattus norvegicus
ctgcaggtagctgtagttatgctgaggagggtggagagatctgcctttgctggtggaggtggagacaggccatcctgctaccgactttaattttgcccttggttacctctgtagggttgcaggctactccagagaaggtctcacattctgttgactttctctttctctaaagaggtattcgttcttctgagtatccatctcagaaacactgtactctgttctctgacacatcagagcaccctcctcgtgttgtaataaaaggagaagtctgggcaatgatctcaccaaaacgtgatactcagggatcagagcccctctgccccctccctccccgaagaccgtggtgctgtgggtgtgtgtaggaggaaagaggttgagaccttacttaggaattaaaatagccaatgggtctctagtgaaattcttcatgcatacatactgacatgtggacatgtgtgattgtgtacaaggttagaaaaaccagtatctgtttgcttgtcagggataagaaacgggccatgtctgtcccttagatggtttaagggaaattatcaacagatacatcagaaaacagacatttgaaaaatgtatttgggatccttttgcagtggtttggggatagctcttctgaggaaagtccactggacagggcaattttctggcctgaaaccctgagtgttttgtttctgttgctatttcttctcatccctcaaggccacacccttttcttacctgccctctttcacctgggytctgccccctgactccctttctcttctcttactttccttaaaatcccgggaactggggtcagtgttcatccccgaatctctccaacactgcaagctcgcagactaggagctggggctcatttggcagaagggctgctccgctctcctcttatgctgcttccccttcctcttttcccagatagatatgtaaacacatgcattttcctgttcaaacggggcgaattggtgttcagcctgtgccttgacttagcgattgggctgagtcttgctcctcccttccctactcggataggagccacaaggatctggagctcaggcttctaaattgcagctggcctcggccaggtgacctttgctttgtaagtttctttctgggagggggagtgagtggagtggggagagctgggatctgttgcttgttgggggggggggttaaggaaaggaaggggctggaagagagtaaagggctgttgttaaacagtttcttaccgtaagagggagtttagtcctagatctttccagttaatcacacaacaaacttagctcatcgcaataaaagcagctcagaaccgaccggcttgcaacaggattctttcagcccggcatctcctgcagasssatcagcctgctcgaactgcaagcatgatgtgggggaccaaacttctgccggtcctgttgctgcagcatgtcctgctgcacctcctcctgcttcctgtcaccatcccctatgcagaaggacagaagaagagaagaaatactcttcatgaattcaaaaagtcagcaaaaactactcttaccaaggaagacccattagtgaagattaaaaccaaaaaagtgaactctgcagatgagtgtgccaacaggtgcatcagaaacaagggctttccattcacttgcaaggcctttgtttttgataagtcgagaaaacgatgctactggtatcctttcaatagtatgtcaagtggagtgaaaaaagggtttggccatgaatttgacctctatgaaaacaaagactatattagaaattgcatcattggtaaaggaggcagctataaggggacagtatccatcactaagagtggcatcaagtgccagccttggaattccatgatcccccatgaacacagctttttgccttcgagctatcgcggtaaagacctacaggaaaactactgtcgaaatcctcgaggggaagaagggggaccctggtgtttcacaagcaatccagaggtacgctacgaagtctgtgacattcctcagtgttcagaagttgaatgcatgacctgcaacggtgaaagctacagaggtcccatggatcacacagaatcaggcaagacatgtcagcgctgggatcagcagacaccacaccggcacaaattcttgccggaaagatatcccgacaagggctttgatgataattattgccgcaatcccgatggcaagccgaggccatggtgctacactcttgaccctgacaccccttgggagtattgtgcaattaaaatgtgcgctcacagtgctgtgaatgagactgatgttcccatggaaacaactgaatgtataaaaggccaaggagaaggttacaggggaaccaccaataccatttggaatggaattccgtgtcagcgttgggattcgcagtacccccacaagcatgacatcactcccgagaacttcaaatgcaaggaccttagagaaaattattgccgcaatccggatggggctgaatcaccatggtgttttaccactgatccaaacatccgagttggttactgctctcaaattcccaaatgtgacgtgtcaagtggacaagattgttatcgtggcaatgggaaaaactacatgggcaacttatccaaaacaaggtctggactcacatgttccatgtgggacaagaatatggaggatttacaccgtcatatcttctgggagccagacgctagcaagttgactaagaattactgccggaaccccgatgacgacgcccatggaccttggtgctacacagggaatcctctcgttccttgggattattgccctatttcccgttgtgaaggagatactacacctacaattgtcaatttggaccatcctgtaatatcctgtgccaaaacaaaacaactgcgagttgtaaatggcattccaacacaaacaacagtagggtggatggttagtttgaaatacaggaataaacacatctgtgggggatcattgataaaggaaagttgggttcttactgcaaggcaatgttttccagctagaaacaaagacttgaaagactatgaagcttggcttggaatccatgatgtccatgagagaggcgaggagaaacgcaaacagatcttaaacatttcccagctagtctatggacctgaaggctcagatttggttttactgaagcttgctcgccctgcaatcctggataactttgtcagtacaattgatttacctagttatggctgtacaatccctgaaaagactacttgcagtatttacggctggggctacactggattgatcaacgcagatggtttattacgagtagctcatctgtatattatggggaatgagaaatgcagtcagcaccatcaaggcaaggtgactttgaatgagtctgaattatgtgctggggctgaaaagattggatcaggaccttgtgagggagattatggtggcccactcatttgtgaacaacacaaaatgagaatggttcttggtgtcattgttcctggtcgtggatgtgccatcccaaatcgtcctggtatttttgttcgagtagcatattatgcaaaatggatacacaaagtaattttgacatacaagttgtaatagccatagaagaggccagtgtatttgaagcatccatggatacaggaagatttccaagacttcaggattaaaatgtcacctaaaacaatcctaaaacaactacttgagtgttgtgagtgttcagatactcattaatatatgtggcgttttctgttgtattgtttgtcagtgtccttttgtaaatgttgaagtgagttagggt

SEQ ID NO: 2308 - DNA, 2027 bp, Rattus norvegicus
aaagtctccagggcacagagggagtcaactcattggcgcttgagtcggcaaagaaatcaagatggccaaagttcctgacttgtttgaagacctaaagaactgctatagtgaaaatgaagaatacagttctgccattgaccatctgtctctgaatcagaaatccttctatgatgcaagctatggctcacttcatgagaactgcacagataaatttgtatctctgagaacctctgaaacatcaaagatgtccaccttcaccttcaaggagagccgggtggtggtgtcagcaacatcaaacaaagggaagattctgaagaagagacggctaagtttcaatcagccctttactgaagatgacctggaggccatagcccatgatttagaagagaccatccaacccagatcagcacctcacagcttccagaataatttgagatacaaattgataaggatcgtcaagcaggagttcatcatgaatgattccctcaaccaaaatatatatgtggatatggacagaatacatctcaaagctgcttcgttaaatgacctgcagcttgaagtaaaatttgacatgtatgcctactcatcgggaggagacgactctaaatatcctgtgactctcaaagtctcaaatactcagctctttgtgagtgctcagggagaagacaagcctgtgttgctgaaggagattccggaaacaccaaaactcatcacaggtagtgagaccgacctcattttcttctgggaaaaaatcaactctaagaactacttcacatccgcagctttcccagagctgttaattgccacaaaagaacaaagtcaggtgcacctggcacggggactgccctccatgatagatttccagatatcataaaaacagccttatttaggagtctactttcttgagaagtgctgacaatctgtatgtaccatgtacaggaaatgttcctcgtcctaagtcactcgcatggcatgtgctgagtctttgtaattctaaatgaatgtttaccctctttgtaagagaagagcaaagcctagtggaaccagcccgacatatgatactgtttgttatttaaagagtaccctatagtttgctcactactaatcattttaattattattcttcatggtattcttaggagggtcaaaaagactctgctcatattacagatgggctaactaagggataagacaactgaaaagtacactcaattgcatctggaatgggaattcacagacccatgaaacttatctcactgtgcaccttctgcttctaaagtgccggatgggtaggataaagttgtaagaacgtaatgctatcattttcaaaaggaaggggacaatagctacatctttcctacctcagtgggttttattccagtaagagcatttggataaaatccttctgtaacagacctcaagaaggagacagactgttgaatgttatttttaagttattttatatatgtatttataaatatatttatgataattatattatttatggcacatccttaaatcctctgagcwygmsrggcatcctcagcagcagaattttctaggtggtcagttagatgcagtgtcctctgaaacaccatgctatagacagacgtacactgtttccacatccgtggagctctctttacattcttgtccttaggagccctgcagtcatgatcaccaatctgtactgttcacttcgttcatttaaaatgataactgggtcagtcttttgccctcctgtccttaaagctgtctgggtcttcttacatcattcaactcacctgtaattaaagctaaccatctaaagacgggaagaacctaactgtgacaaccacatccctgttacctgaaktttcttttctaggatgtaatcagtgtttcctctgggttccaaatttgttctcaaaccagggtgtcacaaaaatatcaacaataataatcaactcatcattactattgatcataattaaataaagcaagtttgagctgacaaaaaaaaaaaaaaaaaaaaaaaaagtgtggcg

SEQ ID NO: 2309 - DNA, 4633 bp, Rattus norvegicus
aattccgtgggcggcgggcggcggagaagctccgagcggggccgggcggcggcagattggagtcgcgacacagccgccgtccgcttcgggctccacgtagaaggaaccatgctggccgtcggctgcaccctgctggtcgccctgctggccgcgcccgcagtcgcgctggtccttgggagctgccgcgcgctggaggtggcaaatggtacggtgacgagcctgccaggggccactgttaccctgatctgccctgggaaggaagcagcaggcaatgctaccattcactgggtgtactcaggctcacagagcagagaatggactaccacgggaaacacactggttctgagggccgtgcaggtcaatgacactgggcactatttgtgcttcctggatgatcatctggttgggactgtgcccttgctggtggatgttcccccagaggagcccaagctctcctgcttccggaagaacccccttgtaaatgccttttgtgagtggcatccaagcagcactccctctccaaccacgaaggctgtgatgtttgcaaagaaaatcaacaccaccaatgggaagagtgacttccaggtgccttgccagtattctcagcagctgaaaagcttctcctgcgaggtggagatcctggagggtgacaaagtgtaccacatagtgtcactgtgcgttgcaaacagtgtcggaagcaggtccagccacaatgtagtatttcagagtttaaaaatggtgcagccggatccacctgccaaccttgtggtatcagccatacctggaagcctcgttggctcaaagtcagttggcaagaccctgagtcctgggacccaagttactacttgttgcaattcgagcttcgataccgacctgtatggtcaaagaacgttcacggtgtggccgctccaggtggcccagcatcaatgtgtcatccatgatgccttgcgaggagtaaagcatgtggtgcaggtccgagggaaggaggagtttgacattggccagtggagcaaatggtccccggaggtcacaggcactccttggctagcagagcccaggaccactccggcagggatcccggggaaccccacacaggtctctgttgaagactatgacaaccacgaggatcagtacggaagttctacagaagcaacgagtgtcctcgccccagtgcaaggatcctcgcctatacccctgcccacattcctggtagctggaggaagcctggcgtttggattgcttctctgtgtcttcatcatcttgagactcaagaagaaatggaagtcacaggctgagaaggaaagcaagacgacttctcccccaccgtatcccttgggaccgctgaagccgaccttcctcctggttcctctcctcaccccatcagggtcccataacagctctgggactgacaacaccggaagccacagctgcctgggtgtcagggacccacagtgccctaatgacaacagcaacagagactacttattccccagataattgtctggagggtacctggcagctggcacgcaagtttctcactgccggccccgtccaccagggctgggggcggggtgggcggggctgcagcttcacgatcccacaggagccttgcaaaggttctgagtgggagaagactggtgtgctgcacgggcttcgaaagaaggggctgtgaggagcacgagccatcatgaagagagcctgtgatgactctgaatagagacgcccgcccatcagctacacacctgatggtggctctcaagctatcctctcaggaagcctctgggaggggcgacaaaggctgccccagttgcctagctctggctcactggcccaagctgccttttagcttgaactcctaaaatccaagcaccttggccattctcttcctaggccaccgaggccgcggggaagcttggttctactttccttctcaacaccwsgagragcagctgcccggtggtggtkactaacgtatcarggcctgatggcttatgakgaatgacaattaattcctcataagcagtttttaaatgtgaatagtaatcctaggcactgctgacttgaggttttawtttcttcgatctcaggacttcaggagagaagcakagcakaagtasagakaggatgggtgtccattgtccgtgtggtacttgagggggatacagcctggaaaacacgtttcctgtccccctactctcccaraakaggtasggggtggmgcctcttccagggcaragagtataactactttayctgkccttgcccatactggtttcaactggacttgagctactaggaaaaatgacattcatgcaaaaagaaaactttaactagcaagaatgcacttccactttggtttctagaggactgttgctcctcttgagacgctggaagaggccgctcactgtaccctggtgtatgagccctcaccccccaccccagggtaagtgcagtaactttagtctaaacaccgagtcaggtaaaaatcgaggaaaaaacaaccctgtttcctgtaacaraaaarmmwwwrrwwwcgttttgtattttgattttttttttgtcttaaaaagtgtaaaaatagtctgtccatactctgcttcagggaatgacctgtgaatactccccaggcgtgggcaggaagggtgtctgcttcctgctacacctcactgccacctcggccttccttgctttacattcaactgagttgcctcagctgctttcccctggggcgctgaaaaagccagtgatgttggtggtcaccgagaagaccacagagccacagagtaatgctgtgattgaagcgagttacgcaaccacagcaccccacatttgctgtattatagaactatgctaggagcttgccttttcacaaaataccaccaccacgagacgtggcagagctcggaagctgtcaccttgtgccatctgcttgccagctccaaggggccactgacttaagcagttattttctttgtgggctttgttcatttcagggcctgttgctgtcttagaaaaagctctgtcggttgacaaaaacatcagacaggtagtcatgtttatttwttttttttyyttytttgctaagtctttgggactcaagggtagtaaaaaatgctgtgaaaagggaaacattagaaacagcgatcttcggggaataggtgactgtgcccacgcactgttcttcagtccctcacgtggctctgcccgagtgctkttccaagccaggcagagcaggctggcggaagatkgaaatccagatagctcgttatctctgagagctaaatagctttgatctccaagctgttattgctttcactattgtaacaggatagcctcccyccccatgtcaaaaggatgcttttcccttttgactttttataagctaagtcagtgaagtctgtttcatctgagctccagcttcgttcagttcgcacaggtgtatgccctcagctgcttcgggcctcagatctgtgctagttgaatggttgtcccatccttgggtcatccttaccagagtttctgcagcccacaggtctgccttgtcaacagtaccacttaacaccagcattcagtgcccaggcagccagatgtggagggtttacccagagatgatttaaacatgaccttaaacgtgtatggtagaacgaggggaacccataccagctcaggttctaaagagatctttgattcttctggcattagtgaaatagctttaaactatttcaaggaagaagccttggccacacccacgacatttggtgacaatcctttctctccatgagccttgtctttacaccttctcacctggctgaaagctcmcmctgwrtctttcctatgtccctggtgtcttgggagaaaggaaactggtatgggcttcactgctggaattggcttggagccagcgtktggcgcagccctggcagggtgggccaggcttagttatggtgtgctggtttaaggaatgcctggcttgcctggttgcttgggttctgagctgcagagtttcctagcagttctttatggctgacctagttggggaagattcccacactcaactgcaggtggaggtggtgagaaagctgttttcatttggagaggcaggatcagcccaagaagctttcagtgggagagcctacagtgaggctgtacctcactgtgggaggaggcagsccagctggctcaggtcctgggactggcactggggagggtctgccaaaggtccctccagcctgtagtcytagcatagtcgggtgccagttccaggaagtttctatggcaaccttagtgctcattaaggaacattgtcagttttgtgaacatmkgywcarrtggaratcytgttttcagagawaggaytggtacagtgtgtaacaagctggagcagacagaragmctttttggcaakagatcacatccgttaagcagaataccycagtgctacatgtttttgtctttgagacaatgtttttaaggtttttatgctctgttacctgtaagctgatacctaaaactttytgcaaagtcagggtttttcaatgccttttttttttttttgccattgtttgctttaaagtgaagattgtaactgtttgaaataaataatttctaaaactgcaaaaaaaaaaaaaaaaaa

SEQ ID NO: 2310 - DNA, 3692 bp, Rattus norvegicus
gtgagactctccatggccctgggaagatgctttccagaaggttgtaccgtggagggagcagcagtgaaacaggtctcctggttcctgatctacagctgtgtctgctcctgtgtctgctggggagtctccgtcccagcgcaggaaggagggcggaaggctgggacattcacttgcttcagcaacagtgttttcaggattgactgtcactggtcagctccagagcctggctccagggcctggctcctctttaccagtaaccaggggactgacatcaagcacaagtgcaccttctgggacagtaggtgtaccctggtgctgcccaaggaggaggcgttcttgccctttgacaacttcaccatcacactccaccgctgtgtcatgggacaggagcaggtcagcctggtggactcacagtatctgccgaggagacacatcaagctggatccgccctctgatctgcagagcaatgtcagctctgggcgttgcgtcctgacctggggtatcagttttggtctggagcccttgatcacatccctcagctatgagctggccttcaagaggcaggaagaggcctgggagcaggcccggctcaaggaccgtatcgttggagtgacctggctcgtacttgaagccatcgaactgaatcccgataccatctacgaggccagactgcgtgtccagatggcgttagagagttatgatgacaagacggagggggaatattataagagccattggagcgagtggagccagtccgtgtcctttccttctccccgcaggaagactcaggggctcctgatcccacgctggcaggggtcagccagcatccttgttgctgtgcccatctttcttctgctgactggccttatccactttctcttcaggctgtctcccaaggtgaagagaatcttttaccagaatgttccctctcccgaggcattcttccatcctctctacagtgtgtaccatggggacttccagacctggataggggcccgcagagccggaccacaagcaagacaggatggtgccagcgctccgtcgggagactcagagtccagcatctgggaggccatcgccacactcacctatagcccagcatgctctgtgcagtttcctagcctgaagtgggaggccacagcccctggcttcccaggacccccaggctcagagcttgtgctgccggcagggtgtctggagttggaaggacagccatctgcctacctgccccaggaggactgggccccactgggctctgccaggccgccccctctagactcagacagtggcagcagtgactactgcatgctggactgccgtgaggagtatgacctctcagtcttcccagaacacaccctgagtcccgagttcacactggctcagcctgtggcccttgctgtgtctagcagggcctgatagctaccaagggatgtgggcattctcatccctccttattctcagatggcaccagatgcagagccagcgtatctctgctagatgcaccatgtctgtttcggggaggtgaacaaaaggccctggagctggccctgggcggtgtatagaactccggagaagaggcagctgtgcaccgatcagaggctacgtggatggaagcaacagactgagtctcaccccgctgctctgcctctctggtggagatgtctccgagttcagcatcttaacacccgccttctcttctttcctctctctggctttttcccaggccggaaaagagggtgtgacaggcagcctggtctatcctcgtgcccctaaaggctagcctgagcccagggacactgatgagacgacatcggtgaaaaagtgttctttctcagtgccttccccattaagaccggaagggacgctttcgactttgcagaccgtggatggcggggggtggagggaatggcggagctttgagcaggtggggaatgtccatctctgagcttttggggttccaagaccagctggaaggagtctcaccgaatgattcacagatgccttaccagtctgtggcattttctttcctggtgttgtgataaaacaccgtaatcaaaaatgacttacagaaggaagagtcggttttggtttagggttccagaagtgtggaagcatggcagcaggaaccggaagccgagagctcaagtctcaacctaaagctgaagcagaatggactgcaagcgctgtccccgcccactccagcaaggctccacctcctaaaggttccgcagccttgctgaacagtgcggcggaatagagagcaagtgttccagtatctgagcctgtggggaacgtttctcattcaaaccacctcactgcctgccccctaaccttccactgttcttaggaaaaaagctgacacccagggccatgagacacggttgggagtggctatttttcagcagctgtggcctatgaagaacaccgatacccctaactgcctcgtggggtagccgggagagagcgatggtgggctagaatgtggctgttattttccttggcttgcgtaacagaagaccagaaaccgggtagccaacaccgtggatttgttttctctctgctctgcggtacacgggtctggaatggagacaccaggaaggccaaggccgtgctcctggaagaagggtttgtttcaagccctcgttcacatttactttcctctgagcctcctcttccagactgagaccggatgccacccaatggcggggacagggcgtttgtgcagatttgcagctgtaaagcactggcccaacagaagtcctcttgctactcggagggtttttaaaggacaagcgtggaaactgtgttaagtgtgaggatgatttctgatcccgtaacactgtgcaagagagggccgcactactacatggaggtcatggaagagcggggaggacggcagcattgtgggctcagagctggtgttctgggactgctcacaatggtgacagtgatcaggatatttagaataagtcggcatttctcaggtagaagaaatttctagtttgtcagtaagccctcaactattttaaaatttatctttcatttaaataattacccttttcgtgaagataggcacgatataaacctgcataaatactaccctggcttctactattctcttcctgattccgaggcttcctgttatgctgtataaatcagccgatgtaaaccagcaccaaggtttgtgtgttttgtaggtcatggaatcatctgcgaaaacaaggaaagagtaaaattttacaaaaggcaatttaagatttgggaaacccgggctttttagtatactcctgtaacaccattcccatgaccatcagggcccttacaaaaagaagtaagatgtaattggtgagataattgtcagcaaatatttcaaaacattgtaattaaccctgggcagtggttactggacagtcctcgtgtcttttgtctgggtgttaatatcagttacttagaagcttgaagaggatggaaaagctcagtgtctgtagcaattcattcaaaagacaagagaactgtcccttattctctgtatctgtgcttttcatctctgtggcaattatcttagggtctgaaatgtgaataaaggccttccatattccttttatcttcaaataatcatattctcttataaatagataagtatatcaggctgttctttcatgtatgtattttaataaagatttttttccatt

SEQ ID NO: 2311 - DNA, 3007 bp, Rattus norvegicus
caatcacacaactccactcgagttagccattgaaagccaatgcaagtaaatgtcattccaaagcttaagattcattaaggtgggcctaaaagaagacagctgctgtgcagacaacgtcgaacaagcaccacttgcttgctttgcccagcatgggcgcttcggaacggagtgtgttcagagtgctgatcagggcactgacagaaaggatgttcaaacacctccgaagatggtttatcactcacatatttgggcgttcccggcaacgggcaaggctggtctctaaagaaggaagatgtaacatcgagtttggcaatgtggatgcacagtcaaggtttatattctttgtggacatctggacaactgtgctggacctgaaatggaggtacaaaatgaccgtgttcatcacagccttcttggggagttggttcctctttggtctcctgtggtatgtcgtagcgtatgttcataaggacctcccagagttctacccgcctgacaaccgcactccttgtgtggagaacattaatggcatgacttcagcctttctgttttctctagagactcaagtgaccataggttacggattcaggtttgtgacagaacagtgcgccactgccattttcctgcttatcttccagtctattcttggagtgatcatcaattccttcatgtgtggtgccattttagccaagatctctagacccaaaaaacgtgctaaaaccattacgttcagcaagaatgcggtgatcagcaagcgtggcgggaagctctgcctcctcatccgagtggccaatcttaggaagagccttctgattggcagccacatatatggcaagcttctaaagacaaccatcactcctgaaggcgagaccatcattttggatcagaccaacatcaactttgtcgtcgacgctggcaatgaaaatttgttcttcatatccccactgacgatctaccacattattgaccacaacagccctttcttccacatggcagcagaaactctttcccaacaggactttgagctggtggtctttttagatggcacagtggaatccaccagtgcaacctgccaggtccgcacgtcatacgtcccagaggaggtgctttggggctaccgtttcgttcctattgtgtccaagaccaaggaagggaaataccgagttgattttcataacttcggtaagacagtggaagtggagacccctcactgtgccatgtgcctctataatgagaaagatgccagggccaggatgaagagaggctatgacaaccctaactttgtcttgtcagaagttgatgaaacggacgacacccagatgtagcagtggcttttccacctacaaaaagcctcccaaggacctaagggttgactgtgttcagaagcatctgacgggggtctgaaagcaggatgagaacatgcgaaatctgctagcacagtcacccctgaaccccagggctatggttctacaagacacatagctctmtaaggctgcatacggtgcatgcatgtgaatgaaactgtggaagccaaaggggcccacttggatcctcactatgactgtgtaagctcatatcgtgttgatggaaacaaagtcattcaaggacaaaacttaggagctttagaaagcttcaggaactagccacatttcctgtttgattctatggatgagaaagatgccatttttatcttaaagtagacttctatcaatggaaaatctgccctctgcgctgggaagtgagccagccaatcagtgacaataagagactgtcatacaaagaatcagtaaagactctaaccttctcaagctctggtgtttgaagcctttgtctgagtctgggtccatgcttcagaaggggtaaggtgacatccactgactgtacctctctgaacccaaggtacagaagaacaggaagccccaatcaacttcataatcaacccagatgctgcagcccatacagaatttggcctgaatgatttcctgtggagcattaaatggaggccaagtccactctttagatattaaatgaatattcttttgcaaaggaraawrarwwraaarwrwwrragagactgaagggatgactctgtaatgaaagcctgggtctggaccgccagtaaccacatacaaagcctgacttactagcagtcagtactcctactggggaggtggggataggaggatgtctctggtttgctgggcagctgaatgggtgatgcccaagttcaatgagagactaaagagggtgaaggggctggagagaagattctggttaaaagtgccgtggccgctcttccagagaacctaagtttggttcttggcacggtacttgataactatctataactccagtttcagggcatctgatgttcttttctggcatccatgagcatcaggtgcacagatatacatgcaagcaaaacaccgtacacatacaattaaaaaaacaaggtagagaatgactgaagaagaatcttatgttaacttctgatctacacacacacacacacacacacacacacacacacggcatagtgatgtttgtttcaatattcaatggataggttctggggctacaggtctggtaaaagaggttttaatccttcctctttcaagatggtaccgaggaatgggaaagcagtgagcctggaagagggtgtagtgctaacacaccctcttcttgtgtccttgtgtttctctgcccggtggttgaactgagattctaggtatggaggaagaaggaataagatacagagtcacagtcagggtgttgctgctttcttgtctctgagggccattcctgtgtcttccaaagggaacaagttagcaggagaacttctttggaggaaggttctagtgtgaaggtcttgtttcttcatttccatacctgtatcattccaaattcaccttgaaaaaaaaagtagagttcaaagctgctcaaagatcaaaatttttttggtatgtgattaataaatttctgaaaccgtwaaaaaaaaaaaaaaaaa

SEQ ID NO: 2312 - DNA, 2545 bp, Rattus norvegicus
tggtgctgttacaataatgaggtcagtgactgtgtgtgatgtggtgatgggaaggcagtgagctcaggcaatctctctgtttcagttctctctgggaaggggtggagacagctgtttaaagacactgcaaccagaaagccaagcattctgtcactaagcaggagactgagtgcccacttggaagaagaaataaaagatggttcttagcacagaggaaaacaggagtgttgatttagtcaacttacccagtgtcccactgcccgatggagaggctggcgtaggggagaacaacaaggattccttgaacaacctctgcagtcagtatgaggagaaggtgcggccctgcattgacctcatcgactccctgcgagctctgggtgtggagcaagacctggccctgcctgccatcgctgtcatcggggaccagagttcagggaagagctctgtgctggaagcactgtctggagtggccctccccagaggcagtggtattgtcaccagatgtcccctggtgctgaaattgaagaagctgaatcagggagaggagtggaaaggcaaagtcacctatgatgacatcgaagtggagctctctgatccttcagaggtggaagaggccatcaacacaggtcagaaccatattgctggggtagggctggggatcagtgataaactcattagcctggatgtcagctccccacacgtcccagacctgactctgattgaccttcctggaatcaccagggtggctgtaggcaaccagcctgcagacataggacggcagatcaagagacttatcactaactacatccaaaaacaagagaccatcaacctggtggtggtccccagcaatgtggacattgccaccacagaggccctgagcatggctcagaaggtggaccctgatggggataggaccatagggatcttgaccaagcctgatctggtggacagagggactgaagacaaggtcgtggatgtggtgaggaacctcgtgtgccacctgaagaagggctacatgatagtcaagtgcaggggtcagcaggacatccaggagcagctgagcctggctgaggctcttcagaaggagcaagtcttcttcaaggaacaccctcaattcagagctcttctggaggatgggaaggccacagtgccctgcctggcagagaggctgaccatggagctcatctcacacatctgtaaatctcttcctttgttagaaaatcaaataaaggaaagtcaccagagtacaagtgaggagctgcagaagtatggtgcagacataccagaagatgagaatgaaaaaactctcttcctgattgaaaaaatcaatgcttttaaccaggacatcactgccatagtagaaggggaagagattgtgagggagaaagaatgtcgcctattcaccaagctccgtaaagagttcttcttgtggagtgaggagatcgaaaggaatttccaaaaaggttctgatgctttatataaagaagtctacacattcgaaatgcagtatcgtggccgagaactaccagggtttgtgaattacaaaacatttgagaacatcataagaagacaaatcaaaaccctggaagaaccagctatggaaatgcttcacaaggtcactgaaattgtacgggctgcctttacaacggtttctgagaaaaatttctctgagttttttaatctccacagaactaccaagtccaaacttgaagacatcagattagaacaggaaacagaagcagagaagtcgatccggcttcacttccagatggaacaaatcatctactgccaggaccaaatttataggaaagccttgcagaaggtgagagaggaggaagctgaggaggaggagaggaagcatggcaaaagcaggtcctctcagtcaaaaaatttacagacctcatccatggatgaaatcttccagcatctgaatgcctaccgacaggaggctcacaaccgcatctccagccacattccattgatcatccagtatttcatcttgaagatgtttgctgagaagctgcagaagggcatgctccagctcctgcaggacaaggattcctgcagctggctcttgaaggaacatagtgacaccagtgagaagaggagattcctgaaggagcggttggcaaggctggcccaagctcagcgccggctagccaaattccctggttaagctggccctgtcctttcctgtgtctcctggataatgattcaggaacagaagggctcctgccttcccttcagctaaccactaccctttatcctattataaatattagttctaagatgtgaaggagctttctgttcactctgagatgataaagagaaagagrytctcaaaactcagcaattagatgagtaggagaagccactttgctgataagacaatagcttcastctgagtaccattcctattcaccatatcctcattttagaaccctgccaggaacaartatttgctgaryaaatgggccatgatgtttgggagctkcctatwgcatttcttaataaactacttttctatgaaaaaaaaaaaaaaaaa

SEQ ID NO: 2313 - DNA, 2647 bp, Rattus norvegicus
gtcttgtcatcaggagacctcattttacctctaggttaagggagagaatctatgaagagaaaggaatagtctgtgtctcggtcttgtccgggtcagtgtttctgagagctcacagtggccacctgaagcatttttccccagaatgaatgactgccctgcctgagaacagaagagccaaacagttccccccacatggccatagggagctggtttcatttagaagaaaagcaaagagaggggaaagcctccctcatttctcctccggacggcaaacattcagaaatgacatcacacaccccacagccccgggatgactaaggcagaagtagcctgagaaaactctgctctgccctgagttttagggcacagttatgcagatgagcgtctgggcgcaggttcccgccttcttcctctgaggaagtttcttggtagatcactgacacctcatcccggcgagggggtgaaaacttggcaccagccactccccctcccgggcagagcaccagaaagagcttggaagcaaggagtcggcaagcaaacaatgaaggagcaagggggcaccgtcagtggcgccgggagcagccgaggcggaggagactcggctatggccagcctgcagccgctgcagcctaactacctgtctgtgtgtttgtttgcagaagaatcatatcagaaactagcaatggagacgctggaggaactagactggtgcctagaccagctagagaccatccagacctaccgctctgtcagcgagatggcttcaaacaagttcaaaaggatgctgaaccgggagctgacacacctctcagagatgagcagatcakggmaccamgtgtctsaawacatttcgaacwcgttcttagacaagcagaacgatgtggaaatcccatctcccacccagaaggacagggagaagaagaagaagcagcagctcatgacccagataagtggagtgaagaaactgatgcacagctcaagcctgaacaacacaagcatctcacgctttggagtcaacacggaaaatgaggatcatctagccaaggwgmtgramgasctgrrcamatgkggcmtkmacatcttcaacgtggctgggtactcmcwtawtcgksccctcacatscatywtktackmcattttccaggaaagagaccttctaaagacgtttaaaatctcctccgacaccttcgtaacctacatgatgactttagaagaccattaccattctgatgtggcgtatcacaacagcctgcacgctgctgacgtggcccagtcaacgcacgttctcctctctacgccagcactggatgstgtmtkswcwgwyytgsrwayccwsscwkcyatttttgcagctgccatccatgatgttgatyatmytskwrtskccaatcaktttctcwtyawtasaaattccgaacttgctttgatgtataatgacgaatctgtgctggaaaaccatcacctcgctgtgggattcaagctccttcaagaggaacattgcgacatctttcagaatcttaccaagaagcaacgccagacactcaggaaaatggtgattgacatggtgkkwgcmasyswyatsycywascacatkwgcmtyytggctgaccttaaaassatggtagaaaccaaaaaggtgacgagctccggtgttctcctcctggacaactatactgaccggatacaggttcttcgcaacatggtacattgtgcagacctgagcaaccctaccaagtccttggagttgtatcggcaatggactgatcgcatcatggaggagtttttccaacagggagacaaagaacgggagaggggaatggagattagcccaatgtgtgataaacacacagcttctgtggaaaagtcccaggttggtttcattgactacattgtccatccattgtgggagacctgggcagacctggttcagcctgatgctcaagacattttggacacactagaagataacaggaactggtaccagagtatgattccccagagcccctctccaccactggacgagaggagcagggactgccaaggccttatggagaagtttcagttcgaactgacccttgaagaagaggattctgaaggaccggaaaaggagggagaaggccccaactatttcagcagcacaaagacactttgtgtgatcgatccagagaacagggattctctggaagagactgacatagacattgccacagaagacaagtctctgatcgacacataatctccctctgtgtggaggtgaacattctatccttgacgagcatgccagctgagtggtagggcccacctaccagagccaaggcctgcacaaaacaaaggccacctggctttgcagttacttgagtttggagccagaatgcaaggccgtgaagcaaatagcagttccgtgctgccttgccttgccggcgagcttggcgagacccgcagctgtagtagaagccagttcccagcacagctaaatggcttgaaaacagaggacagaaagctgagagattgctctgcaataggtgttgaggggctgtcccgacaggtgactgaactcactaacaacttcatctataaatctcacccatcctgttgtctgccaacctgtgtgccttttttgtaaaatgttttcgtgtctttgaaatgc

SEQ ID NO: 2314 - DNA, 3712 bp, Rattus norvegicus
atggaggcagagggcagcagcgtgccggcccgggcgggcagccacgagggcagcgacagctctggaggggccgcgctcaaagcccccaagcatctctggaggcacgagcagcaccaccagtacccgctccggcagccccagttccgcctcttgcacccccatcaccacctgcccccgccgccgccaccctcgccccagccccagctgcagccaccaccaccgcccccactgccaccacccccgccaccgcccggagctacccgtggtcgctacgcctcaagcggggctagccgcgtccggcaccgcggctactcggacacggagcgctacctgtactgccgtgccatggaccgcacctcctacgcggtggagactggtcaccggccaggcctgaagaaatswwgsatgtsmwkrccytcsctttcagmaggsattcctgsakaygtttcgatgtggacaatggcacatcagcgggacggagtcccttggatcccatgaccagcccagggtctgggctaattctccaagcaaactttgtgcacagtcaacgccgggagtccttcctgtatcgatcagacagcgattatgacctctctccaaagtctatgtccaggaactcctcgattgccagtgatatacatggagatgacttgattgtgactccatttgctcaggtcttgrmywsccttcgaactgtaagaaacaactttgctgcattaactaatttgcaagatcgcgcacccagcaaaagatcacccatgtgywamsaacyatccmycwwcmmwgycaycwtcrcagaggaggcctaccagaaactggccagcgagaccctggaggagctggactggtgtctggaccagctagagaccctgcagaccaggcactccgtcagtgagatggcctccaacaagttcaagaggatgcttaatcgggagctcacccacctctctgaaatgagtcggtctggcaaccaggtgtcggagtacatatcaaacacgttcttagataagcaacatgaagtagaaattccctctccgactcagaaggaaaaagagaagaagaaaaggccgatgtcacagatcagtggggtcaagaagttgatgcacagctccagcctgaccaattcctgcatyccaagatttggggttaaaacagagcaggaagatgtcctggccaaggaactagaagacgtgaacaagtggggcctccacgttttccgaatagcggagctgtctggcaaccggcctctgactgttatcatgcacaccatttttcaggaacgagatttgttaaaaacgtttaaaatcccagtggacactttgattacgtatcttatgactctagaagaccattaccatgctgacgtggcctatcacaacaacatccatgctgcagatgtcgtccagtcaactcatgtgctgctctctacacccgctttggaggctgttttcactgacttggagattctcgcggccatttttgcyrrtgcratrcatgatgykgatsmtsmtgstgtgtcwratcwrwtwctsmtcwwtacaractcggaacttgccttgatgtacaacgactcctccgtcttagagaatcatcatttggctgtgggctttaagttgctccaggaagaaaactgtgacattttccagaatctgaccaaaaagcaaagacaakctttamskaaaaykgycwttgmcrtkgtastarcramagasakrtcmragywcwtgaatcwkcwggytsatctgaaaacaatggttgaaacgaagaaggtgacgagctctggcgtcctcctccttgataactattctgacaggatccaggtmmwycagmatmtgstgywctgtgcasrystkagyraccccacaaagccactccagctctaccgccagtggacggaccggataatggaggagttcttccgtcaggrggaccgggagcgtgagcgtggcatggagataagtccyatgtgtgaywagcaywwckyctckktkgwramatcasaggtgggcttcatagactacattgttcatccactctgggagacatgggcagacctcgtacatcccgacgcccaggacattttggacactttggaggacaatcgtgagtggtaccagagcacaatcccccagagcccctcccctgcacctgatgaccaagaggacggccgtcagggacagactgaaaaattccagttcgaactaaccttagaggaagatggcgagtcagacactgaaaaggacagtggaagtcaagtggaggaagacactagctrcagtgactctaagactctgtgcacccaagactcagagtccactgaaattccccttgacgagcaggttgaagaggaggctgtagcagaagaggaaagccagccccaaactggcgtcgcagacgattgttgtcctgacacgtaacagtgtaaaggctgtcacaccttttctttttcttttttttttttaaagtaraaaaaaatcgtttccaaagtgcatgtcacatgccacaaccatggtcacacctcactgtcatctgccaggacgtttgttgaacaaaactgacttgaactactcagtctggcgctcaggaatattgtaaccagttctttcgccgccccccccccccccatgtcatcggagaagggagatgtcttcacgaacatgatgtcgacatgacgtcagctcggtagagctgacaaagcagataaaatcaactccaactgttttcaagggagcgtggctcatccagctgcccagacgtagattggattgcagggttcctttctggtttgtttgcaaaaaaaattttaaraagaaaagaaggmattygatgaactcacagatgaagcaatgaaaacatcaggaacaggacacagcttggatctgtccccaggaggaggatgagccacagaaattgcataattttctaatttcaagtcttcctgatactaactgaacagtgtggttcaatgagccatgctcacctctacattttgtatgatatgtaaaacagattttttgtagagcttacttttattattaaatgtattgaggtattatatttaaaaacaaaaacaaagcaaaactctgttcagaacttcatctgccactggttatttttttctaagaagtaacttgcaagttttcagtacggatcagtactacactggataaatctcatttatgaatttgacttccaccttagagttcatagcaattaactgatttgtagtgattcattgtttyakakrccgatgacttccatactttaaaacagagaaacaaatttatgttgccagaaaccctttttgtaagtgtccattgactccttttgtttcactcctccgcccgccagaagagttgctgtcccacattgctgccctcactgtgtgcaaagtgagtatttattctgtaatatgttgatgtgcattatgtccagtgtgtcttaaacctcataggagttcagtcatcacttgctgttgtctgaagcaaatgggaaatatataaatacccagtagctaaaacagcctgtcttttctaggcattttcctacccactgccttctgatgacttcctttttttycccctgtgtcrgrakwcatgcattcacaagtgcttgtccttgtagtcacccatacatttcatgatcattttattgtagctcacagccagttataggaagaaagacattttcccatcatgctgcttgatttaat

SEQ ID NO: 2315 - DNA, 1302 bp, Rattus norvegicus
gggatgctcttgtccaagatcaactccctggcccacctgcgcgcagccccttgcaacgacctgcacgccaacaagctggcgccgggcaaagagaaggagcccctggagtcgcagtaccaggtgggcccgctgttgggcagcggtggcttcggctcggtctactcgggcatccgcgtcgccgacaacttgccggtggccatcaagcacgtggagaaggaccggatttccgactggggggaactgcccaacggcacccgagtgcccatggaagtggtcctgctgaagaaggtgagctcgggcttctcgggcgtcattagacttctggactggttcgagaggcccgatagtttcgtgctgatcctggagaggcccgaacccgtgcaagacctcttcgacttcatcaccgagcgaggagccctccaggaggagctggcccggagcttcttctggcaggtgctggaggccgtgcggcattgccacaactgcggggttctccaccgcgacatcaaggacgagaacatcttaatcgacctgaaccgcggcgaactcaaactcatcgacttcgggtcgggggcgctgctcaaggacacagtctacacggactttgacggaacccgagtgtacagtcctccagagtggattcgctaccatcgctaccacggcaggtcggctgctgtttggtccctggggatcctgctctatgacatggtctgcggagatattccatttgagcacgacgaagagatcgtcaagggccaagtgtactttaggcaaagggtctcttcagaatgtcaacatcttattagatggtgcctgtccctgagaccatcggaccggccctcctttgaagaaatccagaaccatccgtggatgcaggatgttctcctgccccaggccaccgccgagattcatctgcacagcctgtcaccatcacccagcaaatagcagccattctgtcagaccctccagggaagagagagcttgtctgctggcctccaacaggaccctgctctacgatgcagggacagaaatgacaactcattccaggctccggggtccctggagcaacctccctcaaggagaagagactagttcactcgtcctggaccccgctttgcccctcacagactcagtggcgtccagtgtggctggcgtccgcagagtcccgggtgttggggggggaggtgggagtgggtcagagccctgtcatggaactttagtcaccatggagactgtgggtcaccaagatgggccagggtaggggaaaaacatttggggggtgggattaaaaactagcaccat

SEQ ID NO: 2316 - DNA, 2791 bp, Rattus norvegicus
ccccctgctccgcgtcctttctcggtcccctggagggggcggggagaggcgcgggttggcgggcccggggggcggtacggtgtcctggacccaccccccccccggccgcctcccgccgcagttcagttgggtccttgtaccggcctgcgcaaggaccccaggccgctcggttgttgctcaagtgaatcacgccgggtcccctccgccgcgccsccgacgggcatggactcgggtagggacttcctgaccctgcacgggctccaggatgacccggaccttcaggcccttctgaagggcagccagcttctgaaggtgaagtccagctcgtggcgtagggaacgcttctacaagctacaggaggactgcaagaccatctggcaggaatctcgaaaggtcatgaggtccccggagtcgcagctgttctccatcgaggacattcaggaggtacggatgggacaccgcacagaaggcctggagaagtttgcccgagacatccccgaggatcgatgcttctccattgtcttcaaggaccagcgcaacaccctagacctcattgccccatcaccagctgacgctcagcactgggtgcagggcctgcgcaagatcatccaccactccggctccatggaccagcggcagaagctgcagcactggattcactcctgcttgcgaaaggctgataaaaacaaggacaacaagatgaacttcaaggagctgaaggacttcctgaaggagctcaacatccaggtggatgacggctacgccaggaagatcttcagggaatgtgaccactcccagacagactcgctggaggatgaggagattgagaccttctacaagatgctgacccagcgcgcagagatcgaccgtgcttttgaggaggccgcaggatccgcggagaccctgtcggtggagaggctagtgacgtttctgcagcaccagcagcgggaggaggaggcagggccagccttggccctctctctcattgagcgctacgagcccagtgagactgccaaggcccagcggcagatgaccaaggatggcttcctcatgtacttgctgtcggctgacggtaacgccttcagcctggcacaccgccgtgtctaccaggacatggaccagccactgagtcactacttagtgtcttcttcccacaacacctacctgctggaagaccagctcacagggcccagcagcacggaggcctacatccgggctctgtgcaaaggctgccggtgcttggagctcgactgctgggatggtcccaaccaggaacccatcatctaccayggctacacttttacctctaagatacttttctgtgacgtgctcagggccatcagggactatgccttcaaggcatccccctacccagtcatcctgtccctggagaaccactgtagcctggagcaacaacgagtcatggcccgtcacctgagggctatcctggggcccatrctgttggaccagccactggatggggttaccwcgagcctgccttcacctgagcaactgaagggcaagatcctgttgaaagggaagaagctgggagggctgctgcctgctggaggggagaatgggtccgaagccactgacgtgtctgacgaggwwgaggctgctgaaatggaggacgaggctgtgcgcagccaagtgcaacacaagcccaaggaggataaactaaagctggtgccggagctctccgacatgatcatttactgcaagagcgtccactttggtggcttctccagtcctggcacctctgggcaggcattctatgagatggcttccttctctgagagccgtgccctccggttgctgcaagaatcaggaaatggttttgtccgtcataacgtgagctgtctgagcaggatctacccggctgggtggagaacagattcctccaactacagtcctgtggagatgtggaacgggggctgccagattgtkgctctgaacttccaaacccctgggccagaaatggatgtttaccttggctgcttccaggacaatggaggctgtgggtatgtgctgaaacccgcctttctgagagaccccaacaccaccttcaactcacgtgccctgactcaggggccctggtggsstccrragaggctccgtgtccggatcatctctggacagcagctgccaaaggtcaataagaataagaattctatcgtggaccccaaggtgatcgtggagatccatggcgtgggccgggacacsgstagccgtcagacagcagttattaccaataatggtttcaacccacggtgggacayggagkttgagtttgaggtaacagtgcctgaccttgccctcgtacgcttcatggtagaggattatgattcctcttctaagarvgrctttattggccagagtactatcccctggaacagcctcaagcaggggtaccgccatgtccacctcttgtctaagaatggagaccagcatccatcagscacactttttgtgaagatctccatccaggactaagcccgggggtctgatgcagtccgacctgagtgagtggagctgtgtccgcacctcggccaaggctgacattattgcaccgacctctggcgcggagcctgaggccmtgaactgccttcagtgccaacamatcgcttgagcttctkcctctctggaggcccaggagtggtccgatccccggagcgctccaaaattccgttaggaacaacactgcatccctctccmtaccctctagctgtctttatggataagtttttataaaaaaaaaaaawmaaarrvwmmaaaaaaaaaaaaaaaaaaa

SEQ ID NO: 2317 - DNA, 1861 bp, Rattus norvegicus
  misc_feature (1482)..(1482): n is a, c, g, or t
  misc_feature (1745)..(1745): n is a, c, g, or t
gagttacagggagctccaccagagaacatctcagggagcctggctggaagcagcagagctccgagtctggtctgctgtgagcatccgctgtcctgcggggagggctcccatccctggctctcgattgcaaagaaatccaagcggaggaagggcgtacaccattggtctggcacgctccaccgagcccgagcccaactcccagccaccatgcttctactcttgttggggatcctgttccttcacatcgcggtgctagtgttgctcttcgtctccaccatcgtcagccaatggctcgagggcaatggacacaggactgatctctggcagaactgtaccacatccgccttgggagccgtccagcactgctactcctcatctgtgagcgaatggcttcagtctgtccaggccaccatgatcctgtctgtcatcttcagcgtcctgtccctgttcctgttcttctgccagctcttcactctcaccaaaggcggccgcttttacatcactggagtcttccaaatccttgctggtctgtgtgtgatgagtgcagcggccatctacacagtgagacacagtgagtggcatgtcaacaacgactactcctatggctwtgcttacatcctggcctgggtggctttcccgctggccctccttagtggcatcatctacgtgatcctgcggaaacgcgaatgaggcgcccgacgcaccatccgtmtaggctctgagcgtgcatagggtacacagggagggaggaaggaaaccagaaaaccaaaccawycaacccaaaagagytagcccccaaacccaaacgcaagccaaaccaaacagaacacagttgagtggggattgctgtcgattgaagatgtatataatatctatggtttataaaacctatttataacactttttacatacatgtacataggattgwtwgctttttatgttgaccgtcagcctcgtgttraatcttaaacgactctacatcctaacactataaccaagctcagtattttcgttttgwttykwttttttcatcttywtghyttgctyasasrtaraarmmamaraadmcacrtggccchcywwcatcwgaawgsmsrtcsykccctcccaktcaacctcataggataaccaaagtgcggggacaawccccagatggccagarsytcacactatgggtgacccagygaattwarcaggaatwatyckytksccsaatcmatgtgtkaagccytwrrcackmrsagacgawacgccytgaccagakccctytgcgaaaccratagctggwggmtgcggmacacttgrcmytgarkscggagtactgggvccacatgtttamatgrsacgkcakasacaarcmatctgygwmatgstsctatagmttyaccmwycckykdtattactaatcatwtaaaccactcactskraactcadttwmmwgkkktatgacctacarcaraacagasacccgayacraacggntcrwaactsctttcstacatagctmggctgwtgwtattacthmmmtaaataaatmtcaaagcbttcgtmactyccacarktttctcacgghcgrmgcawyargacgagcgtctagacccywrggactagmawawwccctkgctttctkggtctagagtgdtcwgkgccthcaagrmctgtctarcgatgacttgtakwkrscaccmhytgtmgawgtatatacsgdghccwtmtgatgbtaagamtmcaramctttctkkddndtgcbkgcwwytyctgatkwkatamcaacbgbgdggmctaagakscmtthmaawavmchtcrgmgkmvmhhahaaaaarrmawawmwmwmamwaaamaaaaaaamwmrrrmwaaaa

SEQ ID NO: 2318 - DNA, 1602 bp, Rattus norvegicus
tgcccggccgccgtcgccaccgccgccccggccgaccgagggacccgcccgcccgcggctgctccggatctagaggatcaagtcataatgggagcatttttakacaagccaaagatggaaaagcataatgcccagggccaggggaacgggttgcgatacggcctaagcagcatgcaaggttggcgagttgaaatggaggatgcacatacggctgtgatcggtttgccaagtggacttgagacatggtcattctttgctgtatatgatgggcatgctggttctcaggttgccaaatactgctgtgagcacttgttagatcacatcaccaataaccaggattttaaaggctctgcaggagcaccctctgtggaaaacgtaaagaacggaatcagaacaggttttctggagattgatgaacacatgagagttatgtcagagaagaaacacggtgcagatagaagtgggtcaayagctgwgggtgtcttaatttctccccaacatacttatttcattaactgtggggactcaagaggtttactttgtagaaatagaaaagttcacttcttcactcaagaccataaaccaagtaatcctctggaaaaagaacgaattcagaatgcagggggctctgtgatgattcagcgtgtcaatggctctctggctgtatcaagagctcttggggattttgattacaaatgtgtccatggaaaaggtcccacagagcagcttgtctcgccagagcctgaagtccatgatattgaaaggtctgaagaagatgaccagttcatcattcttgcatgtgatggcatctgggacgtcatgggcaacgaagagctctgtgactttgtgagatccagacttgaagtcactgatgaccttgagaaagtttgcaatgaagtagtcgacacctgtttgtataagggaagtcgagacaacatgagtgtgattttgatctgctttccaaacgcgcctaaagtctcagcagaggcggtgaagaaggaggcagagctggacaagtacctggagaacagagtagaagaaatcataaagaagcagggggaaggcgtccctgacttagtccatgtgatgcgcacgttagccagtsrgmacakscccagcctcccaccagggggtgaactggcaagcaagcggaatgtaattgaagccgtttacaatagactgaacccttacaaaaacgacgacactgattctgcgtcaactgatgatatgtggtaaagctgctcatctagccatggtttcacctttgcctssaagagagagagagatcagcgcatccttgctgagcctttaacatccatcaccgacttaaggaaggggtccgacatgggtgagggactacagcttcagcgatggaacagccagcccagaatggatttttttttttattgtaaatttgagacttatgtaagcgtgatttcaaammrwaawwmawrttgtaaatcagactccagcaatttttgttgtatgattttggttttttgtaaagtgtaattgtccttgtacaaagtgctcatatttaattatgaactgctttaaaatcactatcaatgataaaggaaatttggcttgttgtgtggcaca

SEQ ID NO: 2319 - DNA, 2631 bp, Rattus norvegicus
  misc_feature (2579)..(2579): n is a, c, g, or t
cggccgccattacagaaagccgagtcccgagctakggcgagcggaggmggagcacagcggccgccgagcactgcgagcgagcggccggcgccacgccagcagccgcctggggccgcakgaagcaccccggggagcggcggcggcgtgtgcgtgtggcscgggtgcgggcggcggcgcgggagcagsgcakagcggcagccggttcgggcgggcggcatcatggacgagaagttgttcaccaaggagctggaccagtggatcgagcagctgaacgagtgcaagywkctctccgagtcccaggtcaagagcctctgcgagaaggctwaagaaatcctkacaaaagaatctaatgttcargaggttcgaystcswgtyactgtgtgtggrgatgtgcatgggcaatttcatgacctcatggaactctttagaattgskggtaaatcaccagatacaaattacttgtttatgggrsackatgtggacagaggatattactcagttgaaacagttacactgcttgtagctcttaaggytcgytaccgagagcgtatcaccatactccgagggartcacgagagcagacagatcacacaagtttatggkttctacgatgagtgtttaaggaaatacsgaaatgcaaatgtttggaaatacywyacagacctttttgactaccttyctctcactgccttggtggatgggcasatcttyygtctacatggkggtctttyaccatccatagacacactggatcacatycgagcmcttgatcgcctacaagaagttcctcatgagggkccaatgtgkgacttgstgkggtcagawccagatgaccgkggkggctgggsgatatctcctyggggagstggttataccyttggccarratatttstgagacatttaatmatgccaakggcctcacgtkggtgtccasagctcaccagctggtgatggarggatataactggtgccatgaccggaatgtagtaacaattttcagtgctccaaactattgctatcgttgtggtaaccaagctgcaatcatggaacttgatgacactcttaagtattctttcttgcagttcgatccagcacctcgtagaggcgagccacatgtcactcgtcgtaccccagactacttcctgtaatgaaagtttaaccttgtacagtattgccatgaacaccgtctgttgacctaatggaatcgggaagagcagcagtaactccaaagtgtcagaaatagttaacattcaaacttgtttccacacggaccaaaagatgtgccatataaaatacaaagcctcttgtcatcaayagccgtgaccactttagaatgaaccagttcattgcatgctracgcgacattgytggtcaagaatccagtttctggcatagcgctatttgtagwtacttwtgctttcttgagasactgmagatytmggatgtaacmttaacacytgtkagtmcagttgactyccacttagctgtagcttactcagcatgmctgtagatgaggatagcaamcamtcattggagyttaatgaacatttttaaatgagtaccaaggccyyccctcttkdtgwgttckttcagggawacwrhtaatttaattgtrtgatttctstgcactcagwttctcccttytmaaatctcggccccgcgttgwtctttgwtactgtcagaaaacctggtgagwtgttttgaacagaactgtctccctcctgtaaratgatgtmctgcacamgtcmccgcagwgttttcataataaacttgagaactgrgawardharrwwwrrawwrtawmarwrrrmamramwrrkgctkkttattaaacaagmwwaatytattgatcaatttcagaatttgtagaattccaggtaarraaaaataaagatcaaggccmctrtrtaammwvwmwrrmaamwmmwwrrwrwmwwwgagaagaacttggggacttgtttgacagactgcagcttgtcttkktgctkgcctgcgcttgtgmamggraatctgtgctgcttcagtargacttgattgttaaaccatagaactyragagttatgtgtttaggattttacttaaaatggcatgttttcaggtagaacttaacaaactaaatgatgtgtctaattagtgtagtttctggttacaaaaatactgctatgtwyatttcatggactctttaaaatgattgacvgwacggtaagttcttagcrmacatttgkacatttcttgtcaagtcatgtgatcttmgagttagttaracttgtctcagataagctgctaggaccttagcttgtgttccgtgactggtaaytragtgacgccgagtagaaaggaagctgacttgggattgtgtttcttcgtcccagatccgagastggagcmtgagcgccagtgctcagcagtgatgagttttcctttctgttctttgacwtggcttaaaaccgaagacagttcttctgcggggactgaatatytgctattttaagctacctgggcraacatcaggatgcttgatgaktactgtgtgagtgtagtaaatamatgtttccttgctttgwrmwrwrhwrarwwnrraammaamarwraagttacaacactgccctgtataaagaaaaaaaaaaaaa

SEQ ID NO: 2320 - DNA, 1861 bp, Rattus norvegicus
  misc_feature (1843)..(1843): n is a, c, g, or t
ggcacgagcgccgagagaaccgcggccagagcgcggagaggcctgcgggcggcgacggcagcgggagggcgggcgccgtcgggccggagcctcccccgagccgcgccgcgctctggctccgagccgtgagccctttttgccgcgccccgagcgcgtggccgggggccgggcggggcgggcgctcccggaggccggggccggcggctgcccgctgggcttgggcggggcgcgggctgcccgctccgcggctcggtggtcccgcygsrggycggcggcgggggaggcggcggggacgmgcggctcgccgccatggacgacaaggcgttcaccaaggagctggaccagtgggtggagcagctgaacgagtgtaagcagctgaacgagaaccaagtgcggacgctgtgcgagaaggctaaggaaattttaacaaaagaatcaaatgtacaagaggttcgctgtcctgttaccgtctgtggagatgtgcatggccaattccatgaccttatggaactcttcagaattggtggaaaatcaccagacaccaactatctattcatgggygrcwaygwagrcagaggatattattctgtggagaccgtgactcttcttgtagcattaaaggtgcgctatccagagcgtatcacaatattgcgaggaaatcatgaaagccggcagatcacacaagtatatggcttttatgatgaatgcctacgaaagtatgggaacgccaacgtgtggaaatactttacagatctctttgattatcttccacttacagctttagtagatggacagatattctgcctccacggtggcctctctccatccatagatacactggatcacataagagccctggatcgcttacaggaagttccacatgagggcccaatgtgtgatctcttatggtcagatccagatgaccgtggtggctggggcatttctccacgtggtgctggctacacatttggacaagacatttctgaaacatttaaccatgccaacggcctcacactggtgtcccgtgctcaccagcttgtaatggaaggatataattggtgccatgatyggaatgtggtcaccatttttagtgcacccaattactgctaccgctgtgggaaccakkctgctatyatggaattagacgacactttaaaatactcttttcttyagtttgacccagcacctcgtcgtggagagcctcatgtgacccggcgcaccccagactacttcctataaattyctccccaggacctgtctttgtatgttgaagtatacctggctttttaaaaaakatatatmcatatatatatttaaaaacaacagttatctgtgtgkcwcwgkarcmaaykgtrcwmtgkyktsmcgtkmwvacacwkcwtgkamyrraacgtgccatactaatkgtgwgccatsakcrsrryrygarcttgagtccactgtcctagccgagtcawycmkrymrvydcswgsccgcmkgcytgytktagtagyygtcmktmgtrmctggttaagggmaagggtmactggtggcttcatytccttygcgcttacttggaaatttagttacaagtttaactggcatggattatagagttgsagttttatykkyamgrrktgayaagykgamktcmrcttmaattcwtaaccctttattwtgttgaaatgtatgamtaactgaasaagagattcttgggagtatgttgtcataacaytaagatktcctttcaagtttcmtgaamtgaattactgttggatgttgacctgcacattctgtmtrhttstcctgacagtsytgcatcctccttgctstactgaacaamtmaacttcccaayttmrvsngmmrmmmaaaaaaaaaaa

SEQ ID NO: 2321 - DNA, 3050 bp, Rattus norvegicus
cccgcccggcccggcacctagccgagccccgggcccagcatggccgccccggagccggcccgggccgcgccgccccctcccccgcccccgccgccccccctcggggccgaccgcgtcgtcaaagccgttccttttcccccaactcaccggttgacatctgaagaagtgtttgatatggatgggatacccagggttgatgttctgaagaaccatctggtaaaagaaggtcgggtagatgaagaaattgcactaagaattatcaatgagggtgctgccatacttaggcgggagaaaaccatgatagaagtagaagctccaattacagtgtgtggtgacatccatggccaattttttgatctgatgaaactttttgaagtaggaggatcacctgctaatacacgatacctttttcttggtgattatgtggacagaggttattttagtatagagtgtgtcttgtatttatgggtcttgaagattctatacccaagcacattattccttctgagaggcaaccatgaatgcagacacctcactgagtattttacctttaagcaggaatgtaaaattaagtattcagaaagggtctatgaagcttgtatggaggcttttgacagcttgccccttgctgcacttstaaaccaacaatttctttgtgttcatggtggactttcaccagagatacacacactggatgatattaggagattagatagatttaaagagccacctgcatttggaccaatgtgtgacttgctgtggtctgatccttctgaagactttggaaatgaaaaatcacaagaacattttagtcataatacggttcgaggatgttcttatttttataactatccagcagtgwgtgaatttttgcaaaacaatamwttgktatcgattattagagctcatgaagstyaagatgcaggctatagaatgtwcagaaaaagtcaaactacagggtttccttcattaataacaattttttcggcacctaattacttagatgtctacaataataaagctgctgtactaaagtatgagaacaatgtgatgaacatccgccagtttaactgttctccacatccttactggttgcccaattttatggatgtctttacatggtctttaccatttgttggagaaaaagtcacagagatgttggtaaatgttctcagtatttgctctgatgatgaactaatgacagaaggggaagaccagtttgatgtaggttcagctgcagcccggaaagaaatcataagaaacaagatccgagcaattggcaagatggcaagagtcttctctgttctcagggaggagagtgaaagcgtgctgacactcaagggcctgactcccacagggatgttgcctagtggagtgttggctggaggacggcagaccttgcaaagtgccacagttgaggctattgaggctgaaaaagcaatacgaggatcctctccaccacatagaatctgcagttttgaagaggcaaagggtttggataggatcaatgagagaatgccaccccggaaagatgctgtgcagcaagatggtttcaattccctgaacaccgcacataccactgagaaccacgggactggcaaccatagtgcccagtgaccagcggcttcccasggatggacagatcactaaggagccggaggggtcgsccsakctgatrataaatgtcataatctctytgaakaaacaaaccattgtgctttttgagacccttgcccccttccyggatggaggcttgagggccttgggacttgtgctgtccataagattggggaatcgctgccacarcggararcagtkagcaaggggcttggggcaaattccagtggaggaagcccaaacctccatttatgcttgtggttcacacatttacgtttacaaatgagatttcctttgttttctccctcagtagaattagatttttttcaaccatgactttaaatgcaatctttagagttaahgtggaacctccctcacccccaccccatgaaatgtctttaaraggatggattagcatggtcttaaaatatatttctgaggttactagatgtattttgaattgtagacaaaatctgagaaacccagttggtgtttatataaaaacgctgacctcaggtcatagttcttaaatgtggctaattctgtaacatagtcttggtatttttcaattatgaatgcataaactatttctaagragactcttacttgaacamgatccamaaaaccaatttagatyctttttkssccmkatcttttgagattttcaccccagagatttarggaaaaaaaaaammwaaawtttaaaattatgaagaattacagaattactcatttaaggtrctytaaaagaagtttgtacattgtcaaagtaaattttaattcamatcattgtctgtraaacttgacgtattttgtgtatgcatsktttcatykwgsaratatttaatatatagacctatgrtgwacakgtacmacatgtataggttgcgtggatattatgagaaatwwtagtwtcttgtgagtactccagttgcttaaaaaccaccabggsgatttgctgctggwtctaacatttttatgttwaaatgcaaaggaaatttaaagtgtytggacatgtttytgactaatgcarccyrgmmkcaawggttctcttcagcccttcagatgttagtggaagcataaaagtcaagactgcatgtcgaaattttacttttgatagttacagaactgcttggttaaattaaatggasccatgtgctmmtyktrcmgttactgaccttgtactgattsccactgtagtttggtgatccctttactttggtggcttgcttcccttatgccctggactacagctcatagcatcaggcagcggagccatctgctgttttgtttgccaggaagtgcaccttgtatggtcttctgtytaagttggaaatattatgcatgtgcaggactattcaagtattttataaacagtagcacacaataaattccatgcatgggccgcygctcstrmmraaaaaaaaaaaaaa

SEQ ID NO: 2322 - DNA, 2809 bp, Rattus norvegicus
aacaccagacgagccagtcgctggcgttgctcatccatctactcccagagtcatgagtcgaaggagtctctcgctccagtttcccctgctgctgctcctgctgctgctcccaccacccccggtactgctcacagatgctggggtaccctcaccagtcawtccctgttgttactatccatgccagaaccagggtgtctgtgtccgcttcggcctcgaccactaccaatgtgactgtactcgcacgggctactcgggccccaactgtactatccctgagatctggacctggcttcggagttccctgcggcccagcccctcattcacccatttcctgctgacacacggrtactggatctgggagtttgtgaatgccaccttcatccgagaagtactcatgsgcykggtmmtcacggtgcggtccaaccttatccccagccctccaacctacaacacagcacatgactatatcagctgggagtccttctccaacgtgagctactatactcgcattctgccctctgtacccaaagactgtcccacacccatgggaaccaaagggaagaagcagttaccagatattcatcttctggcccaacgattgctgctgagaagggagttcattcccgscccgcaggggaccaacgtcttgtttgctttctttgcacaacacttcacccaccagttcttcaagacctctggaaagatgggtcctggctttaccaaggccttaggccatggggtagaccttggccacatttatggagatagtctggaacgacagtaccacctgcggctcttcaaggatgggaaacttaagtaccaggtgctggatggagagktgtacccaccttccgtagaacaggcgtccgtgwwgatgcgctacccaccaggtgtcccgcccgaaaagcagatggctgtggsccaggaggtgtttgggttgctcccgggtctgatgctcttctccacgatctggctgcgcgagcataaccgtgtgtgtgacttgctgaaggaggagcatcctacatgggatgacgagcagctcttccagaccactcgcctcatccttakaggggaaaccatcragattatcatcgaggagtacgtacagcacttgagtggctatttcctscagctcaagtttgacccggagctsctgttccgagcccagttccagtatcgcaaccgcatcgccwtggaattcaaccacctctatcactggcatccgytcatgcctgattccttccaagtgggctcacaagagtacagctatgagcagtttttatttaacacatctatgctggtggactacggtgtcgaggcactggtggatgccttctctcgccagagggctggccggattggtgggggtaggaactttgactaccatgttctgcatgtggccgaggatgtcatcaaggagtcccgagaaatgcgcctgcagtccttcaatgaataccgaaagaggtttggcctgaagccttacacttctttccaggagttcacaggagagaaggagatggccgctgagttggaggagctatatggtgacatcgatgctttagagttctacccggggctgatgctggagaagtgccagcccaactccctctttggggagagcatgatagagatgggggctcctttctccctcaagggcctcctagggaatcccatctgttccccagagtactggaaacccagcacattcggtggtgatgtgggtttcaacatcgttaacacagcctcactgaagaaactggtctgcctcaacaccaagacctgcccctatgtctccttccgtgtgccagattaccctggagatgacgggtctgtcttcgtgagaccgtccactgagctctgaggggctcttctggagggaggagttttgttcctgaagaagacagtccttgatgtgggtttcctggctgggcattgtgagagctgacattgacatttggaacttggggtctcacccttgcctagaatattgtgmkkyyrykwkatttttttttgccattttaggatgctgaatcctttgctaactaagawagttaggagtggtttkgtctggcgtcttagaacttggctccttgttggcaacacagaaagttagatttctggttgatttggaatacaggcttagaactttatatcacagggcarggtgtggttccaggcaccttaatcccagcacttggaaggcagaggcagttgaatctctgtgagtttgaggccagtctgstttatgcagtgagttctaggccagccatggctgcatagttagactttttctcaaaacaaacaaacaaacaatcaaacacacaactttagaatagaatgtagaactccttaaaaaattcccttgaaagttaaaggggttcttaattttcttctwagaatctggagscccctwagaatgttgactatctgrcgggtgactcagaaggtcctgtkscamgwsratratctrtaacatggccmaaacwttccmaacttgaatgtctagaatgtggaattggttcattttcctgttcagtgaaatggacacagaacaaaagaacccaatgtccagcaagggttgctttgcccaagtctgtgtctataccagagggcaaggcagtaaggtgttcttgggtgtcaygttagactcttwccacagatgtggtagggaacaggtggactcatytacgattttggttggragccrccacaktcctatccccaagcaggtctwtgctcrtggcarctctttstygtgrarctaataaaattctcttcccmaaaaaaaaaaaaaaaaaaaaacctcgtg

SEQ ID NO: 2323 - DNA, 3894 bp, Rattus norvegicus
tagtgactgagactcctaagtcttcagcccaaccatggctaatggggtgatcccaccgcccggggggccctcccccctaccccaggtccgggtgcccttggaggagcccccactgggtccagatgtagaagaggaggatgatgacttgggcaagaccttggctgtgagcaggtttggggacctcatcagcaagaccccggcctgggaccctgagaagcctagccgcagctacagcgagcgcgactttgagtttcaccggcacacatcccaccacacccatcacccgctctcagcccgcctgcctccaccccacaagctacggcgactgccccccacctctgctcggcacgccaggaggaagaggaagaaagagaaaacctctgctcccccctcagaagggacaccccctatccaggaggaggggggagctggagcagaagaggaggaggaggaagaggaggaagaagagggagagtctgaggcagagcctgtggagcctccacccccagggccaccacagaaagcaaagttctccattggaagtgatgaggatgacagcccaggtctttctatcaaggctccctgtgccaaggccctgccttccgtgggcctgccgtctgaccagagtccccagcgctccggcagctcccccagtccccgggcccgggcttcccgaatctctacagagaagagtcgaccctggagtccatcagccagctatgacctgcgggagcgattgtgcccaggcagtgccctgggcaaccctgggccagagcagcgggtgcccactgatgaggcggaggctcaaatgctgggttctgccgatctggacgacatgaagagtcatcggctggaggacaaccccggagtgcggcgacacttggtgaagaaaccatcccggatacagggtgggagaggcagccccagtggcctggcgcccatcttgcgcaggaaaaagaagaagaagaagctggatcggaggcctcatgaggtgttcgtggagctgaatgaactgatgttggaccggagccaggagccacactggcgggagacagcacgctggatcaagttcgaagaggatgtggaggaggagacagagcgctgggggaagcctcatgttgcttcgctctccttccgtagcctcctggagcttaggaggaccattgcccagggagcggctctcctggacctggagcagaccaccctgccgggcatcgctcaccttgtggtggagaccatgattgtatctgaccagatccggcccgaggacagggctagcgttctgagaactctgctcctgaaacacagccatcccaacgatgacaaggacagtggctttttccctcgaaatccgtcaagctccagtgtgaactcagtcttggggaatcaccacccaactcctagtcatggccctgatggtgcagtacccaccatggctgatgacctaggggagccagccccattgtggccacatgaccctgatgcaaaggagaagcccctccacatgcctgggggagacggtcaccgggggaaaagcctgaaactgctggagaagatccctgaggacgctgaggccactgtcgtgcttgtgggcagcgtgcctttcttggagcagccagcagcagcttttgtgaggctcagcgaggctgttctcttggagtctgtgctggaggtccccgtgcctgttcgcttcctcttcgtgatgctggggcccagccataccagcaccgactatcacgagctagggcgctccattgccacgctcatgtctgacaagctgtttcacgaggctgcctaccaggcagatgaccggcaggaccttttgggtgccatcagcgagtttttggacggtagcattgtgattcccccatcggaggtagagggccgagacctactccgttccgtggctgccttccagcgagagctgctgaggaagcgacgggagcgggaacagaccaaagtggagatgaccacccggggaggctatgtggcccctggcaaagaactgtctttggagatgggaggctccgaggcaacctctgaagatgatcccctgcagcggacaggctcagtgtttggggggctagtacgggatgtgaagcgccggtacccacactaccccagtgacctacgggatgcactgcactctcagtgtgtggctgccgtgctgttcatttatttcgcagccctcagccctgctattacctttgggggtctgctaggagagaagactgaggggctgatgggtgtgtcagagctgattgtgtccacggctgtgcttggggttctcttctctctgctgggggcccagccgctgctcgtggtgggcttctctggccctctgctggtcttcgaagaagctttcttcaagttctgccgagctcaggacctggaatacctcaccggtcgagtgtgggtgggcctctggctggtggtcttcgtcctggccctggtggcggctgagggcagcttccttgtccgctacatctcgccatttacccaggagatcttcgctttcctcatctcactaattttcatctatgagactttccacaagctctataaggtgttcacagagcatcctttgctgcccttctacccaccggaggaggccctggagcctggcttggaactgaatagtagtgccctgccccccacagagggaccaccaggtccccggaaccagcccaatacagctctgctgtccctcatcctcatgctggggactttcctcattgccttcttcctgcgaaagttcaggaacagccgcttcctggggggcaaggctcggcgcgtcatcggggacttcggcattcccatctccatcctggtgatggtccttgtggattactctatcacagacacctacacacagaagctgacggtgcctacagggctctcagtgacttccccgcataagcgcacgtggttcatcccacccttgggcagtgcccgccccttcccaccatggatgatggtggctgctgctgtccctgcactcttggtcctcatcctgatattcatggagactcagatcactgcgctcatcgtcagccagaaggcacggaggctactcaagggttccggcttccatcttgacctgctgttgattggctctttgggtggcctctgtgggctcttcggcttgccctggctcacagccgccactgtccgctctgtcacccatgtcaacgcgttgacggtgatgcgtactgccattgcacctggtgacaagccccagatccaggaggtgcgggagcagcgagtcaccggggtgctcattgccagcctcgtgggtctgtctatcgtcatgggagctgtgctgcgcaggatcccgttggccgtgctctttgggattttcctgtacatgggagtcacatcactgtctggtatccagttgtcccagcgtctgctgctcattttcatgccagccaagcatcaccccgagcagccctacgtgaccaaggtgaagacatggaggatgcacctgttcaccttcatccagctgggctgcatcgcgctcctctgggtggtcaagtcaacggtggcctcactggcctttcccttcctgctcttgctcacggtgcctctgaggcgttgccttttgccccggctcttccaggacagggagctgcaggcgctggactctgaagacgcagagccaaactttgatgaggatggtcaggatgagtacaatgagctccacatgcctgtgtgaccctcaagatggtggccctccgagaccccaccttggtgactcacctcaggacccagggatgtgcctggagtcactgcccatgccaggacagtggccccttgactttcacagcccagacggcaccggctttgaagtcattataacacactccttgtcttgaaaaaaaaaaaaaaaaa

SEQ ID NO: 2324 - DNA, 1928 bp, Rattus norvegicus
gaacaccactgcctaccgctcccaacagtggagacagggctcaggaatgcaggaccaccccacatcccagtgacttctttggctcccgggtgtccaaagctggggtgtggtggcctgcgcctgtcaccccagcttcagaagctgggggcagatgactctcagggagttccaggccagcctggtctacacagtcagagtctgcaggagtgacttacagaattcctgagccttgacattcccaggcccaaagctccttgctgcaaggctgtggaacctgatagggcgcagagacaccaagtgcgccagagcctgcatcagcccaacgtcccagtcacctgcatctgatggggtgttgacccccttatcacgtcaggctcaggagccatgtggctcaacagcacctcgctgggggcatgcttccgcccagtgaacatcacgctgcaggagcgacgtgccatcgcgtcgccatggttcgcggcatccttctgcgcactgggcctggggtccaacctgctggcgctgagtgtgctggccggggcgcgacctggggcgggaccccgctcctccttcctcgctttgctgtgcggcctcgtcctcaccgacttcctggggctgctggtcaccggcgctgtcgtggcgtcgcaacacgccgccttgttggactggcgtgccactgatcccggttgccgcctttgccacttcatgggcgcggccatggtgttcttcgggctgtgtcccctgctcctgggggccgcgatggctgcagagcgcttcgtgggcatcacacggcccttctcacgacccgcagccacgtcgcgccgcgcctgggccactgtggggctggtgtgggtgggggccgggactctcgggctgctgccactgctggggctcggccgctacagtgtgcagtaccccggctcctggtgcttcttgactcttggggcgggacgcggcgacgtggccttcgggctcatgtttgctctcctgggcagcgtgtccgtggggctgtccctcctgctcaacaccgtgagcgtggccacgctctgccgcgtctaccatgcgcgcgaggccacacagcgcccccgggactgtgaggtggagatgatggttcagctcgtaggcatcatggtggtggccacggtgtgttggatgcccttgctggtcttcatcctgcagaccttgctgcagacgctacctgtcatgagcccctccggacagctgttgcggaccacggagcgccaactgctcatctacctacgcgtggccacatggaaccagaksttggacccctgggtctacatcctcttccgtaggtccgtgcttcgacgcctgcatccaaggttcacttcccagctccaggctgtgtccttgcactcaccccccacacaggccatgctcagtggaccctgaaggacggtgccaatcaaagctggggttcttggtgactgctaacgacctgtctcctgtcccaggagcctgaatgtttggtgggatggagttacaacacagggctgactcctgtgaackacaaagatacctcctccatkytagggrratcctccctggccccctccccagamtacttktcagctargaggttggrgcatatgtggraggtccttgcaggaatytwtggttacmyagrgagaacctggggtgccgatggcatytcccatcttgccatagtccgcgtctgthtcarccccgttgtcccgggcttcatgtttgttcctttaggctcaaggatcatckgccttgggtgttggaagcacccactgtggtccmgtagctggcthtggagttaccaacctctccgtgtttaytgagccccctccccccacggstatccaacacacatgctcaataaatggttgaatgtccgggtawamarmarrwrmwmammmaarmrwmaaaaaaaaaaaaaaaaa

SEQ ID NO: 2325 - DNA, 2043 bp, Rattus norvegicus
cgtccaccgccagaccagagttcttttggtcggacagatctgtgagacttccaggagagcacccttgggctctactcaccctgctccttcagggatggaggcaacagcggccagcacctccctgcccgaccctggtgactttgaccggaacgtgccccggatctgtggagtgtgtggagaccgagccacaggcttccacttcaatgctatgacctgtgaaggctgcaaaggtttcttcaggcggagcatgaagcggaaggccctgttcacctgtcccttcaatggagattgccgcatcaccaaggacaaccggcgacactgccaggcctgccggctcaaacgctgtgtggacatcggcatgatgaaggagttcatcctgacagatgaggaggtacagcgtaagagggagatgataatgaagagaaaagaggaagaggccttgaaggacagtctgaggcccaagctatctgaagaacaacagcacatcatagccatcctgctggacgcccaccacaagacctatgaccccacctacgctgacttcagggacttccggcctccagttcgtatggacggaagtacagggagctattctccaaggcccacactcagcttctccgggaactcctcctcctccagctctgacctgtacaccacctcactagacatgatggaaccatccggcttttccaacctggatctgaacggagaggattctgatgacccgtctgtgactctggacctgtctcctctctccatgctgccccacctggctgaccttgtcagttacagcatccaaaaggtcatcggctttgccaagatgatcccaggattcagggatctcacctccgatgaccagattgtcctgcttaagtcaagcgccattgaggtgatcatgttacgctccaaccagtctttcaccatggatgatatgtcctgggactgtggcagccaggactacaagtacgacgtcaccgatgtctccaaagctgggcacaccctggagctgatcgagcccctcataaagttccaggtggggctgaagaagctgaacttacatgaggaagagcatgtccttctcatggccatctgcattgtctccccggaccgacctggggtccaggacgccaagctggtggaagccattcaggaccgcctatccaacacgctgcagacctacatccgctgccgccacccgcccccaggcagccaccagctctatgccaagatgatccagaaactggccgacctgcggagcctcaacgaggaacactccaaacaataccgctccctctccttccagcccgagaatagcatgaagctcacaccccttgtgctggaggtgttcggcaatgagatctcctgaccagggtggcccacagtggtgcctgggtagggccgctcctccagagccctgtgcccaggccctgggcttggttgcagcccagcagtgcctcctgccctttctggagttcagtccttcctctgccatggcctctgtctgtctgcctcatcctttctcctgcccagcctaacacctggtctccctttcctgtagacctcgagttgctcctgtctcttgagacctcagttaggagaggctgctgtttatctgacaaaggaactcaattggggatagagggcaggggctgaaggcggaactctgcctaggggatgcctccaccacaaggggctgctgcttgtgtcaagggaggcaggcagaagagacgcattcactcctcagggacaggtacctgcacctcccctcactccagccctacctgcccaaagcctagtgagaaatctggcccctgcctgcgaagggtacacaacctacccatcatccctactgtgtcccgtctcgtcctgccgcctgtctgtgttattctgacccgggggagtaggtcactgaggggcctccttcctctgcctttatactcacggggctcactcactgccaagatgaccaaatacactaccacacgaaccaaggagcactcacccagccctgcagttcccacctttgaggttttgccatgggaa

SEQ ID NO: 2326 - DNA, 1245 bp, Rattus norvegicus
cggcagtgatggacgggtccggggatcatctcggaggcggcggtgaggcgggaggcggagaactaggccgggtccaaggaccccaggacccctccggctgtgggctcgggcgggggctggctggggcgcgcggatccattccgaccggcgcatccgcaccctgtgagcggacatccgcgtgcgcgcccccgggcaggcccgggcttgtcgctggcgccacttcctgctggtggcctgggatggatcggaaggccagcgccatccccccagctgggggtctgtttgctttagggattccgcagtctgggttagcagaggagctgggatgcaggttgggtcccgccccctgtccatcagaagcagtagccctacttgtcactactagggtccccagctctgtctccccwcagggtkatgagcctacksagyccsskgactctcyckgrgrcssmggartssacggswccsskkwscwsctcgkmkscrscgggcccaccagctctgaacagwtcatgaagacaggggcctttttgytacagggtttcatccaggatcgagcagagaggatggctggggagacacctgagctgaccttggagcagccgccccaggaygcatccaccaagaagctgagcgagtgtctcmggcgaattggmgatgaactggacaayaayatggagmtgcagaggatgattgctgaygtggayacrgactccccccgagaggtcttcttccgkgtggcagctgacatgtttgcwgayggcaacttcaactggggccgsgtggttgccctyttctactttgctagcaaactggtgctcaaggccctgtrcactaaagtgcccgagctgatcagaaccatcatgggctggacactggacttcctccgkgagcggctgyttgtctggatccaagaccagggtggctgggawggcctcctytcctacttcgggacscccacatggcagacagtgaccatctttgtggctggagtcctcacygcctcrctcaccatctggaagaagatgggctgaggcttcctgctgccttggactgtgtcttttcttcataaattatgacatttttcctgggatgaatgggkaacgrgraaaggcatttttcttacttttgtaattattgggaggggtgggaatggtggcctgggggaggtgccaataaacctcaggtccactttggaaaaaaaaaaaaaaaaaaaaaaaaaaaaaaaaaaaaaaaaaaaaaaaa

SEQ ID NO: 2327 - DNA, 3009 bp, Rattus norvegicus
tgcttcccacccgacccccaacccccatccccagttggagccgccgcccgagaggccgggccgtcgtcttgggaggagtccccgccgccgtcacctccgccatggagctcataaccatcctcgagaagaccgtgtctccggatcggctggagctggaagcggcgcagaagttccttgagcgtgcggctgtggagaatctgcccacgttcctggtggaactgtccagagtgctggcaaatcccggaaacagtcaggttgccagagttgcagctggtctacaaattagactcttgacatcgaaggatccagatatcaaggcacagtaccagcagaggtggcttgctattgatgctaatgctcggcgggaagtcaagaactatgttttgcagactttgggcacagagacttaccggcctagttcagcctcacagtgtgtggctggtatcgcttgtgcagagatcccagtaagccagtggccggaactaattcctcagctggtagccaatgtcaccaaccccaacagcacggagcacatgaaagagtccacactggaagccatcggttacatttgccaagatatagacccggagcagctgcaggataaatccaatgagatcctgactgccataatccagggcatgcggaaggaagagcctagtaacaatgtgaagctggccgctaccaacgcgctcctgaactcactggagttcaccaaagcaaacttcgacaaagagtctgaacggcactttatcatgcaagtggtctgtgaagccacacagtgtccagatacaagggtaagagtggctgctttacagaatctagtgaagataatgtccttgtattaccagtacatggagacatacatgggccctgccctctttgcaatcacaattgaagcaatgaaaagtgacattgatgaggtagctctccaagggatagagttctggtccaatgtctgtgatgaggaaatggatttggccattgaggcttcagaggcagcagaacaaggacggcccccggagcacaccagcaaattttacgccaagggagcgctgcagtacctggtgcccatcctcacacagacactaactaaacaggatgaaaacgatgacgacgatgactggaacccttgcaaagcagctggggtgtgcctcatgctcctgtctacctgctgtgaagatgacattgtgccacatgtccttccctttattaaagagcacatcaagaaccctgactggcggtaccgggatgcagcagtgatggcttttggcagcatcttggaaggaccagagcctaaccagcttaaaccattagtcatacaggctatgcccaccctgatagaattaatgaaagaccccagtgtagttgttcgagatacaacagcatggactgtgggcaggatctgtgagctgctgcctgaagctgccatcaatgatgtctacttggcaccccttttacagtgtctgattgagggtctcagtgctgaacccagagtggcttcaaatgtgtgctgggctttttccagtctggctgaagctgcttacgaagctgcagatgtagctgatgatcaggaagaaccagccacctattgcttgtcttcttcctttgaacttatagttcagaagctgctggagaccaccgacagacctgatggacaccagaacaacctgagaagttctgcatatgaatctctaatggaaattgtaaaaaacagtgccaaggattgttaccctgcggtgcagaagaccaccctggtcattatggaacggttgcagcaggtgcttcagatggagtcccacatccagagcacgtcggacaggatccaattcaatgacctccagtctctactctgtgcaactcttcagaatgttctctggaaagtgcagcatcaagatgctttgcagatctctgatgtggtcatggcctccctgttaaggatgttccaaagcacagctgggtctggcggagtgcaagaagacgccctgatggcagtcagcacactggtggaagtgttgggtggtgaattcctcaagtacatggaggcctttaaaccattcctgggcattggattgaaaaattatgctgaatgccaggtgtgtttggcagctgttggcttagttggagacttgtgccgagccctgcagtctaacatcttacctttctgtgatgaggtgatgcagctgctcctagagaacttagggaatgagaatgtccacaggtctgtgaaaccacagattctgtctgtgtttggtgacattactcttgccattggtggagaatttaagaaatacttggaggttgtactgaatacactgcagcaggcctcccaagcccaagtggacaagtcagactttgacatggtggattatctgaatgagctaagagaaagctgcttggaagcttatacgggaatcgtccagggattgaagggagaccaggaaaacgtacaccctgatgtaatgctggtgcaacccagagtagaatttattttgtcttttattgatcacattgctggagatgaggatcatacggatggagtggtagcttgtgctgctggactgataggggacttgtgtacagcatttggaaaggatgtactgaaattagtagaagctaggccaatgatccatgamctattaactgaagggcggagatcgaagactaacaaagcaaagacccytgctacgtgggcaacaaaggaactgaggaaactgaagamccaagcttgatctggtaccattgggatgatgacctgagacccccactggaaatctccaatcttttgaaaraacccggaagtgaggagtgtgcacggatgctgaatgtttgggaatgagaggatgagtgagtgaggcttgaaaacaccacactgaaaatcctgccacagccaacagcagcagcgctgttagtgagctaagtaagcactgactttgtagaaaacayaacatcagccatcttggaacagagaaacaatggwtttacttacttaytaaaaaaaaaaaaaaaaaa

SEQ ID NO: 2328 - DNA, 3630 bp, Rattus norvegicus
ccagcccggagcgacagccgcgggcgctccgcaacaccaggtgaacagccatggcgggctggattcaggcccagcagctgcagggagacgctctgcgtcagatgcaagtgttatatgggcaacatttccccatcgaggtccggcactacctggcccagtggatcgagagccagccgtgggatgctattgacttggacaatccccaggaccgaggccaggccacccagctcctggagggcctggtgcaggagctgcagaagaaggcagaacaccaggtgggggaagatggctttgtgctgaagatcaagctggggcactatgccacgcagctccagaacacgtacgaccgctgtcccatggagctggttcgctgtatccgtcacattctgtacaatgaacagaggctggtccgagaagccaacaattgtagctcccctgctggtgtcctggttgacgccatgtcccagaagcaccttcagatcaaccaaacgtttgaggagctgcgcctgatcacacaggacacggagagcgagctgaagaagctgcagcagacccaagagtacttcatcatccagtaccaggagagcctgcggatccaagctcagtttggccagctggcccagctgaacccccaggagcgcatgagcagggagacagccctccagcagaagcaagtgtccctggagacctggctgcagcgagaggcacagacactgcagcagtaccgcgtggagctggttgaaaagcaccagaagaccctgcagttgttgaggaagcagcagaccatcatcctggacgacgagctgatccagtggaagcgggggcagcagctggccgggaacgggggtccccccgagggcagcctggacgtgctgcagtcctggtgtgagaagctggccgagatcatctggcagaaccggcagcagatccgcagggctgagcacctgtgccagcagctgcccatccctggccccgtggaggagatgttggccgaggtcaacgccaccatcacagacatcatctcagccctggtcaccagcacgttcatcatcgagaagcagcctcctcaggtcctgaagacccagaccaagttcgcggccaccgtgcgcctgctggtgggcgggaagctgaacgtgcacatgaaccctccgcaggtgaaggcgaccatcatcagcgagcagcaggccaagtccctgctcaagaacgagaacacccgcaatgattacagtggcgagatcctgaacaactgctgcgtcatggagtaccaccaggccacaggcaccctcagtgcccacttcagaaacatgtcactgaaaagaatcaagcgtgctgacagacgcggtgccgagtctgtgacggaggagaagttcacggtgctgtttgagtctcagttcagcgttggcagcaacgagctggtgttccaggtgaagaccctgtccctccctgtggtcgtcattgttcatggcagccaggaccacaatgctactgccaccgtgctgtgggacaatgcctttgctgagccgggcagggtgccatttgccgtgcctgacaaggtgctgtggccgcagctgtgtgaggcgctcaacatgaagttcaaggctgaggtgcagagcaaccggggcttgaccaaggagaacctcgtgttcctggcacagaaactgttcaacaggaggagcaaccacctcgaggactacaacagcatgtccgtgtcctggtcccagttcaaccgggagaacttgcccggctggaactataccttctggcagtggttcgacggggtgatggaggtgctgaagaagcatcataagccccactggaatgatggggccatcttgggtttcgtgaacaagcagcaggcccatgacctgctcatcaacaagccagatgggacctttctgctgcgattcagcgactcggaaatcgggggcatcaccattgcttggaagtttgactccccggaccgaaacctgtggaatctgaagccattcaccactcgggatttctccattcggtccctggcggaccgcctgggggatctgaattacctcatctacgtgttcccagaccgacccaaggatgaggtctttgccaagtactacactcctgtacttgcaaaagcagtcgacggatacgtgaagccacagatcaagcaagtggtccctgagtttgtcaatgcttctgcagatgctggagccaacgccacctacatggaccaggctccttccccagtggtgtgccctcaggctcactacaacatgtacccaccgaaccccgaccctgtccttgaccaagatggtgaatttgacctggatgagaccatggatgttgccaggcatgtggaggaacttttacgccggcccatggacagtcttgacccccgcctttccccacctgctggcctcttcacttctgccagaagctccttgtcctgaacgctggactccatgcttctcttggaaaagcaccttcagtgtgaagaacccgtgtcagttgtatccctgttcataccagtggctttgcaccttcgcagttccgccttgcccacagtgcggggtctggctaaagtagtggtggccttttcactcagacctcaagggtcccctggacctctcctctaagagctgaacctgtcattgctgacaaacctatttctccagtgcccttcacctgccaggggccactgagtgaaatgattctagaaaaggaagggaggcaagtttatgcaactaaagttggagttttactcctgagctagaagcttcctccggactggtgtgcgtgcacctgtcctcgcacatgtggtagcctaactgatgaacccctctaaagggagattggggctaaccttagtaaccctttatacgttagtgaatatgggctgcggattttgtgaccgctcacaatgtgcataagctgttcccaccaacacaggcggctgccaaagctgactgtgtcagttctcaaaccagcgtggacatgggattcgggtctaaggcctcrtctgcatcccttcttccccatccgatgtcctcacccttccatatagattcatcyttgctttttgttttgcttttttgagacagggtctctccatatatcccaggctgtccatgaatgatcctcctgcctcagcttctggagtgctaggattataggtttgcatgaccacacctgcctcagcctttcttccwykmskgcttgcaaccttgcttgttatcagaaaggaggggaatactggktgcctgggattaggagacytagggcgaaaaccttgtagcccacgaaaaggaacagagctgccagttactgcaggcaacacagtggtatgtgaggggggaggctcaacctggtccactctsctgggaggtaggacccggaacaggccytgcctgtgcaacatgggtgtggtctaggaaggcctctcgcaggcagctcttcccttggaggctgtgatagagcggccaggactagctgactaggagtcctggcttccaacytgagggaagcagaggatgcacagagggatggtttttatattttgtacatagaactcacatttatggaaacagtgtttttgaataaaatttcygttgggtttgtttttgcaaawmwaaaaaaaaaaaaaaaaaa

SEQ ID NO: 2329 - DNA, 2000 bp, Rattus norvegicus
gcagcaccccggctcggggtcgcgacggcggcggggcgccccctcccccgtgccggggcgcggcgaagggatgtggggctttgcgggaggaaggcttttcggcatcttctcggccccggtgctggtggcggtggtttgctgcgcccagagcgtaaacgaccccgggaacatgtcctttgtgaaggagacggtcgacaagctgttgaaaggctacgacattcgcctgagaccggacttcgggggtcccccagtctgcgtggggatgaacatcgacatcgccagcatcgacatggtttctgaagtcaacatggattataccttaactatgtatttccaacaatattggagagataaaaggctcgcctactctgggatccctctcaacctcacgcttgacaatcgagtggctgaccagctctgggtgcctgacacatatttcttaaatgacaaaaagtcatttgtgcacggagtgacagtgaaaaaccgcatgatccgcctccaccctgatggaacagtgctgtacgggctcaggatcaccaccacagcagcttgcatgatggacctcagaagatacccactggatgagcaaaactgcaccctggaaattgaaagctatggatacaccacggatgacattgaattttactggcgtggcggggacaaggctgttactggcgtggaaaggatcgagctcccacagttctccattgtggagcaccgtctggtctccaggaatgttgtcttcgccacaggtgcctaccctcgactctcattgagttttcggttgaagagaaacattgggtacttcatacttcagacgtatatgccctcaatcatgatcacaatcctctcatgggtgtccttctggatcaattatgatgcatctgctgctcgagttgccctagggattaccaccgtgctcaccatgacaaccatcaacactcaccttcgagagactctacccaaaatcccctacgtcaaagccatcgacatgtacctgatgggttgcttcgtctttgtattcctggcacttctggagtatgcctttgtcaactatattttctttggacgaggtccccaacggcagaagaagcttgcggagaagacagccaaggccaagaatgatcgatccaagagtgaaatcaaccgggtggatgctcacgggaatatcctactagcaccgatggatgttcacaatgaaatgaatgaggttgcaggcagcgttggtgacaccaggaattcagcaatatcctttgacaactcaggaatccagtataggaaacagagcatgcccaaggaagggcatgggcggtacatgggagacagaagcatcccgcacaagaagacgcacctacggaggaggtcttcgcagctcaaaatcaaaatccctgatctaaccgatgtgaatgccatagacagatggtcccggatcgtgtttccattcaccttttctctcttcaacttagtttactggctgtactatgttaactgagtgactgtacttgattttttcaaagacttcatttaacactgagtgaaatattaccctgcctgtcaagtttttataccagtatacacacacacacacacaaacaaacgcacacacaaacacacacatacacaaacacacacacacacacacatacacagacacacacaattgtatatatatgtgaactttctcagcatatatataaaatacacgtgtatatgagaatgtatgtgtatatgtttatgtacactggtgagagtgcctgtgtatgtaaaacaaatacgcatacataccatacattttgcaactatggacaatttaacacaggatgcatattaaagaaagtcatagctttttttttcttttttaattgaaagggacaagtatctaaatattatgcctcaagaatgagggcgagaaacacagtcatcccaaagtgtgtcttttattatcataagtttttgcttaagaatcaaaacggaattcttagttaatctttgggcactcc

SEQ ID NO: 2330 - DNA, 1792 bp, Rattus norvegicus
gaattcccttttttgatgtacagtttttaggagctcattattatccttggagatggaacgcgagcagacaagattgtcaaacctttatttggagcctgggttagaaggcacgcccatagagatggaagggagaaaagagaaaaaaggaggaagctcacactttggtcctgaagagggaagtaagcatctcacagcggcttgtactgtgaatctcacaggtctctccaagttgctgtctaagaagatgataaccacacaaatgtggcacttctatgtgaccagagttggacttcttcttctgattagtattctacctggaaccactggccaaggggagtcaagacgacaagaacctggggactttgtgaagcaagatattggaggcctctctcccaagcatgccccagatattcccgacgatagtacagataacatcactatcttcactagaatcttggatcggcttctggatggctatgacaaccgactgcgacctgggcttggagatgcagtgactgaagtgaagacagatatctatgtgaccagttttggccctgtgtcagacactgatatggaatatactattgatgtgttttttagacagacatggcatgatgaaagactgaaatttgatggaccaatgaagatccttccactgaataatcttctggctagtaagatatggactccagataccttcttccacaacggtaaaaaatcagtggctcacaatatgaccacacccaacaagctgctcagactggtagacaatgggaccctcctctatacaatgaggttaacaatacatgctgaatgccctatgcatttagaagatttccccatggatgtgcatgcctgtccactgaagtttggaagctatgcctataccaaagctgaagtaatttattcttggactcttgggaagaacaaatctgtggaagtagctcaggatggctcacgcctgaatcagtatgacttgcttggtcatgttgttgggacagagataatccggtctagtacaggagaatatgtcgtcatgacaacccactttcatctgaagagaaaaattggctactttgtcatccagacctacttgccatgtatcatgactgtcattctgtcacaagtttctttctggcttaatagagaatctgtccctgctcgcacagtctttggtgtcaccactgttctcaccatgaccaccttgagtatcagtgccagaaactctttacctaaagtggcatacgcgacggccatggactggttcatggccgtctgttatgcctttgtattttctgcactgattgaatttgctactgtcaactacttcaccaagcgaagttgggcttgggaaggcaagaaggtaccagaggccctggagatgaagaaaaaaacaccagcagccccaaccaagaaaacaagcaccaccttcaacatagtgggaaccacctatcctatcaacctggccttggatactgagttctccaccatctccaaggctgctgctgctcccagtgcttcttcaactccaacagtgattgcttcccccaagaccacttatgtgcaagacagtcctgctgagaccaagacctacaacagtgtcagcaaggttgacaaaatttcccgcatcatcttccctgtgctctttgccatattcaatcttgtctattgggccacatatgtgaacagggaatccgctatcaagggcatgatccgcaaacagtagataatagtggcagcacagcaaccagatcacccatgaagcatccaaatcccaaaccccagagctccc

SEQ ID NO: 2331 - DNA, 6193 bp, Rattus norvegicus
gctccagacctttaaattggaacctcggtgttatttgtgtttgctgcagtctggaggtgacctgggggcgtccctaggcttttacattggaacctcaggcctgttagtggttttcgcgttaggaggggatctggggctccctaggctttaatatatttggttgtgagcctagcctttaacggctgagccatctctccagccctccctaggcttttaaataggaaccttggaactctttgggggcagctcccgacgtctgacaggggagtctcagagttgtttgggtgtttatgtcagactggtatctgagaacacttacaagcttttttttttttttttttggttctttttttcggagctggggaccgaacccagcacttacaagcttttaaatcgtaacctttctaaatcggcagttcggggtgtgtggattggaagagtctggggtgcacgccgggcctctgaagttgggggctccacaggaggagtcgaagaggcgactgggcgagcgggcaaaggggcgagaaggcgtggcattgccagctctggccacgcctcccagagctccgctggcttgtctctccctaccccaccccccccccccagcgggcctcagttgtgcgcgcagtcccttccctgccttaatccgtgccaccttttcccttggcccgcgcgggcccagctgacgggccgcgttgtttactggccggagtcgagccctagctcccgccgccgccaccagcccaggtgccctcccgtgcgcgcgtccctctgtctcagactccacacaacgcgacccacccagagctgcgggaggaggagaaacgggagacccggccagggaacagcaaccttggtgagctctggactctgcgattgcggacacaggacgggcctgggtgacccggggttgatagtctgcgggccggcacagtgttgcttgcagccgaggcctgtgtgctcttcccaggactgtccccagggccctctaggctggagatctgcggcccgtaagcaccggcgtggaagagaaggacgtgcggcccctagcgcctgcctctccagcgaccttctcgcggagtatgtccccagtgggccggcgtggcgtgctctgatcgccggggtcccagcgctcctactgctatgggctccgggagaggatgtgagacgacggcggtgccgttgctgatggccgtggccgttgctggtggcacagccggccacctgtaccctggagaggtgtgcccgggaatggacatccggaacaacctgaccaggttgcatgagctggagaactgctcggtcattgagggccatctgcagatcctcttgatgttcaagaccagacccgaagatttccgagacctcagtttccccaaactcatcatgatcacagactacctgcttcttttccgtgtctatggcctagaaagtctaaaagacctcttcccaaacctcacagtcatccgaggctcccgtctcttcttcaactatgccctggtcatcttcgagatggtccacctgaaggagctgggtctttacaacctcatgaacatcacccggggctctgtccgcatcgagaagaataatgaactctgctacctggccactatcgactggtcccgcatcctggattacgtggaggacaactacattgtactgaacaaagatgacaatgaggaatgtggggacgtctgtccaggcacagccaagggcaagaccaactgccctgccaccgtcatcaatgggcagtttgtggaacggtgctggacacacagtcattgtcagaaagtttgcccaaccatctgtaagtcacatggctgcacagctgaaggcctgtgctgtcacaaggagtgcctgggcaactgttcagaacccgatgaccctaccaagtgtgtggcctgtcgaaacttctacctggatggtcagtgtgtggagacctgcccaccaccctactatcacttccaggactggcgctgtgtaaacttcagcttctgccaagaccttcactacaaatgcaggaactctcggaagcctggctgtcaccaatacgtcattcacaacaacaagtgcatccccgagtgcccgtctggctataccatgaattccagcaacttgatgtgcaccccgtgtctgggaccctgtcctaaggtctgccaaatcctcgaaggcgagaagaccattgattccgtgacatctgcccaggagctccgaggctgcactgtgatcaatggcagcctgattatcaacatccgagggggcaacaacctggcagctgaactagaggctaaccttggcctcattgaagaaatctcagggttcctaaagatccgtcgctcctatgctctggtgtcactttctttcttcaggaagctacatctgattcgaggagagaccttggaaattgggaactattctttctacgccttggacaaccagaacctgaggcagctgtgggactggaacaagcacaacctcacgatcactcagggcaagctcttcttccactacaaccccaaactctgcctgtctgagatccacaagatggaggaagtgtccggaaccaagggccgccaggagaggaacgacattgccctgaagaccaacggggaccaggcatcctgtgaaaatgaattacttaaattctctttcatccggacgtcttttgacaagatcttgctgaggtgggagccctactggccccccgacttccgagatctcctgggattcatgctgttctacaaagaggccccttatcagaacgtgacagagtttgacgggcaggatgcgtgtggctccaacagctggactgtggtggatattgacccgccccagaggtccaacgaccctaagtctcagaccccaagccaccctgggtggctgatgcggggcctcaaaccctggacccagtatgccatctttgtcaagaccttggttaccttctctgatgaacgccggacctatggagccaaaagtgatatcatctatgtgcaaacagatgccaccaatccttccgttcccctggatcccatatcagtttccaactcctcatctcagattatcttaaagtggaagcccccctcggaccccaatggcaacatcacacactacctggtctactgggagaggcaggcggaggacagtgagctgttcgagttggattattgtctcaaagggctgaagctcccctcacgcacctggtccccaccttttgagtctgacgattctcaaaagcacaatcagagtgagtatgacgactcggccagcgagtgctgctcatgtcctaagactgactctcagatcctgaaggagctggaggagtcttcattcaggaagaccttcgaggattacctgcacaacgtggtttttgttcccagaaaaacctcttcaggcaatggtgctgaggacactaggccatcccgaaagcgaagatcccttgaagaggtgggcaatgtgacagccactacacccacacttccagattttcccaacatctcctccaccatcgcgcccacaagccacgaagagcacagaccatttgagaaagtagtaaacaaggagtcacttgtcatctctggcctgagacacttcactgggtaccgcattgagctgcaggcatgcaatcaggactccccagaagagaggtcaggcgtggctgcctacgtcagtgcccggaccatgcctgaagctaaggcagatgacatcgttggccctgtgacccatgaaatctttgagaacaatgttgtacacttaatgtggcaagagccaaaggaacctaatggtctgattgtgctatatgaagtgagctatcggcgatatggtgatgaggagctgcacctctgtgtctcccggaagcattttgccctggagcggggctgcaggcttcgagggctctctccaggaaactacagtgttcgagtccgggctacctctctggcaggaaatggctcctggacagaacccacctatttttatgtgactgattatttagatgtcccatcaaatattgccaaaattatcatcgggcccctcatcttcgtcttcctcttcagtgtcgtgatcggaagtatttatctattcttgaggaagaggcagccagatgggccaatgggaccactgtacgcttcttcaaacccagagtacctcagtgccagtgatgtctttccatcttccgtatacgttccggatgagtgggaggtacctcgagagaagatcaccctcctccgagagctggggcagggatccttcggtatggtgtacgaaggcaatgccaaggatatcatcaagggtgaggtagagacccgtgttgcggtgaagacggtcaatgagtcagccagtcttcgagaacggatcgagttcctcaatgaggcatcagtcatgaagggcttcacctgtcatcacgtggtccgccttcttggggtggtgtccaaaggccagcccacattggtagtgatggaactgatggctcatggagacctgaaaagtcacctccgttctctgcggcccgatgctgagaacaacccaggccgtcctccccctaccttgcaagaaatgattcagatgacagcagaaattgccgatggcatggcatacttgaacgccaagaagtttgtgcaccgggacctggcagctcggaactgcatggttgcccatgattttactgtcaaaatcggagactttggaatgacgagagacatctacgagacagattactatcggaaagggggcaaggggttgctgcccgtgaggtggatgtcacccgagtccctgaaggacggagtcttcactgcttcttccgacatgtggtcctttggggtggtcctttgggaaatcaccagcctggctgagcaaccttaccaaggcctgtctaatgaacaggtgttgraatttgtcatggatggaggctatctggatccccctgataactgtccaragagactcactgacctgatgcgcatgtgctggcagttcaaccccaagatgaggccgaccttcctggaaatcgtcaacctgctcaaggacgacctccaccccagctttccggaagtttccttcttctacagcgaggagaacaaggctcccrakagtgaasagctggagatggagttcgaggacatggagaatgtccccttggatcgttcctctcactgtcararagaagaggctggatgccgsgagggagggtcctytctgakcatcaaacggacctatgatgaacacatcccctacacccacatgaacgggggcaagaagaatgggcgggtcctcaccctgccgaggtcgaacccttcctaacagcgcctgctcgctcggggaaggattcttttcttttctttctttctttttaaaaactcttctgtagtttgactgcctccaggaaactcaggattatcgggactctacccagatgtgaaactgagctcacagatagttcgtacacatttctgtttgtctttggacctgaaaacacacaggtgtggtcgccaaccctgcgagcctgtggagggctaactgtgaacctagaggggttggggtttccatactcccttccctgcccccacggtatcaaaccaagattttattgtttgttgctggtgttttcctcatagattggaaggatgaacctgtttttacagwkkttttttttctgctagtgtctgagttatagttagttgtcaaagacagactttatttatggagcacaagtcagaaagcaaagaagaaacagacagaaaaacaaaacaaaaaccaaacctgacctacagaacccagttctggaattgcgtgctttcgcggggttgggctttgagaaggtttcattaatctgagagaaggagcttattttattttagttttgttttrtttttttcctcattcacaaaatcagttcctcaaattgaccaatagctgctgctttcatattttattattttgggaaagggtgtgtactcctaagtgtgtgctcatctgcacactgcgtgcatttgcgtgtgtgttgtgtccaggktagmgrtcacagggtggggtgggggctgtstgtatgttacatttttctctggattgatgcttggtgacttggctcatgaagcacccgctgcttggagtgggtgacctcatattgtcctcttccttcttatgaaccgagagcttgtgccctcgagagattctcctcagtcacgtcagaactcgctcg

SEQ ID NO: 2332 - DNA, 1497 bp, Rattus norvegicus
cgcccgtagagagaccgaagcgctcggttcccccggggggaccgcagcctgggcgtgtgggggcacaggcccgggggatgctgggctcagtgaagatggaggcccatgacctggccgagtggagctactacccggaggcgggcgaggtgtattctccagtgaatcctgtgcccaccatggcccctctcaactcctacatgtccttgaaccctcttagctctccctaccctcccggagggcttcaggcctcccctctgcctacaggacccctggcacccccagcccccaccgctcccctggggcccaccttcccaggcctgggcgcaggcagcggcaccggaggcagtgcttccgggtatggcgccccagggcccgggcttgtacacggaaaggaaatggccaaggggtaccggcggccactgactcatgccaaaccaccttattcctacatctctctcatcaccatggctatccagcaggcaccaggcaagatgctgaccctgagtgaaatctaccaatggatcatggacctcttcccgtactaccgggagaaccagcaacgttggcagaactccatccggcactcgctgtccttcaatgactgcttcgtcaaggtggcacgctccccagacaaaccgggcaaaggctcctactgggccttgcatcccagctctgggaacatgtttgagaacggctgctatctccgccgtcagaagcgcttcaagctggaggagaaggcaaagaaaggaaacagtgccacatccgccaccaggaatggaacagtggggtcagccacctctgccaccactacagctgccactgcagtcacttccccggctcagccccagcctacgccgccgtctgagcccgaggcccagagtggggaagatgtggggggtctggactgcgcctcgcctccttcatccgcaccctatttcactggcctggagctcccaggggaactgaagttggatgcgccctacaacttcaaccaccctttctctatcaacaacctgatgtcagaacagacatcaacaccttccaaactagatgtggggtttgggggctacggtgctgagagtggggaacctggggtctactaccagagcctctattcccgctctctgctcaatgcatcctagcggcgcaactgggagaaatgcggtgatgggggtttgctgtgacagatgaccggttcttcggccctgatctttctggttacactctgcttatccagttaattaacatcgtatttggtctattactgtgatatgacccattggctactgtggtaactgcatggactcttcggtgggcctagggttggggtattgtgaaggcagatgcatttgggagtgttacgaaggtggccatgtcggacataccgtgaaggcaattagactggtgtactataaaagctgcatgttaagtgagtgatccactgggtgcctgatggccgcgatgtcggaggacatattgtttggccctttggatgct

SEQ ID NO: 2333 - DNA, 2895 bp, Rattus norvegicus
cgttgctcggcccctcggggtccggagttatccgcgaggcgccgtcgcgggcgggcgatggcggtgcgggggtcgcggcggcgcgcgctgcgctgctcttgatggtgcagctgctggcagggcgctggcggccgaccggggcgcggcggggcacgcggggagggttgcctgaactatcctctgctgccaaacatgaagacagcttgtttagggatttatttgaagactacgaaaggtgggttcgccctgtggaacacctgagcgacaagataaaaatcaagtttggccttgcgatatctcagttagtggatgtggatgagaaaaaccagctgatgacgacgaacgtctggttgaagcaggaatggatagatgtgaaattgagatggaatcctgacgattatggtgggataaagattatacgtgttccttcggactccctgtggatcccagacatcgttttgttcgataatgcagatggacgttttgaaggggccagcacgaaaacagttgtcaggtacaacggcactgtcacgtggacgcaaccagcaaactacaaaagttcttgcaccatcgacgttacctttttcccgtttgatctccaaaattgttccatgaaattcggctcgtggacatacgatggatcccaggttgatataatcctagaggaccaagatgtcgacagaacagactttttcgacaatggagagtgggaaatcatgagcgcgatggggagcaaggggaaccggacggacagctgctgctggtacccctacatcacgtactcctttgtgattaagcggctgcctctcttctataccttgtttcttattatcccctgcattgggctctcatttctgactgtggttgtcttctatctcccttcaaacgagggtgaaaagattagcctctgcacctcagtgctcgtctctctgactgtcttccttttggtaatcgaagagatcataccatcatcttccaaagtcatacccctgattggggagtacttggtgttcaccatgattttcgtgaccctatccattatggtgactgtctttgccatcaacatccaccaccgctcttcctccacacacaacgctatggcgccctgggttcgtaagatatttctccacaagcttcccaagctgctctgcatgagaagtcatgcggataggtacttcactcagagagaagaagccgagagtggggctggacctaaatctcggaacactttggaagccgcactcgattgcattcgctacatcacgaggcacgtcgtgaaagagaacgacgtccgcgaggttgttgaagattggaaattcatagcccaagtccttgatcggatgtttttgtggacgtttcttctggtgtcaatcattgggactttagggctttttgttcctgttatttataaatgggccaatataatagtcccagttcacattggaaacacaattaagtgaaaccaagaaattaccctgtggatttagtgagcagtcatgcagctcttaggacatgtatgctgttatggaaatgtgaaggtagttacaatttgacatggctataacagattagcaatttctaacattggcttaatgttgtccattagaactgcagtaataacctcaaatagcaacaacacattgtctgcctgcactagtgaaggcctagcatctgcatcctggcaaaccctaccaatttgcaaccaatgatgaaggccatccttggagtgctggaaaactcaactgtatttgaagactatttaaaactccccccaaatttagtaggaacatatatatgtgtggttttgaattttcagaatgggtctttgggtcttgttaaattgtctgggctagcacaaaacctcctgagtagctgggaccatgggtgtgctccactttgccctgttctgtattcacagatataaaatacatcattattttataggaggtaggcccattacttggtttaataataacttaatgtcagttaggtttaattataaccttatgtcagctaatgttctattgctgtgaagagacatcatgaccatcaactcttataaaagaaaacatttcatcagtgctggcttacagtttttgaggtttagccaattatcacagtgaaagcatgatagcatccaggtagacataatgctggatccaggagttctctacatctggatcagcaggcagcaggaagagagagagagccactggacckggcttgagcatctgaaacctcaawgcccacctccagtgacacacttcccccaacaaggccmcacctcctaatagtgccacttgctggtgatcaagcattcagtctatgggtctacgagagccattcctattcaaaccacacttaataggatgctattctttactgacatttttaataagcgacaaatggtaactagaaacatcgtaggcccactttactctttatatggtaatatggattggcttttrtattaactagttttacagcctatctgaaaacatgtaacaggcaactcctgcagacacattctttgtaatgactttataatcctgcagtggcatgttcyggtaatgacttcagtctcctcgtccacactctccggttagtagagccatttatgtacatcgcrtatccctgatttcagagcaackgtgcagttgcacaggttcccacctcaaaatgggatgccatgactctgtctggataattctgtggaaaaaccattctgagctggatacggtgcctcatacctgtcatgtctactttcaggaggcagargcaggggaattgctgtgagttgttggtcagcctgggttacatatgagaccctgtctcagaaaaccaaacaaaaacttcccctgtgagttgatataagcacactgtcatatccgaatt

SEQ ID NO: 2334 - DNA, 1164 bp, Rattus norvegicus
atgaccggcaaactcgccgagaagctgccggtgaccatgagcagtttgctaaatcaattgcctgacaatctgtaccccgaggagatccccagcgcgctcaacctcttctccggcagcagtgactcggtagcccattacactcagatggctacagagaatgtgatggacatcggtctgaccaacgagaagcccaatccggaactctcttattcgggctctttccagccagccccaggcaacaagaccgtgacctacttgggaaagttcgctttcgactctccttccaactggtgccaggacaacatcattagcctcatgagtgccggcatcttgggggtgcccccggcctcaggggcgctcagtacgcagacgaccacggctagcatggtgcagcctcctcagggagacgtggaggccatgtatccggcgctgcccccctattccaactgcggcgacctctactcggagccggtgtctttccacgacccccaggggaacccagggctcgcctattccccccaggattaccaatcggccaagccggccttggacagcaatcttttccccatgattcctgactacaacctgtatcaccaccccaacgacatgggctccattccagaacacaagcccttccagggcatggaccccattcgggtcaacccaccccctattacccctctggagaccatcaaggccttcaaagacaagcagatccacccgggcttcggcagcttgccccaaccgccgcttactctcaagcccatccggccccgcaagtaccccaatcggcctagcaagaccccactccacgagcggccccacgcgtgtcccgcggaaggctgtgaccggcgtttcagccgctcggacgagctgacccggcacctgcgcatccacacgggccacaagcccttccagtgtcggatctgcatgcgcagcttcagccgcagcgaccacctcactactcacatccgcacgcacaccggggagaagccctttgcctgtgagttctgtgggcgcaagtttgcgcgcagcgacgagcgcaagcgccacgccaagatccacctcaagcaaaaggagaagaagtcggagaaagggggtgcgccctctgcatcctcggcgcccaccgtgtccctggcccctgtggtcaccacctgcgcctga

SEQ ID NO: 2335 - DNA, 1823 bp, Rattus norvegicus
agatcttggaacgagacgacctgctgcgctggacagcagtggggggtgtgtgagattcgcactgactgccgacactccggctcaatcgccggggattaaggacttggcgacccggctgccgggctccccggccgaggcttcagaggcgcaaattgatgggactgatttgctcagtagggccgtactagtcttttaagtatactgagaagggccggtgctaaagtagaagctgtcgtgggacgcgccggcgcggagtcccacagtggcccggaggaacggagtccgtgctagggggacccagtccggagcctggggaccgagctcgcattgttgggagacaacccgcctcttcttcccagaggcgtcaatcccaggacggtcgaggcgtcggggcaaccactgagcgctcttcagagagacccggtcggggagaggactcgcagtctcaaacagtctgggagagccgatcggaatccggcgggatcactcgggggcggcgagcccccgtcgcgcctcgtgcggcggagaggccaggggagaaagtcctccgaggcagcagtccatgcgcgggttggggacgcctgcccagtgaatcctcctggccagccgggcgcaggagagcgaccccgaggccggcgggaggagagtgcttcaaggccggcggctgcggaggatgggcgcctaagtggctccgagcgctgcgcggcaagggcaggcgaggcgagctttgctgaggaggtgctaggggatcctgaagtgcatcctgcccccgggaaaatggcccggcctgggcagcgttggctcagcaagtggcttgtggctatggtcgtgctgacgctgtgccggcttgccacgccgttggccaagaacctggagcccgtgtcctggagctctcttaaccctaagttcctaagtgggaagggcttggtgatctacccgaagattggagataagctggacatcatctgcccccgagcagaagcaggacggccctacgagtactacaagctgtacctggtgcggccggagcaggcagctgcttgcagcactgtgcttgatcccaatgtactggtcacttgcaacaagccacagcaggaaatccgctttaccatcaagttccaggagttcagccccaactacatgggcctggaattcaaaaagtaccatgattactacattacatcaacatccaatgggagcttggaagggctggagaaccgagagggaggtgtgtgccgtacacgcactatgaagattgttatgaaggttgggcaagatccaaatgccgtaacgcctgagcagttgactaccagccggccaagcaaagagtcagacaacactgtcaagacagccacacaggctcctggtcgggggtcccagggggactctgatggcaagcatgagactgtgaaccagcaagagaagagtggcccaggtgcaggtggtagtggcagcggggacaccgacagcttctttaactccaaggtagcattgttcgcagctgtaggtgctggctgcgtcatcttcctgctcattatcatctttttgacagtcctactactcaagctccgcaaacgacatcgcaagcatacacagcagcgggcggctgccctctcgctcagtaccctagccagccccaaaggggatagtggtacagcgggcactgagcccagcgacatcatcatccccttacggactacagagaacaactactgcccccactatgagaaggtgagtggggactacgggcatcctgtctacatcgtccaggagatgccacctcagagcccggcgaacatctactacaaggtctgagcggccgc

SEQ ID NO: 2336 - DNA, 5063 bp, Rattus norvegicus
attctattctggctgggaaggctggggctcctctcagccaggagactgaagtgcttcagtgagcgctggctcatcgccgcccagcctctcccagggagcctcctagctctagtaaagcaacccagagccaggagccagtgtgcagggtggaaaggtctagcctagctggtgtgtttctgatcttgcttcttttctctcagcccttcctacttgtgcgagccatgaagcaaagaggttggactctgcagtgtactgctttcaccctcttttgcgtttggtgtgcactgaacagtgtaaaagcgaagaggcagtttgtcaatgaatgggcggcggagatacatggagggccagaagctgcttctgccattgccgaagagctgggctatgacctcttgggtcagattggatcacttgaaaatcactatttattcaaacacaaaaatcatcctcgaagatcccgaagawgtgctcttcatatcactaagaggttatctgatgatgatcgtgtgatatgggcggaacaacaatatgaaaaagagagaagaaaacgttcagttccaagagactcagcattgaatctcttcaatgatccaatgtggaatcagcagtggtacttgcaagacaccagaatgactgcatctctgcccaagctggacttgcatgtaatacctgtttggcaaaagggtattactggcaaaggagttgttattactgtactggacgatggcttggagtggaatcacacagatatttatgccaattatgacccagaggctagctatgattttaatgataatgatcatgatccatttccccgatatgatcccacaaatgaaaacaaacatggaacaagatgtgcaggagaaattgccatgcaagcaaataatcacaaatgtggagttggagttgcatataattccaaagttggaggcataagaatgctggatggcattgtaactgatgccattgaggctagttcaattggattcaaccctggccatgtggatatttacagtgcaagctggggccctaatgatgatggaaaaactgtggaggggcctggcagactagcccagaaggcatttgaatacggtgtcaaacaggggagacaaggaaaaggctccatttttgtctgggcttcagggaatgggggtcgtcaaggagataactgtgactgtgatggctacacagacagcatttacaccatctctatcagcagtgcctcccagcagggcctgtcaccctggtatgcagagaagtgttcctccacactggccacctcctacagcagtggtgattacacagaccaacgaataactagtgcggacctgcacaatgactgcacagagacccacacaggcacctcagcttctgcacctctggctgctggcatctttgctctagccttggaagcaaacccaaatctcacctggcgagatatgcagcatctggttgtctggacctctgagtatgacccattggccaataacccaggttggaaaaagaatggagcgggcttgatggtgaacagccgatttggatttggcttgctaaatgccaaagctctggtggatttggctgatcctagaacttggagaaacgtgcctgagaagaaagaatgtatcataaaagacaacaactttgagcctagagccctgaaagctaatggagaagtgattgttgaaatccctacaagagcttgtgaaggacaagaaaatgctatcaattccctggaacatgtgcaatttgaagcaacaatcgmatattctcgtagaggagaccttcatgtcacacttacctctgctgctggaaccagcaccgtactgttggctgaaagggaaagggatacatcccccaatggctttaagaattgggacttcatgtctgttcatacatggggagagaatcctgtaggcacctggacattgaaagttacagacatgtctggaagaatgcaaaatgaaggaaggattgtgaactggaagttgattttgcatggcacatcttctcagccagaacacatgaagcagcctcgtgtatacacgtcctacaatactgtccagaatgacaggagaggagtggaaaagatggtgaatgttgtggaggagaagcccacacaaaacagcctgaatggcaatctcctggtacccaaaaactccagcagcagcagtgtggaagacagaagagatgagcaggtacaaggagctccttcaaaggccatgctacggctcytacaaagtgctttcagcaagaacacaccttcaaagcaatcatcaaagattccaagtgctaagctcagtgtcccttatgagggtctctatgaagccctggaaaagctcaacaagccctcccagcttgaagactctgaagacagtctgtatagcgactatgttgatgttttctataacacaaaaccttataagcatagagatgacaggctgctgcaagcactcatggacattctgaatgagaagaattaaaataagtgtatatggcctgagttagaaatccttatgtaccctccttttccttagatgttcctgggtctggagttgttgtatccctgcttcctgtgattataatgtccttcattgtaattttactttttcttctcaaactgtacttttggagtgagttccaaaatgaaagccaacttcataattggtywmarwrwwwaaraawawgtcttccctgtctatacaagtgaagcaacttctttctaaagtcgctgttgggacacaaccctttgctgcagtagaacagctcctaaagcctccccatttcatatctcacaagaataggaaaagagtgggagatttagaaaagtaatcaacaatggtagtttgagggctacagcttatcttgtttcctatttttgcaatggggttctttgaattttgataacaaggaagcatttataaagtatctagtgagaaagttcacaactaggttcagatcataagtaacatgtattactaatgctgagactgataaactgaccattttggaggagctggaataaaatgctttatttaaattcagaaacagagcttaagatttttattagctagaatagttgctctcaattggtgtaccatgtagaggtctctgtgggtcgaaagttggctgtgacccttgctgtatgagacctggctttctatttccccctttgtgccttgtatgtttcttttttgtgtggcaaactcaaaattcaaagaaagaactaattcatgtgattttctcaaaacaaagttatacttcattttggcaaattcctagtcataattttgtttaataacaaggagtcactcaaaaatatagaaagccaatataataacagggaaaatgttcacaaagcagagaagcagcaagactccctttgcaagctgtattcctaggacagcttcttttggttctctatatgaatggtcatttctggacaccacaggtcttctgtagtctcagagaacagtattcaaattcttaacaaaatgcttccatgtttcaaatcaaaaacaggtagacaacacttaggtcttatttttattctctgtaagttatgaagaatatttcagaagtgtgaaagactgatgaaagtgtgaagtgtagatctcatataaaaccgattctcggacccatcttccatcacagcaacagctagctagagatagcaacttccaagtaaaatttaaagtcaagccttccctggtccatatatttttttgttttacaatagccagttaattggttactactcagcatccaagccatttattcctttttaattatcatctattagttgcagggagtcagatttcattttgacattctcatacaccacgtatttcatgatttgtacaatgtccatcccgcatcagcatctcttctgtctctccttgcttgtcctcttgctcttctaagtattcccacttccactttcaggactttttatctaactcagattccacatataagagaaaatgtgatgtttgtctttctatgcatgtaactttgcctactcatatactaagtgaatctatatcggtgtaaatacattaggaaaagtatttcctgcaattatttccaagcagtctttgccgttaataattgaatttgatatgagctagttarrttgttgcatttataagtaaaacagtgagtacttcggacccacaaaatacctctaaagtcwcswkkaatatgaacacttgatcttatctcacctggatgttcaaatgtactattcattaactrgagatttccttctcttaatatgccaacmtacactctagttaactctctgcctgtgttgtccaactgagtttctgtttgcaaatgtcctacacagtctacatccactgctaaracagctaatttgtctttgctttgagtgagattagtascacaaattttcacctcctgtttcatcatttgcatttgwacataacaaagccctttccagagcyttgcccttgatccctctgattttgaaggttttgcaatgtgtttactataaggtttaaataaaatgtttactattatagcacattacaactgaaaaggacttaagagttaaaacattaaatttcagctmcttagaaaagacctaaagaataatatcagyaactgacaattaatatgtgattttaaaaaacgaaagagtgggaggtcaaccccaccctttctggtccttattctaacttatggagatttttcttcagcactttctaatatatatttcccctctaagaaccctaaccaattcatggstatarccaaatrttcacttgggtaarctttaatatttagrcaataccatgtttgaatgtttccaacctggagtatatattgtctacacataaaaagaatawttttgtcagcctttcttagtgcctatgtggaattttkgtgaaaatgttaaaaaaggrtaattatataatatttcccttggaatattaagctatattttctttacaagtatttgtaatgtaccaatgcttttaacaacagaattttaaaaagcataataaattatattaaagartcaaaaaaaaaaaaaaaaa

SEQ ID NO: 2337 - DNA, 3801 bp, Rattus norvegicus
ccggcatggtgcggcgtcgccgccgatggcgctgaggcggagcatggggcggccggggctccggccgctgctgctggcggggctggcctctctgctgctcccagggtccgcggcmgcaggcctgaagctcatgggagccccagtgaagatgacagtgtctcaggggcagccagtgaagcttaactgcagtgtggaagggatggakgaccctgacatacactggatgaaggatggcgctgtggtccaraatgcaagccaggtgtccatctcaataagcgaacagaactggattggcttactcagcctaaagtcagcggagcggtctgatgccggcctgtactggtgccaggtgaaggatggggaggaaaccaagatctctcagtcagtatggctcactgttgaaggtgtgccattcttcacggtggaaccaaaagatctggcggkgccacccaatgtccyttttcaactgtcttgtgaggctgtgggtccaccagaacccgtaaccattttctggtggagaggaccmmctmrkgyygrrkkacctgcttcctctccctctgttttaaatgtaacaggagtgacycagcgcacagagttttcttgtgaagctcataacataaaaggcctggccacttcccgaccagccattattcgccttcaagcaccgcctgcagctcctttcaacatcacmgtracaacgatctccagcagcaacgctagtgtggcctgggtgccgggtgctgatggcttagctctgctgcactcctgtactgtacaggtggcacatgccccaggagaatgggaggcccttgctgtcgtggttcccgtgccaccctttacttgcttgcttcggaacttggcccctgccaccaactacagccttagggttcgctgtgccaacgccttgggcccttctccctatggcgactgggtgccctttcagacaaagggcctagcgccagccagagcccctcagaatttccacgccattcgtactgactcaggccttatcctggaatgggaagaagtgattcctgaggaccctggggaaggccccctgggaccttataagctgtcctgggtccaagaaaatggaacccaggatgagctgatggtggaaggaactacggccaatctgactgactgggatccccagaaggacctggttttgcgtgtgtgtgcctccaatgcaattggtgatgggccctggagtcaaccactggtggtgtcttctcatgaccatgcagggaggcagggccctcctcacagccgtacatcctgggtgcctgtggtcctgggtgtgctcaccgccctgatcacagctgctgccttggccctcatcctgcttcggaagagacgcaaggagacgcggttcgggcaagcctttgacagtgtcatggcccgaggggagccagctgtacacttccgggcagcccggtctttcaatcgagaaaggcctgaacgcattgaagctacattggatagcctgggcatcagcgatgaattgaaggagaagctggaggacgtcctcatcccagagcagcagttcaccctcggccggatgttgggcaaaggagagtttggatcagtgcgggaagcccagctgaagcaggaagatggctcctttgtgaaagtggcagtgaagatgctgaaagctgacatcattgcctcaagcgacatagaagagttcctgagagaagcagcttgcatgaaggagtttgaccatccacacgtggccaagcttgttggagtgagcctccggagcagggctaaaggtcgtctccccattcccatggtcatcctgcccttcatgaagcacggagacttgcatgcctttctgctcgcctcccgaattggggagaacccttttaacctgcccctccagaccctcgtccggttcatggtggacattgcctgtggcatggagtacctgagctcccggaacttcatccaccgagacctagcagctcggaattgcatgctggcagaggacatgacagtgtgtgtggctgactttggactctcccggaaaatttatagcggggactattatcgtcagggctgtgcctccaaactgcctgtcaagtggctggccctggagagcttggctgacaacttgtatactgtacacagcgatgtgtgggccttcggggtgaccatgtgggagatcatgactcgtgggcagacgccatatgctggcatcgaaaatgctgagatttacaactacctcatcagcgggaaccgcctgaagcagcctccggagtgcatggaggaagtgtatgatctcatgtaccagtgctggagtgccgacccaaagcagcgcccaagcttcacatgcctgcgaatggaactggagaacattctgggccacctatctgttctgtccaccagccaggaccccttgtacatcaacattgagagagctgggcagcctgctgagaatggcagtcccgagctgccctgtggagagcagtctagcagcgaggcgggggatggcagtggcatgggggcaataggtggcatccccagtgactgtcggtacatcttcagccctggagggttggccgagtcaccagggcagctggagcagcagccagaaagccccctcaacgagaaccagaggcttttgttgttgcagcaagggctactgcctcacagtagctgttaacctgcaggcagaggacagctggggccccctggctctgccggccattgcgctggcttactaggccccgtctgatcacagcccaggcagcaaggtatggaggctcctgtggtagtcctcccaagctgtgctgggacctggactgaccaaattgcccaatcccagttcttcctgcagccgctctggccagcctggcatcagttcaggccttggcttagaggaggtgagccagatctggttgcctgaatgcaggcagctggcaggaggggagggtggctgtgtttccatgggtaccatgggtgtggatggcagtaaggsagrgkagcagcagccctgtgggcccctaccctcctggctgagctgctcctactttagtgcatgcttggagccgcctgcagcctggagctcagcactgcccaccacacctgagtttaaatgccaggtttgcccctctacgtcacaaagagatgtccttgtattgttcccttttaggtgacgattaggaagggattggcacacttaggtccttaagccccatgacaggaaatggtgggatattctcaggtccgaatcctcatcaccttcctgattccccaccctgccatggcctggaactgactgggtggctgagggatgcacgaggacaaagactaccgagatccgactcytaaaggcagggtctgagtctsccagatggagggggtgctaagaggttggcccakgagtcwgscawtksaggrsysctmwragsttcyasagtctgtctgagcatgctaccaagccsccaaacatcccagaactracaggcagttttgtctgagcccagcccttccacatggtgacccttaggtctaccatcctctctgaatggatatcacwtgtcccaagtcttaagagagmgatacacctgatggctgatgtgggtaagaaaagttcctggaaccagggctggggthtaggcaccgcactgcaaacctcctkgaatgcagaggcaggctcttgggctgttaggaacatttccaagctattaagttgctgtttcaaaacaataaaattgawmcamaaaaaaaraaaaaaaaaaaaaaaaaaaaaaaaaaaaaaaaaaaaaaaaaaaaaagaaaaaaaaaaaaaaaaaa

SEQ ID NO: 2338 - DNA, 2349 bp, Rattus norvegicus
gccgcttaggaagccttcagtttggatcccaaggcctccttgatcctgcacctggagctctgttagcaccgttctttctgagtcctgtttctgcgcgtgctacgcttacgcacctgcctccttgggcactcaagctcggaactggatttccactgaccttgtatctgattttctaaamggcckycrstramttaagactatactgtatcggaggagcctcctrcatgtcctgctgccctgagctctctcaagctaggtgacagcgtgttaatgctgccaccatgaatgaggtatctgtcatcaaagaaggctggctccacaaacgtggtgaatacatcaagacctgkaggccccggtacttccttctgaagagtgatggatcttttattgggtataaagagagacctgaggcccccgaccagaccctacccccccttaacaatttctctgtagcagaatgccagctgatgaagactgagaggccacgacccaacacctttgtcatacgctgcctgcagtggaccacagtcatcgagaggaccttccatgtcgactctccagatgagagggaagagtggatacgggctatccagatggtagccaacagtctgaagcagcggggccccgggraggatgccatggattacaagtgtggctcccccagtgactcttccacatctgagatgatggaggtagcggtcagcaaggcacgggccaaagtgaccatgaacgacttcgattatctcaaactcctcggcaagggcaccttcggcaaagtcattctagttcgagagaaggccactggccgctattatgccatgaagatcctgyggaaggaggtcatcattgcaaaggatgaagtcgcccacacagtcacagagagccgagtcctacagaataccaggcaccccttccttacagccctgaagtatgccttccagacccatgaccgcctgtgctttgtgatggagtatgccaacgggggcgasctgtttttccacctctctcgggagcgagtcttcacggaggatcgggcacgctyttatggwgcagagattgtgtcagytctggagtacttgcactcgasggatgtggtgtaccgcgacatcaagctggaaaaccttatgctggacaaagatggccacatcaagatcactgactttggcttgtscaaagagggcatcagtgatggggccaccatgaaaaccttstgtggtaccccggagtacttggcgcctgaggtgctagaggacaatgamtacgggcgtgcagtggactggtggggactgggcgtggtcatgtacgagatgatgtgcggccgcctgcccttctacaaccaggaccacgagcgcctcttcgagctcatcctcatggaggagatccggttcccacgcacgcttgggccagaggccaagtccctgctggctggactgctcaagaaggacccyaagcagaggctcggtgggggtcccagtgatgcmaaggaggtcatggagcatcggttcttcctcagcatcaactggcaggatgtggtacagaagaagctcctgccacccttcaaacctcaggtcacttcagaagtggacacaaggtactttgatgatgaattcaccgcccagtccatcacaatcacacccccagaccgatatgacagcctgggctcgctggaactggaccagcgcacacacttcccccagttctcctactcagccagcatccgagagtgagcagccctctgccaccwyassamwcwgmatggsmgcsrtccdctsmctkkktkkytttttaaaaaaaactttattttgcctttggtttgcgttcccttccctgtcscctcatcccatatccagtttcttcttcagttcttgctcagacttagtggkcctggcggscctctcctccggsctcccctctgctcccagaggagtgctgggaacctgcccaaggacaggccgttgggaggatggagagtgaggttattaakcaccagcctcsaagagagtgaagtgggaagccatggagtcacctggatttggaggcaaaccagcggaggacacatctagaagttgccccaaccccagcaccccagatgccttctatgctgtcgtctgggcagtctgtctgctgccacccgacccggggcagaaaagcaataatgtccagggacaggcagaagccttcggaagctaagggatctggtttggttccgtggaaaatggagccaagtcctaggatcctcatgggagatccaggagcakgacctgcctcctgcactgtgtcttcctcccaagctgctctcttgagtctccataaagcaggaggaaggttccgggtgccctcctgcccaca

SEQ ID NO: 2339 - DNA, 3274 bp, Rattus norvegicus
gaattccggagagaccacaagatagaggattattaatttatggggattttttggagatttatatacccaagcaacaactcctagatgctacagaccaagacaccaagaaataaccacgaaattctactttcaaccctagcttctctaccagattttaactaaacaagatcttcttgcaaaggtctcaggtatggatctttggcgggtgttcttaaccctggcactggcagtctccagcgacatgtttcctggaagtggggctacaccagctactcttggcaaagcttccccggttctgcaaagaattaatccaagcctgagggaaagttcctctggaaagcctcgattcaccaagtgtcgttcccctgaactggagaccttttcatgctactggacagaaggggatgatcataatttaaaggtcccgggatctattcagctatactatgctagaagaattgctcatgaatggaccccggaatggaaagaatgccctgattatgtctctgctggagcaaacagctgttacttcaactcatcgtatacctccatttggataccctactgcattaagcttactacaaatggtgatttgttggacgaaaagtgtttcactgttgatgaaatagtgcaacctgatccgcccattggcctcaactggactttactaaacatcagtttgcctgggatccgtggagatatccaagtgagttggcagccaccgcccagtgccgatgttctgaagggatggataattctggagtatgaaattcagtacaaagaartaaawraaamaaaatggaaaacgatgagcccgatatggtcaacatcagtcccactgtactcactgagactggataaagagcacgaagtgcgtgtgagatccagacaacggagcttcgaaaagtacagcgagttcagtgaagtactccgtgtaacgtttcctcagatggacacactggcagcatgtgaagaagatttccggtttccatggttcttaattattatctttggaatatttggagtagcagtgatgctatttgtagttatattttcaaagcagcaaaggattaagatgctgattttacccccagtaccagttccaaagattaaagggattgatccagatcttctcaaggaaggaaaattggaggaggtgaacaccatcttgggcattcatgataactacaaacccgacttctacaatgatgactcctgggttgagttcattgagctggatattgatgatgcggatgagaagactgaagagtcagacaccgacagacttctaagcgatgaccaggagaaatcagctggtatccttggagcaaaggatgacgattctggacgtaccagctgttatgaccctgacattttggataccgatttccacaccagtgacatgtgcgatggtacctcggagtttgctcagccgcagaagttaaaagcagaagctgatctcttgtgccttgaccagaagaatctgaagaactcgccttatgatgcttcccttggctctctgcacccctccattaccctgacaatggaagacaaaccacagccacttctgggcagtgaaactgagtcaacccaccaactcccctctacaccaatgagcagtcccgtgtcactggcaaacattgacttttatgcccaagtaagcgacattacaccagcaggtggtgtagtcctttctccaggccaaaagattaaggcagggttagcccagggcaacacccagctggaggtggccgcgccctgccaagaaaattacagcatgaacagtgcctacttctgtgagtcagatgccaaaaagtgcatcgctgcggcccctcacatggaggccacgacatgtgtaaaaccaagctttaaccaagaggacatttacatcaccacasrargccttaccactactgcccgaatgtccgagacagcagataccgctccagatgctgagcctgtcccagactacaccacggttcacaccgtgaagtccccaaggggccttatactcaacgcgactgctttgcctttgcctgacaaaaagaagtttctctcctcatgtggctatgtgagcacagaccaactgaacaaaaksatscagtascctttcctatctttaatggcaaaagaaatgactgggcacgaacgcctaaaccaaaactatgttttaaatctgtgttgggagagcgtgagagtgaatgtggattcaaaaataccttttctggaaacgtcgaaacattatcataacgtggaaaatcaagaatatgtaatcagmtrgatactcccattgtgaattttaaatattttaaagaatcgtctttaagactgtttagtggcagtgattgtctgtgctgtgggtcttaactttgtgatactaagtattaaatagctacgtttttcatgtatgtagatcatgcttttttgaaaaagcaaaacaatcaggtggcttttgcagttcaggaaattgaatgcagattttagcacagactgatttctttttcctttttaaatagctaggagctaaaactctaggggagaaggtaaaactagtttggatatgcaaaacayttattttgacataaaattgataaagatatttttaataatttamavwrwaarmawrarwattttataatacactacagatatattgttagtycayaacaatccatctacrgatgtaacaactacaatgtgtagaggggttgatgctttggtcaatgramytmaagaaaaatgaacaagttagatttttacaaagcccttttttataactcccaaaayttcttaaatctaaaaatgtctgcattattggaasrramymakyttrmrkyygyaaakgwwtatttttttwwttttgaaaactttaattttttatacaaattaacgtatcatacaccaaacagtaacagaagtgattataataatggaagaaacagtttcttcmccaaatttccattcaagccacaargctgtgtgtaagagaagtagaagtgatgtggtgtgactggctaggataaaggagatcttcargagcacatgggtttagagagcccagggatcargaaaaggaggctctcacatctgagcagtgctgtcctttcaaacacagcttggcttttatagtaacctaagaattaatgcatacargaggagtttcacatgtgtgaaatccaatagcagatgggttaaagttaaacaagttatagcacaggaaattaaagacctagatcyytcgtkycgcagccagacacatacttttaattcaggg

SEQ ID NO: 2340 - DNA, 846 bp, Rattus norvegicus
atgtcccacgggacctactatgaatgcgagcctcggggtggccagcagccacttgagttctcagggggtcgagctgggcccggggagctgggggacatgtgtgagcatgaggcctccattgacctctccgcctacatcgagtctggggaagaacagctactttctgacctctttgccatgaagccaacgcctgaagcccgaagccttaagggcccaggaacaccttcatttcctcactacctgccggctgaccctcggccatttgcctatccctcacacacatttggcccagataggaaggctttgggacctggcatctacagcaacccagggagctacgaccccagggctgtggcggtgaaagaggagcctcgagggccagagggcaaccgaggcaccggcagaggcagctacaatcccctgcagtaccaagtggcacactgtgggcagacagcagtgcacctccccccgaccctggcagcacctggccagcccctgcgcgtcctcaaggcccctgtggcggctgctgcccctccctgcagcccccttctcaaggcaccctcccctgctggcccctcgcacaagggcaagaaggcagtgaacaaagatagcctggagtaccggctgcgacgcgaacgcaacaacatcgcagtgcgcaagagccgggacaaggccaagaggcgcattatggagacacagcagaaggtgttagagtacatggcggaaaatgagcgtctgcgcagccgcgtggaccagctcacccaggagttagacactctccgcaacctcttccgccagatccccgaggctgccagcctcatcaagggtgtcgggggctgcagctga

SEQ ID NO: 2341 - DNA, 935 bp, Rattus norvegicus
atggagaagctactatggtgtcttctgatcacgataagcttctctcaggcttttggtcatgaagacatgtctaaacaggccttcgtatttcccggagtgtcagctactgcctatgtgtccctggaagcagagtcaaagaagccactggaagccttcactgtgtgtctctatgcccacgctgatgtgagccgaagcttcagcatcttctcttacgctaccaagacgagctttaacgagattcttctgttttggactaggggtcaagggtttagtattgcagtaggtgggcctgaaatactgttcagtgcttcagaaattcctgaggtaccaacacacatctgtgccacctgggagtctgctacagsaattgtagagctttggcttgacgggaaacccagggtgcggaaaagtctgcagaagggctacattgtggggacaaatgcaagcatcatcttggggcaggagcaggactcgtatggcggtggctttgacgcgaatcagtctttggtgggagacattggagatgtgaacatgtgsgactttgtgctatctccagaacagatcaatgcagtctatgytggtagggtattcagccccaatgttttgaactggcgggcactgaagtatgaaacacacggtgatgtgtttatcaagccgcagctgtggcccttgactgactgttgtgagtcctgaggcacmtcctgggattacattctctcccttgtccctccttatgaaccttttaaccccagcagatgttgtagatctgttttgtgaatatggcctttcacttmtmtgctctgtggtcctcagcactagagcatggaatttaaatgtaaggcttccagcatgtgcatcccactactctttatcaaagagaacctgacttammmamrrwrwrwrwawgtgtatttaattaaaaaatttttagacat

SEQ ID NO: 2342 - DNA, 1874 bp, Rattus norvegicus
gaattccggttctagttgttgttttctctgccatctgctctccgggcgccgtcaaccatgggtccgtggacccactccttgcgcgccgccctgctgctggtgcttttgggagtctgcaccgtgagctccgacactcctgccaactgcacttaccctgacctgctgggtacctgggttttccaggtgggccctagacatccccgaagtcacattaactgctcggtaatggaaccaacagaagaaaaggtagtgatacacctgaagaagttggatactgcctatgatgaagtgggcaattctgggtatttcaccctcatttacaaccaaggctttgagattgtgttgaatgactacaagtggtttgcgtttttcaagtatgaagtcaaaggcagcagagccatcagttactgccatgagaccatgacagggtgggtccatgatgtcctgggccggaactgggcttgctttgttggcaagaagatggcaaatcactctgagaaggtttatgtgaatgtggcacaccttggaggtctccaggaaaaatattctgaaaggctctacagtcacaaccacaactttgtgaaggccatcaattctgttcagaagtcttggactgcaaccacctatgaagaatatgagaaactgagcatacgagatttgataaggagaagtggccacagcggaaggatcctaaggcccaaacctgccccgataactgatgaaatacagcaacaaattttaagtttgccagaatcttgggactggagaaacgtccgtggcatcaattttgttagccctgttcgaaaccaagaatcttgtggaagctgctactcatttgcctctctgggtatgctagaagcaagaattcgtatattaaccaacaattctcagaccccaatcctgagtcctcaggaggttgtatcttgtagcccgtatgcccaaggttgtgatggtggattcccatacctcattgcaggaaagtatgcccaagattttggggtggtggaagaaaactgctttccctacacagccacagatgctccatgcaaaccaaaggaaaactgcctscgttactattcttctgagtactactatgtgggtggtttctatggtggctgcaatgaagccctgatgaagcttgagctggtcaaacacggacccatggcagttgcctttgaagtccacgatgacttcctgcackascacagtgggatctaccaccacactggactgagcgrccctttcaacccctttgagctgaccaatcatgctgttctgcttgtgggcyayggraaagatccagtcactgggttagactactggattgtcaagaacagctggggctytcaatkgggtgaragtggctacttccggatccgcagaggaactgatgaatgtgcaattgagagtatagccatggcagccataccgattcctaaattgtaggacctagctcccagtgtcscatacagctttttattattcacagggtgatttaktcacasgctggagacttttacaaagcaatatcagaagcttaccaytaggtacccttaaagaattttgcccttaagtttaaaacaatccttgatttttttcttttartatcctccctatcaatcaccgaahtacttttctttttaaagtacttggttaagtaatacttttctgaggattggttagatattgtcaaatatttttgctggtcacctaaaatgcagccagatgtttcattgttaaaaatctatataaaagtgcaagctgccttttttaaattacataaatcccatgaatacatggccaaaatagttattttttaaagactttaaaataaatgattaatcgatgctatagaaaaaaaaaaaaaaaaaaaa

SEQ ID NO: 2343 - DNA, 500 bp, Rattus norvegicus
cgcgtccgtcctcagttgcctctctgswgccagctctctcccagcactatggccttcaccggcaaatacgaatttgaaagtgagaagaattacgacgagttcatgaagcgcctgggtcttccagragatgtgattgaaaggggacgtaacttcaagatcatcacagaggtccagcaggatggagagaacttcacctggtcccagtcttactctgggggcaacatcatgagcaacaagttcaccattggcaaagaatgtgaaatgcagaccatggggggcaagaagttcaaggcaaccgtgaagatggagggtggcaaggtggtggcagacttccccaactatcaccagacttcggaggtcgtgggtgacaagttggtggagatctccaccatcggggatgtgacctacgagcgtgtaagcaagagggtggcttgagccaccaggctgggctctgagggactgcaacccatcaataaaagtgcaccatggatcaccactaa

SEQ ID NO: 2344 - DNA, 1673 bp, Rattus norvegicus
ggcttaaggaaacttgctgcggaggaaagacattggctggacacctctagatctaccttaagacttgagagctaggttgggaccatggggacagcgaaggtgaccccatctctggtgttcgctgttactgttgccacaatcggttctttccagtttggctacaacaccggagtcatcaatgcgcctgagacaatcattaaggactttcttaactacacgttggaagagcggttggaagacctaccaagsgaggggctgctgaccacgctctggtcgttatgtgtggccatcttctccgttgggggcatgattggctctttttctgtcggactctttgtcaaccgctttggcagacgcaactccatgcttctagtcaacctgattgccatccttgggggttgccttatgggcttcgccaagatagcggagtcggttgaaatgctgatcctgggccgcctgattattggcatcttctgtggtctgtgcacgggctttgtgccgatgtacattggagaggtgtctcccactgccctacggggtgcatttggcacgctaaaccagctgggcatcgttgttgggatccttgtggctcaggtctttggtttggactttattctgggctctgaggagctgtggcctggactactgggcttaaccatcattccagctatcctacagagcgcagcccttccgttttgccccgagagtccaaggttcttgctcattaacagaaaggaggaagaccaagcracggagatcctccagcggttgtggggcaccccggatgtgatccaggagatccaggagatgaaagacgagagtatcaggatgtcacaggagaagcaggtcactgtgctggagctcttcaagtctcctagctacttccagccccttctcatctccgttgtcctccagttgtctcagcagttctctgggatcaatgctgtgttctattactcgacgggaatcttccaggatgcgggtgtccaggagcccatctatgccacgattggagcgggtgtggtcaacactatcttcactgtagtctctctgttcctggtggagcgggcaggaaggagaaccctgcacatgataggcctgggaggcatggctgtttgctccgttttcatgacgatttctctgttactgaaggatgaatatgaagccatgagctttgtctgtattgtggctatcttggtctacgtggccttctttgagattggccctggccccattccctggtttattgtggctgaactcttcagccagggcccccgaccagctgccatggctgtggctggctgttctaactggacctccaactttttggtgggaatgttcttcccctcggctgcggcctacttgggagcctacgtttttatcatcttcgctgccttcctcgttttcttcctaatcttcacctycttcaaagtcccagagaccaaaggcaggactttcgaggatattacccgggccttcgaggggcaggcgcastctgggaaaggctctgctggtgtggagttgaacagcatgcagcctgtcaaggagacccctggcaatgcctgagccggacctcctccctcacctccctccactgtggaaagccaacctcccctgaagtggcgagacctcatcaggatgaaccaggactgcttctgagcgctcgtatcaca

SEQ ID NO: 2345 - DNA, 1305 bp, Rattus norvegicus
ggcacgagcaactttctgctcaaggacgcatgaagctgatggccctacagctgctgctgtggcacagtgcactatggtcaggacaagaggccattcccctgctcaccgtcagctctctgccaccatccctgcctttgccccgaagctttctgcttaagtccttggagcaagtgaggaagattcaggccaggaacactgaactgctggagcagctgtgtgccacctacaagctgtgtcatccggaggagctggtgctgtttggccactctctgggtatccccaaggcttccctgagcagctgctccagccaggccttgcagcagacaaagtgcctgagccaactgcacagcgggctcttcctctaccaaggtctcctgcaggccctagcaggcatttcctctgagctggcccccaccttggatatgcttcacctggatgtcgacaactttgccaccaccatctggcagcagatggaaagcctcggggtggcccctactgtgcagcccacccagagcaccatgccaatcttcacttctgccttccagcgtcgggcaggaggagtcctggtcacttcatacctgcagagcttcctggagacagctcaccacgctctgcaccacttgcctaggcctgcgcagaagcactttccagaaagtttatttatctctatttaatatttatgtgtatttaagcccactatttaaagacaaacaagagaaaatggagctctaagcttctagatccttctctccacttctgagttttgttctcctgcttggagcagagagagaaggctcttgtgtcctcctgtggagcagggaaggagataggtaaataccgagtattgattcctgccgctgctccaggcaccccattctgtggtggtacccaagaaatcacattgagccctgctgtgctgaggcacctgtctcaggggcccaggcagcatctggtctcccttctgggggacaagacatccctgtttaatatttaaacagcagtgttcccaaactgggttcttacatcccttgctctggtcaaccaggttgtaggttttcctgaccccgtaggaatgaagtccctaaagaaacagtggcgccaggtttggccctggaattgaccgattcttttttagcgcttgctggcctagaactgggagtgtgggagggaaaaggcacaaggaatcctgtggggagtgcgtggcatagaggaaggctgacctgtctaccctccctctcgaccccacttgtcactgtaaccaagcttgcggataataaagtgtgtgtgtgcccagtaaaaaaaaaa

SEQ ID NO: 2346 - DNA, 2598 bp, Rattus norvegicus
ccacgcgtccggctgtgaaaagcggtgaaagcagcaagtgcccttctaaagcaccccagagcggggcctccttctgtaaaagcgcctcaaccttaatgagcaaatgcgggctgccaaggttggttcttccttgaggcagaaaaaaagaaaactgtgaacgaagggaacaagtcatacaatggtggtggaataggctctycaaatagaatcatggacttcttggaggagccaatccccggtgtagggacctatgatgatttcaacacaattgattgggtgagagagaaatctcgagaccgagataggcaccgagagattaccaataaaagcaaagagtcaacatgggccttaattcacagtgtgagcgatgctttttctggttggttgttaatgctccttattggccttttatcaggttccttagctggcctcatagacatctctgctcactggatgacagacttaaaagaagggatatgcacagggggcttctggtttaaccatgagcactgctgctggaattccgagcatgtcacctttgaagacagagacaaatgtccggagtggaatagctggtcccagcttatcatcagcacagatcagggagcctttgcctacatagtcaattatttcatgtatgtcctctgggctctcctgtttgctttcctcgctgtctctcttgtcaaggcatttgcaccttacgcctgtggttctggaatccctgagatcaaaactatcctgagtggtttcattattaggggctatttgggtaagtggacccttgtcatcaaaactattactttggtgctggccgtgtcatctggcttgagcctgggtaaagagggccccctagtgcacgtggcttgctgctgtgggaacatcctgtgccactgcttcaacaaatacaggaagaatgaagccaagcgcagagaggtcttatcagctgcagcagctgctggtgtatctgtagcctttggggcccctattggtggagtattgttcagcctggaagaggtcagctactactttcccctcaaaacactgtggcgttccttcttcgctgctctcgtggcagcattcacgctccgctccatcaatccatttggaaacagccgcttagttctattttatgtggagttccacaccccatggyatctctttgagctcgtgccattcattgtgctaggcatattcggtggcctttggggcgctctgtttatccgcacaaacattgcctggtgtcggaagcgtaaaaccacacagttgggcaagtatcctgttgtcgaggtcctcattgtgacagccatcactgccatcttggctttccccaatgaatatacccggatgagcacaagtgagctcatttctgaactgttcaatgactgcggcctcctggactcctccaagctctgtgattatgagaaccacttcaacactagcaaaggcggtgagctgcctgacagacctgctggcgtgggagtctacagtgccatgtggcagctggctttgacactcatactgaaaatagtcattactatattcacctttggcatgaagattccttctggtctctttatccccagcatggctgtcggtgctatagcaggccgccttttaggagtcggaatggagcaactggcttattaccaccacgactggggcatcttcaatagctggtgtagccagggagcggattgcatcacgcctggcctttatgccatggtgggggctgccgcctgcttaggcggtgtgactcggatgactgtttctctcgttgtcataatgtttgagctcactggtggcctggaatatattgtacctctgatggctgcagccatgacgagcaagtgggtggcagacgctcttgggcgagagggcatttatgatgcccacatccgtctcaatggatacccctttctcgaagccaaagaagaatttgctcataagactctggcaatggatgtgatgaagccccggaggaatgatcccttgctgactgtccttactcaggacagtatgactgtggaagatgtagagaccataatcagtgagaccacgtacagcggctttccggtggtggtgtcccgagagtcacaaagacttgtaggctttgttcttcggagagatctcattatttcaattgaaaatgctcggaagaaacaggacggggttgtgagcacgtccatcatttatttcacggagcactcacccccaatgcctccatacacgccccctaccctgaagcttcggaacatcctggatctcagccctttcactgtgacagaccttacgccaatggagatcgtagtggatatcttccgcaagctgggactgcgccagtgcctggttacacacaatgggcgcctacttggaatcattaccaaaaaggatgtgttaaagcacatagcgcagatggcaaaccaagaccccgagtccattctcttcaactagaagcatggggttgttttggatgtaaaacaaggacattgcggaccatggatgtactttattaactgggtacccmaaacacatttcccatgtttgatggtgaagtcatgttagtgtgttgtctgtttcctacaagttaatccagttgca

SEQ ID NO: 2347 - DNA, 2270 bp, Rattus norvegicus
gccaaatcgactaggtaaacagagtcctgtgaagcccacttctggtggtgcagaagccccgggatcctctgaccccaagcctccagcttcctgtagctggcaacctgcacttcaaacctcatctagctgattttgtgtggaaggaggcttcccatccatcgcagccatgaacttcctccggaggcggctgtcagacagcagctttgtggccaacctgcccaatggctacatgccggacctgcagcgcccagagagctccagtagctccccagcatccccagccacagagagaaggcatccccagcccctggctgcctccttctcttctccaggatccagcctgtttagctccttctccagtgccatgaaacagaccccacaggccccgacagggctaatggaaccaccaactcctgtcacacctgtggttcaaagacccaggatcttgttggtcattgatgatgcccacacagactggtcgaaatattttcatgggaagaaagtgaatggcgacattgagatccgggtggaacaggctgagttctctgagctgaacctggctgcttatgtcaccggaggctgcatggtggacatgcaagttgtgagaaatggcaccaaaattgtgcggtccttcaaacctgacttcattctggttagacagcatgcctatagcatggccctggctgaggactaccgaagcctggtcatcggcctccagtatggagggcttcctgctgtcaactctctctactccgtatacaacttctgcagcaagccttgggtgttctctcagctcattaagatcttccattccttgggtcctgagaagtttccactagtggagcaaacatttttccccaaccacaagccaatgctcacagccccgaacttccctgtggtgatcaagctgggacacgctcatgctggcatgggaaagatcaaagtagaaaaccagcacgactaccaggacatcaccagcgtggtggccatggccaaaacctatgccaccacggaggcctttattgactccaagtatgacatccgcatacagaagatcggatccaactacaaggcatacatgagaacctccatctctggaaactggaaggccaacacaggctctgctatgctggagcaggtggccatgacggaaaggtacaggctgtgggtggacagctgctcagaaatgttcggcggcctagacatctgtgctgtcaaggccgttcacagcaagaatggcagagattatatcattgaggtcatggacagttcaatgccactgattggagaacatgtggaggaggacaagcagttaatggctgaccttgttgtttccaagatgagccaactcctggtgccaggggcctcggtgccctcccccctgagaccttggggtccacagactaaatctgcaaaatctccagggcaaggccagctaggacctctgctcggacagccccagccaaggccacctccacaagggggccctcgtcaggctcagtctcctcagcctcccagatctagaagtccatcccagcagaggctctccccacaaggtcagcagcctgtgagtccccagtcaggatccccacagcagcaaaggtcaccaggttctccacagctatcccgggcatctggcggcagttctccaaaccaggcctccaagccaactgccagtctcagttcacatacccggcctcctgtgcagggacgcagcacctcccagcagggtgaagaaccccaaaagacagcatcacctcacccccacctcaacaaatctcagtccctgactaacagcctcagcacgtcagatacctcccatcgaggaaccccaagtgaagatgaggccaaggctgagacaatccgcaacctgaggaagtcctttgccagcctcttctccgactagcctctatccaggctggaggacaggagggcaagaagactcagtgactggagccctgtctggttccctccttctcagccttggttcctgatggaaatatgcttcctaaatacatctgtcccaggaactggtgatctacattcccacctccttgaccatgacattctaatgctgtctgactgagcggtagccttgagagcccctaggttcctcaacacggaccttctagacagacaaggcatcactacatccaccatacgcttgctccctgccgccggtaccacgtgagatgtctgtgtggcttgtttttgcagtcttattagtattttgcttgcctttgggctgaggcccccttctaagctgtgac

SEQ ID NO: 2348 - DNA, 2758 bp, Rattus norvegicus
catgagtgtacttctctcttggctaagaaagacagcaaagcaaagacttttaaagcgaagaagctggaaacaatcagaagaacaccatggaagaaacagagaaaaagattgcaacacaagagggtagattgttttccaagatgaaggtgtttctgctgtcattaacatgtgcatgtttaaccaaatcactatcaggagtatatatgaattccatgctcacacaaatagagagacaatttgatatctccacatctgtagctggattaatcaatgggagctttgagattggaaacctttttttcattgtatttgtgagttattttggaacaaaactgcacagacctgtggtgattggtattggatgtgtgattatgggcctggggtgtctcttaatgtcattacctcatttcttcatgggcagatacgaatatgaaacaacgatctcacctacaggcaacttgtcctcaaacagcttcttgtgtatggagaaccgaacacagaccttaaagccaacgcaagacccagcagaatgtgtgaaagaaatgaaatcattaatgtggatatgtgtaatggtaggaaatattatacgtggaattggtgaaactcctattgtgcccttgggtatctcttacatcgaagactttgccaaatcagaaaactctcctttatacattgggattttagaaatggggaaggttgctggcccaatttttggacttttgttgggatcttactgtgcacaaatttatgtagacattgggtctgtgaatacagatgacctgaccataacacccagtgatacacgctgggttggtgcttggtggattggctttttggtctgtgcaggagtgaatatcctgaccagcatcccctttttctttttgccgaaagcacttccaaagaaaggacaacaggagaatgttgctgtgactaaagatggcaaagttgagaaatatggaggacaagccagagaggaaaatcttggaatcactaaagatttcttgacgttcatgaagaggctcttctgcaatccgatttacatgcttttcatccttacaagtgtgctccaggtgaatggctttattaataaatttacgttcttgcccaaatacctggaacagcagtatggaaaatctactgcagaggcaatattcctcataggtgtttatagcttacctcccatatgcctcgggtatctaattggtggctttattatgaagaagtttaagattactgtcaagaaagctgcatacctagcattttgcctatcggtgtttgaatatcttctttttctttgtcactttatgttgacctgtgacaatgcagcagttgctggattaaccacctcttacaaaggagttcagcaccaactacatgtggagagcaaggtccttgctgactgcaacacaaggtgtagctgctcaacgaacacatgggatccagtgtgtggagacaatggtgtagcatacatgtcagcttgccttgcgggctgtaagaagtttgttggaactggaaccaacatggtgtttcaggattgcagctgcattcagtcattaggaaactcgtctgcagtcctgggtctgtgtaaaaaaggtcctgagtgtgccaacaggctgcagtactttttaatcttaacaataattatcagtttcatctactcacttacagccatacctgggtacatggtttttttgaggtgtgtcaagtctgaagagaagtcacttggagttggattacatacattttgcataagagtatttgctggtattcccgcacctgtttactttggcgctttgatagacagaacctgtttacattggggaaccctgaaatgtggtcagcgaggggcatgcaggatgtatgacataaacagtttcaggcacatttacctggggttgcctatagcactaagaggatcaagctatctgcctgccttcttcattctgatacttatgaggaaattccagttccccggggacattgactcttcagcaactgatcatacagagatgatgctcggagagaaggaaagcgagcacacagatgtgcatggaagtcctcaggtcgagaatgacggagaactgaaaacgaagctgtaatgagttttctactgccctgttcaaggccatgaacagaatgcacacttcccttcctcggaatcctgagagatacaataggaaccttctctttaaggacctcaacaattgtttttctcactataaaaataattgctgatatcatttttatagtgagaaaaacaataaaaataattgctgatatcattttcagaatttcaggtgatatttaagatttccctggggaagacttttatggtgacccccacactacactttaaagcttccttcattttcacataacattttctcttaactcaatcaagggaaatatgtgtttcccacacatctttaaatgagtataaaactttcctattcctgaaacagtatttaatttcattgaatttatggttcacagttggaagtatttagagctgaaaagatacattctcattaagccacattgaaaagttaacttttctatgttcaggatgtctccatatgtctatatgtaggagttctcaaatattattattattgtagacatgatgctcctagattagacttctcactcctgtgtcatttcctgtttctagtcccttctttcattactcctgtcacacagttgaatgttttgtttagagcactgacaaacttaatcaggttattaaaaatcacattag

SEQ ID NO: 2349 - DNA, 1464 bp, Rattus norvegicus
cggccagtggaaggaacaagtcttttccgacctgatggagctgtatgaaacatccccctatttctaccaggagccccacttctatgacggggaaaactaccttcctgtccaccttcagggcttcgagcccccgggctatgagcggaccgagctcagcttaagcccggaagcccgagggcccctagaagaraagggactggggacccctgagcattgtccaggccagtgcctgccctgggcgtgtaaggtgtgtaagaggaagtctgtgtctgtggaccggcggagggcagccacactgagggagaagcgcaggctcaagaaagtgaatgaggccttcgaggctctgaagagaagcaccctgctcaaccccaaccagcggctgcctaaggtggagatcctgcgcagtgccatccagtacattgagcgcctacaggccttgctcagctccctcaaccaggaggagcgcgatctccgctaccgaggcgggggcggccccagccggtggtacccagtgaatgcaactcccacagcgcctcctgcagtccggagtggggcaatgcactggagtttggtcccaacccaggagatcatttgctcgcagctgaccctacaggtgcccacaacctgcactcccttacgtccatcgtggacagcatcacggtggaggatatgtctgtcaccttcccagatgaaaccatgcccaactgagattgtctgccaggcyrsgwgkgcatgggagcccctgagttggtgtcagacgccaccacttctgcagcaggggccttttaagtggggctgtcctggtgcccagaaaacagccctgggctgccacaagccagactacccaccgtccattcacataagactaacacccagcccagcaagggaatttaactgactccttaaagcagagagtatccccttccaaggagagaaagatggagtccagagagcccccttgttaatgcccctcaacggggcaaackcasgagsttyyttwyywttttcttcataatgcgcststaattccaccccccaaatgrgacagtttgagagacagtgagtgccccgaccgggacaagtgtgcacatctkttcgactctcttcctgatgccagtggctgggctgggcytgccctgagatgagagagaagggagggaacgwtagggttccaaagtctytgggggrmaagcatttgcagtggatattgggaaccttccagtgctttgtgtattgtttattgttgtgtgtgttgtttgtaaagctgtcatctgaccaaggtctcctgtgctgatgccagggacaggcagggaaggggktgggggctcttggggtgacttcttttgttaactaagcattgtgtggttttsccaattttttttgtaatttttttgctaacttatttggatttccttttttaaaaaatgaataaagaccggttgctatcaaaaaaaaaaaaaaaaa

SEQ ID NO: 2350 - DNA, 3079 bp, Rattus norvegicus
  misc_feature (724)..(724): n is a, c, g, or t
acatgcagacatgcacggaaacgcatagggagatagatgcggtgcagagcccaggacccacatcatgggtgagcatacgcattcaacacgcacccacacacatgtgcacacacatgtgcatagagcttcatgtaccacatgcacaggaacccttttcatcctgtcttactcgtatctccaacctcaggacccacttgcacacacccctacacctatgcttatgactgcccggctacttcccctctgtcacttgtgcttgccttacactttaatccctgccctgagggaccttttgaaaccagagaaaatgtgagtgatgagggaggtttgggtgggctgggtaggctccccaagaaaaagagtcctcctcaggtctgaggaagggctgcagctccctctcctgggacctggcagcacctcggggatagaaagacaaatgacaagggtgcctgaatggtcccacgtgcagctggccatgtgagaggtgtcggcattcgagttggcgtgtcatggcatgtgtgagacatgtggggtcgtgggctggtgtgtcttgatgcttggtgtatgggagttgtgcgtggtgctgtgtgtcagtgcgtgtgagttgtgtggggcagtgggattattgcgtgtggaggcacgtgacccatgtggggtagaggctagtatgtgagtggcagagagcctagggagaactcggtgatctgtgtggcatcatgtgtgntgggggacatgcacttgcatatcaagcctgatctttgtggaatctggatacatgtaaatcatttttacccatttaacatgcatgtcgcacctgcctcctcagacatgattccaacatgttcacaggtattaactaatttaattcccgagataaccctatgaagtaagtgctattattaaaccccctttgtggttgagacagagagtttaaggaaactgtccaaggcacacrgctgttaggagggaaagctggtatttgagcccaggagttctggcttcggggtccaggttaataaccccctgttaagcatatcttcaggaagaaaatcagtgtcgaacagcaagtcgctgtggagtcaacagacctctgggaagccaggaatggggcagcaggtgcaaaggggggttcagaagcgtttctgcacccttctaggacactctgggagtcagctctattgatagtgtccttgtgatctgtagcagaccaccttacttttctgagcctcccttctcatgtagaaaatggagccaacccaatgtccccttaggagggtgaaaatgtgtacttgtgaatgggcttaccacggacagccagaagggtgtcagtgagcgtgagctggacccttccttcttctttgtgtctgttccccagacatgcacgtcacagagcagagtgtgtggtctggggccacctctctctttttgggtcaaatgagagtttggggtatcttgtgtctgagggcccttctggagtagtgtcaagggactaaaaggatgtaaccattgctctctcctttcacttcctttggtyksggsgwwscyrggtgggacttggctcttctgccatgggcaagcagaatagcaagctgcggccagagatgctgcaggacctgcgagagaacaccgagttctctgagctggagcttcaggagtkgtacaagggcttcctgaaggactgcccgactggcatcctcaacgtggatgagttcaagaagatctacgccaacttcttyccctacggcgatgcctccaagttcgccgagcatgtcttccgcacttttgacaccaacagcgacggsaccatcgacttccgggagttcatcatcgctctgagcgtgacctcgcgtggccgcctggagcagaagctcatgtgggccttcagcatgtacgacctggacggcaatggctacatcagccgggaggagatgctagaaattgtgcaggccatttacaagatggtttcgtccgtgatgaagatgcctgaggatgagtctaccccggaaaagaggactgagaaaatcttccgccaaatggacacaaacaatgacggcaagctgtcactggaggagttcatccgcggggccaaaagcgacccatcgatcgtgcgcctgctgcaatgcgatcccagcagcgcttcccagttctgagctgagaggagccagctcgcctccctgccttcaccggccctccggctctcagcttcctctccctcgtgtctatccaggctggggaatccccttctgggtctgcactgtgggggggcctctggagaagcgaaccctgcaaggaaggggctaagcaaggcagccgttagtccccacggcctaagaggcagaatctcccttagtggaccgagattacccccgggtcaggttctgtatctttccccagacagctgatcaccttccacgccacccacaacccgaggctcttccacaacacgggragagrggctaggtccttcttgggtggtcctcagcctggagggaggtggggatttgtgccaaggtgaagagtctttttgtttgttttggtggggaagaccggaggattactgggctgtgggactttgaagaagttccctgatctacttccctgcagaagaacacttcctgtcccagctcttgctgctggaggcatggtaaaaagaagatctcccaggattccaactgggggtccccaaacccagcctgcctctttgcacttggataacacagatttacccgtctgtcctctgtatttctctctccttcccmacytyacacaygcaygggssyrhgygacatgygcgcgcaacacacacacacacacacacgcacgatatgcacgcacacatgcacagcacccgcgcacacagaggccgscagacagatgagcagagcccctccacagcgttctgtgtgggaaagaagtgcagcccctgccaagccccatgtccctytgcatgcgccrcacggagcgtctttgttctttttaataacttcaaaataaagtcttgtttcmgtgaaaaaaaaaaaaaaaaarrrmrrmmrmaaaaaaaaaaaaaaggccaaattaccaaaaaaaaaaaaaaaaa

SEQ ID NO: 2351 - DNA, 1154 bp, Rattus norvegicus
tgccctgtcattttgagccgaaccctaggctggcagctccagcctcctggagcccggcggggctgggcttccccgcgccggtgctcgcccgttgcttcgggttccgctgttccggccgccgggagccgctgtcgtgttgccgcagagaccccgacgccgccgggccgcggaaccaatgagaactccgtcgctttcgctggcgctctcagtgctgtcgctgctggtcttaggctcaggccattatgcagctgggttggaactcaatggcaccagctctgggaaaggagaaccgtcctctggggaccacagtgctggtggacttgtggtttctgaggtctctaccataagcgaaatgccttctggcagtgaactctccacaggggactatgactactcggaggagtatgataacgaaccacaaatatccggctatattgtggacgactcagtcagagttgaacaggtgattaagcctaaggaaaacaagacagaaggagaaaagtcttcagaaaaacccaaaagaaagaaaaagggaggcaaaggcggaaaaggcagaagaaacaggaagaagaaaaagaatccgtgtgccgccaagtttcagaacttctgcattcatggtgaatgcagatacatcgagaacctggaggtggtgacctgccattgtcatcaggattactttggcgaacggtgtggagaaaaaaccatgaagactcagaagaaggatgacagcgacctatccaagatcgcgttagcagccataattgtctttgtctccgccgtaagcgtcgcagctattggcatcattaccgccgtcctgcttcggaaacgattcttcagggaatatgaagaagcagaagaaagaaggaggctgcggcaagaaaacgggactgcacatgccatagcctagctgatggcaattcaggataacagtcgagtcactgccaagccacacccacaccggaagtgacgaatcggtccttctttcagcgaaggctccagaagttcagttgtcactttttgtgatagtcttatttctgtacataaagaaatgtgtgaagataaaatattttttcacgttgtaaataatttatttaatatttaagcgttatttattttatagcctcattaaatgcttttttaaacaaagaaaaaaa

SEQ ID NO: 2352 - DNA, 1177 bp, Rattus norvegicus
ggccaacacctcttctgtctgggttcctcaagctgctcgctccccatctaggcgaagatgtccgcccaagagagttgcctcagcctcatcaagtacttcctcttcgttttcaacctcttcttctttgtactaggaggcctgattttctgctttggcacctggatcctcattgacaagaccagcttcgtgtcctttgtgggcttgtccttcgtgccactgcagacctggtccaaggtcctgtcggtctcgggtgtcctcaccatggccctggctctcctgggctgtgtgggggctctaaaggagctgcgctgtcttctgggcctgtatttcggaatgctgctgctcctgtttgccacacagattaccttggggatcctcatttccactcagcgagtccggctggagcgaagggtgcaggaattggtgttacggaccatccagagctaccgcacgaatccggatgagacagctgctgaggagagctgggactatgcgcagtttcagctgcgctgctgcggttggcaatctccgcgggactggaacaaggcccagatgctgaaagcaaacgggtccgaagagctctttgtgccctgctcctgctacaattccaccgcgaccaatgactcctccggctttgataagctctttctctcccagctaagccggctggggccgcgggcgmasswgrggcagactgctgacatatgtgcactccccgcaaaagcccatatataccgtgagggctgcgcgcggagcctccagaagtggctgcacaacaatatcatctccatagtgggaatttgtctgggagtcggtcttcttgagctcggcttcatgacactctcgatattcctgtgtagaaatctggatcacgtctatgaccggctggcccggtaccgctaggccccaacccaccggttggcacccacgcacctccatgcagtcaggaactgtttccttcctggttggttacaggcttggwgccytgtgcckcaggchtcattstytggggaccsagatgtmtgccstargacagccttcacttcccccacagggccagggacttysgmgcccagcttccttccctgctccctcctccccacaccatctgtctgccacctcccacatgacacctcaaataaatccccttcttttttggtaaaaaaaaaaaaaaaaa

SEQ ID NO: 2353 - DNA, 1592 bp, Rattus norvegicus
ctcagctgcaggaaccctggatgagcatgagctccaagccaaagcccatagagattatcggagcgmctttytstrwkgkwcagcctcgaggaggggtagagaaaggtcccgcagcattaaggaaagctggcctggtsgwkmrgcttwwarwwrcagagtacamtktrarakwsmamrgggatctggcctttgtggatgtccccaatgacagcccctttcaaattgtgaagaacccacggtctgtgggaaaagccaatgaacagctggctgctgtggtagcagagacccagaagaatggaacaatcagtgtggyrctksktkkmswccacagtmtgksaayyggamkmatcyctggccacgccagggtccaccctgacctatgcgtcatttgggtggatgctcacactgacatcaacactccgctgacaaccagctctgggaatctgcacgggcaaccggtggcctttctcctgaaggaacygarwkkmwagktmmmagrygtmccagraykctcctgggtgaccccctgcatatctgccaagsacrwsgtgtacatcggcttgcgagatgtsracsytskkkwayastatwtartmmawrctctgggcattaagtatttctcaatgactgaagtggacaagctgggaattggcaaagtgatggaagagaccttcagctacctkctksraaggawgawrmkkyccattcacctgagttttgatgttgatggactggacccagtattcaccccggctacgggcacacccgttgtgggaggcctatcttacagagaaggtctctacatcwcasmaswwmtttrywagwcagggstactttcaggactagatatcatggaagtgaacccaactcttgggaagacaccagaggaggtgactcgtaytskgaacasggcagtgscgttgaccttgtcttgttttggaacgaaacgggaaggtaatcataagccagagactgactaccttaaaccaccgaaataaatgtgaatacatcgcataaaagtcatctggggcatcacagcaaaccgaacagaaccaggccaacgctgctcctcccaagggcttgttcttttagaaaaaagaatgtttttycccaatatgtatgtattctagcagttcctttctggaatgaaattyagggtgtgggaattaaaacagctatgaaattaggagacacgtacttcccattttagcagaagttatccttaagaagtagtataaattaatatctaattaaaaaatgcaccaggagttaaaatacacagtgatgtcaagtgtcaactcacggttggaagcaaaggcatctggagacgaggcctgcatccacgtcgttcaaaacatgtgatttttgtaataaactctttwtawtaaaawwmmrwwrwmwrmatctttccaaacacatgtaatgtacttacccatgaacataccataccacacatgtacctatcataccattacatattaacatatatattcccacagggcacagagataaccatccctaaaacaatggaaaacattgaccattaaaagctggttcctctctagcctgtaaagtggatcatctcaggctta

SEQ ID NO: 2354 - DNA, 677 bp, Rattus norvegicus
catggcttccaaactcctgcgcgcagtcatcctggggccgcctggctctggcaagggcacggtatgcgaaaggatcgcccagaactttggcctccagcatctctccagcggccacttgttgcgggagaacctaaagaccaacacggaagttggtgacgtggcaaaacagtacctagaaaaaggtcttttggttccggaccatgtgatcacgcgcctaatgatgtcagaactggagacccggagtgcccagcactggctattagatggattcccaaggacattagtgcaggcagaagctctggacagaatctgtgatgtggacctagtaatcagtttgaatattcctttcgagacacttaaagatcgtctgagccgacggtggattcacccttccagcgggagggtctataacctagacttcaacccacctcaagtgctgggggttgatgacatcaccggcgagcctcttgtccaacaggaagatgataaacctgaagcacttgctgcccggctaagacggtacaaggacgcagcaaaaccagtcatcgaactgtacaagagccgtggagtgctccaccagttttctgggacggagactaacagaatctggccttatgtttacacgctcttctccaacaagatcacacccattcaatccaaagaagcctactgagcct

SEQ ID NO: 2355 - DNA, 2547 bp, Rattus norvegicus
gttgctaggggggctttttcagcacccagattcttctacggcccggattccttcctactgagcacctgctactggtgacaaaggaccgtttatagctggacgagcggacatcgtagtatacagcaacattcgcacccctctgcccagtacagaccgacctacctgtccrkyagwkggctgaatgaagaagtgtgtaatcaggagccgttgagtaggcgggttttaaatgctgcattttaagatytggacaacttaagatacatttgtactctcaatgatttaaaaaactgatctcatctgactcgtgatcctaaaactattgaccggaaggagttcggcaggtctcccggaccccctttgtgaaytacattttgggtagaacattttaatcaccgaaacccttytgaggaaaaaaagactcccaytgccccctgcaaaaaaamaaaarmaaaaamaaaaaaaccaaaccccaaacccccaaatctcagtcttagctggtgccaccaaagaagcttttgagccatgtggacttttcttggaattgctactttcacctatttttataagaaatgcggggatgtcaccctggccaacaaggagctcctgctgtgcgtactggtgttcctgtcgctgggcctggtgctctcctaccgctgtcgccatcgaaacgggggcctccttggccgccatcagagcggctcccagttcgctgccttctcagatattctctctgctttgcctcttattggcttcttctgggccaaatcaccccctgaatcagaaaagaaagaacagctggagtccaagaggcgcagaaaagaagtcaatctgtcagagacgacgttaacgggagcagctacctcagtatcgacatcatctgtgacggacccagaagtgatcatcatagggtctggtgtacttggctctgctttggcaacagtactctctagagatggaagaacggtgacagtaatcgagagagatttaaaagagcctgacagaatacttggagagtgtctgcagcccggtggctatcgagttcttcgagagctgggccttggagatacagtagaaagtcttaatgcccatcatatacacggctacgtaattcatgactgtgaaagcaggtctgaagttcaaattccatacccggtgtcagaaaacaaccaagtacagagtggggttgctttccaccatggcaagttcatcatgagtctccggaaagcagctatggcagagcccaatgtaaagtttatagaaggtgttgtgcttcggttactagaggaagatgatgctgtgattggtgtgcaatacaaggacaaggagactggggacaccaaggagctccatgccccgctcactgttgttgccgacgggctcttctccaagttcaggaagaacctcatctccaataaagtctctgtttcctcccacttcgttggcttcattatgaaggatgcaccacagtttaaagccaatttcgcggagcttgwtctggtcgatcccagtccagttctcatctaccagatttcacccagcgaaactagggtgcttgtcgatattcgaggagaattgccaagaaacttaagagaatacatgacagaacaaatttacccacagatacctgatcacttgaaggaatcatttctggaggcctgtcagaatgctcgtctgcggaccatgccagcaagcttccttcctccttcctcagtgaacaaacgaggcgtcctacttctgsgagatgcgtataacctgaggcatcctcttactgrtggaggaatgacagtcgctttaaaagatataaaaatatggagacaactgttaaaagatattcytgacctttatgatgatgccgctattttccaggccaaaaagtcattcytttggtcaagaaaaaggagccattcctttgttgkgaacgtgctggctcargcgttgtatgaactattttctgctacwgatgattccttgcgtmagyyccgaaaagcttgctttctttattttaaacttggtggagaawgtttsactsgkcckswhrgstykytttstatatkgyctcytgacyctywcctatkgmttysmcrcttcttctccgttgcagtctatgccacgtatttctgcttsaaktcrgagmsrtgggmtacaaaacctcgggctcttttcagtagtggtgctatactgtacaaagcgtgctctataatatttcctctcatctattcagaaatgaagtatctggttcactgaaagggaaaccacatggaagtcattgggacttgaggaggatgtacatagcctaggactgtgtgtgtgacttctgcagtggtgactcaaggaccaagcttgtgtataagcatgtaaatatatgccttaattcacaattgagaatgaagggtcaataagctagatgtttaaaagaatgattgtttccacaaattaatgttaacactcaagtgtttggatttcagtattggggtgattcaattggggacaatgccaaataaaatgaaggagtggaactcctwaaaaaaaaaaaaaaaaamcctcgtg

SEQ ID NO: 2356 - DNA, 3260 bp, Rattus norvegicus
acgagcggcacgaggcctgcggcgcgcgaccggggacccgtcgcactctgcactcggccgcccgggctaaggggacaggacgggtgcgggcgcgggctcagcgagccgggagctgagtcaaggccagagcccgagaagcaagaggaggcaagaggacagtgcaccgagatggcggccgcaacggccgcggcggcgacggtggcgggggaagggatggagcctcgagcgctgcagtacgagcagaccctgatgtatggccggtatactcaggaactcggggcctttgccaaagaggaagctgctcggattcgcctgggagggcctgagccctggaaggggtccccttctgcccgggctaccccagagctcctagaatatggacagagccgatgtgccagatgtcgcatttgttctgtacgctgccacaagttcctagtgtccagggtcggtgaagattggatcttcctggtcctgttggggctcctcatggcattggtcagttgggccatggactatgccatcgctgtctgtctacaggctcagcaatggatgtcccggggcttaaacaccaacatcttactccagtacctggcttgggttacctaccctgtcgtcctcatcactttctctgccggattcacccagatcctggccccgcaggctgttgggtctggcatccccgagatgaaaaccatccttcggggagtggtgctgaaagagtacctcaccctcaagacctttgtagctaaggtcatcgggctgacctgtgccctgggsagtgggatgccccttggcaaggagggrccctttgtgcamattgccagcatgtgtgctgcccttctcagcaagttcctctccctctttgggggtatctatgagaacgagtcccggaacacagagatgctagctgccgcatgcgcagtaggagtgggctgctgctttgccgcaccaatcggaggggtcctattcagcattgaggtcacctccaccttcttcgctgttaggaactactggcggggcttctttgcggccaccttcagtgccttcatctttcgggtcttggcagtgtggaaccgtgatgaagaaaccatcacagctctcttcaaaactcggttccgactcgacttcccctttgacctgcaggagctgccagcttttgctgtcattggtattgctagtggcttcgggggagccctctttgtctacctgaaccggaagattgtccaggtgatgcggaagcaaaaaaccatcaaccgcttcctcatgaagaaacggctgctcttccccgcactggtgactctgctcatctccactctgaccttcccccctggctttggacagttcatggccggacagctctcacagaaagagaccctggtcacactgtttgacaaccggacatgggtccgccagggcctggtagaggatctaggagcacctagcacttcacaggcctggagcccaccgcgcgccaacgtcttcctgactctcgtcatcttcatcctcatgaagttctggatgtctgcactggccaccaccatcccagtgccctgtggtgccttcatgcctgtctttgtcattggagcagcatttggccggctggtgggcgagagcatggctgcctggttcccagatgggattcacacggatagcagtacctaccggattgtacctggaggctatgccgtggtcggggcagctgcacttgcaggagcagtgacacacacagtgtccacagcagtgattgtcttcgagctcaccggccagattgcccacattctgcccgtcatgattgctgtcatcctggcgaatgccgttgcccagagcctgcagccctccctctatgacagtatcatccgcatcaagaagctgccctacctgcctgagctgggctggggccgccaccagcagtaccgggtacgagtagaggacatcatggtacgggatgtaccccatgtagccctcagctgcacttttcgggacctgcgactggcactgcaccgaaccaagggccgtatgttggccctagtggagtcacmygagkccwkgmtkctsctgrrstsyrtsswrygcyyrsagryskyagcgctactgggagcacagctgagtccagcgcgccggcggcagcacatgcaaaagctaakgaaagcccagatgtccccaccgtcagatcaggagagcccccccagctctgagacgtccatccgcttccaggtgaacacagaggactcaggcttccctggagcccatgggcagactcacaagcccctgaagcctgctctaaagagagggcccagcaacgccacaagcctccaggaaggtaccacgggcaacatggaatcagcaggcattgccctcagaagcctcttctgtggcagtccacctctggagtcgrcgacgtcagaattggaaaagtcggaatcctgtgacaaacgcaagctgaagcgggtccgaatytccctggcgagtgactcagacctggaaggcaagatgagtcccgaggagatcttagagtgggaagagcagcagctagatgagccagtcamswksagtgactgcaaaatcgaccccgcccccttccagctagtggagcggacttctttgcacaagacccacaccatcttytcgctgctgggagtggaccatgcttatgtcaccagcattggcagactcattgggattgtcaccctaaaggagctccggaaggccattgaargctctgtcacagcacagggtgtaaaagtcaggccaccccttgccaskwkscgggacagtgccacmagcagcagtgacacagagaccaccgaggtgcatgcactctggrggccgagatcccgccacgkcctcccacgagakggtaccccctctgatagtgatgacaagtgccagtgaccmccatactrgacggcctgtcttccttctgcaagccagcagtgaccagaagytggaacctgaggccatcctcamtgtgggctgccagctcccccattttcaacacctcccagccggaggaccagcaatgctctggcaggaggtggggttctgtggcccctgcctcgtcttttgagaaaagggcagaactaaaatgggtttatactggaacctccaatgacaagatgtatatagaaatttacaaagatttttatattaatttaataaaacaataaatagaataaacacctrrwdarmmamwmawrwrtrraaaaarraaaamawrmrggcgcaggcttattccctttagtgagggttaattttagctt

SEQ ID NO: 2357 - DNA, 1670 bp, Rattus norvegicus
gtgagtgactttgccccaagtcgcccgtgccttggcgactgtctcctgttccctcgttgcatgcgatcgtccaactttctcggggttcctcattgtcctgggtgtccgggtcctattccccaagcgcctgctcccgagccgcgaactccagtgttcgctccagaatcttgccctaagcaaccgacgccagggaagacaggatgccccaaggaagacagggcgccctcggaaggacaggatgccatgccatcgggaagacaggactccccaaggagaacaggatgccatcagggagacaggactcccccgtggaagataggatacctccaggaagacagaatgccccccaggcagccctgggacagcgggaaacactagggaccaagctatccctggttcactcgggattttgttgggttgtgggcggggctcaggaaagattgtccctgctggtcctgctccacgaccacccacccggcaaggttccctcctagagaaccttgtcagagacagaacgggtccccacaggcgcattcttctttccaacacccatggcgcagttcctgagactttgcatctggctcgtagcgcttgggtcctgcctcctggctacagtgcaggcagactgcagccaggactgcgctaaatgcagctaccgcctggtacgtcccggcgacatcaacttcctggcatgcacactcgaatgtgaagggcagctgccttctttcaaaatctgggagacctgcaaggatctcctgcaggtgtccaagcccgagttcccttgggataacatcgacatgtacaaagacagcagcaaacaggatgagagccacttgctagccaagaagtatggagggttcatgaaacggtatggaggcttcatgaagaagatggatgagctttaccccgtggagccagaagaagaggccaatggaggcgagatccttgccaagaggtatggcggtttcatgaagaaggatgcagatgagggagacaccttggccaactcctccgacctgctgaaagagctactgggaacaggagacaaccgtgcgaaagatagccaccaacaggaaagcaccaacaatgatgaagacagcacgagcaagaggtatgggggcttcatgagaggcctcaaaagaagcccccagctggaagacgaagcaaaggagctgcagaagcgctatgggggcttcatgagaagggtcgggcgccccgagtggtggatggactatcagaagagatacggaggcttcctgaagcgctttgctgagtctctaccctcggatgaagaaggcgaaagttactctaaagaagttcccgagatggaaaaaagatacggaggctttatgcggttttgaagcccttcccagcagtgatcccgggcccccactagcctgctccatcccccgtgagcaactgccccatcagtgatgtttcttgtcatgtgctgcttgtgctgtacagttgccctcgtggtctggataactgctgcctgaaagctgtgatttttagggggttgtctgtattcttttgagtcttgaagctcagtattggtctcttgtggctatgttatcatgctgaaacagtctgttacctcatcccttctgacaaaacgtcaataaatgcttatttgtatataaaaataataaacccgtgaacccaactgc

SEQ ID NO: 2358 - DNA, 1481 bp, Rattus norvegicus
ctctgaagagcctgatttagcccacattgctgtctgtcttttcctaggaacattttggagtcgcgttcctctgtgtgggccatggcacctctgagccagataagcacccacctcaactccacctgcggggcagaaaactccactggcgtcaaccgggcccgtccgcacgcctactacgccctgtcctactgtgctctcatcctagccatcatctttggcaacggcctggtatgtgctgctgtgctgagggagcgtgccctgcagaccaccaccaactacctagtggtgagcctggctgtggccgacctgctagtggccacgttggtgatgccgtgggykgtktwcttgsaggtsacagskgkrstcygsmakttcagcygcatywgcygksacskkkywgwsmycctgkatgwcrtgatgtgyacwsccagcatcctgaacctctgtgccatcagcatagacaggtasacarcrrtrktsrtgccagttcactatsagcacggcaccgggcagagctcctgtagacgtgtggcactcatgatcacagctgtgtgggtgctggcttttgctgtgtcctgccctctyytctyysstttcmwcacmacaggggatcccagcatctgctccatctccaaccctgattttgtcatttactcttcagtggtgtccttctacgttcccttcggggtgactgtcctggtctatgccaggatctacatagtcctgaggcaaaggcaaagaaaacggatcctcactcgacagaacagccagtgcatcagtatcagacctggctttcctcagcagtcttcctgtctgaggctgcatcccattcggcagttttcaataagggccaggtttcwktcwkwtgccacwkkacaaatggagyrsrtrkaagacaaacaatatccccagaaatgccaggacccccttttgtcacacctgcagcccccctcacctggtcagacacatggggggctgaagcgctactacagcatctgccaagacactgccttgagacacccaagcttggaaggcggggcagggatgagccccgtggaaaggactcggaactccttgagccccaccatggcacccaagctcagcttagaggttcgaaaactcagcaacggcaggttatccacgtccctgaggctggggcccctgcagcctcggggagtaccacttcgagagaagaaggccacccagatggykktcwttgwrcyyrgagycykmrttgyckgctggctgcccttcttcctgactcacgttcttaatacccactgtcaagcatgccacgtgtccccagagctttacagagccacaacgtggctaggctatgtgaacagtgccctgaatcctgtgatctataccaccttcaatgtggagttccgcaaagccttcctcaagatcctgtcctgctgaaggaggagaagagaccgcactcctttaccacttcgagatgccaggcagtttgaaccctg

SEQ ID NO: 2359 - DNA, 4631 bp, Rattus norvegicus
ccagaactcgcgctgtcagtatttgctctggaagtggccacaaccaggaaggaaccgaagagagagcttcatccagcacacctccaaattaactgtttggtgacttgttagtgttaaggataccacctttctcctgccctcccgcggggcgccctgccacctcaccatcacccacacctcctgcctcatcgcgcccgcctccagctcctccccgactccccatgccggcgcaatggagttatccgaagggcgatgattgcagccacagctgctaacttagcacccatcctagccatcggtcacccttggccagcctttctgcagccgccgagacgtgggcgtccagagtccagtgccgcagccaggacccgcccgacgcgcagcagaagcgcggcgcccaggcgcctcttagagaagactgcgccaagacgctgagcctagagccagcccaggagcttgagcgcagaaagggactgcgtggctcagagtgccgaggatttcgtggacaaatagccaccactttcactgcgtatcccaacggagctgattggcgggaaggtggcttgccagtacgcaggggtccactgcaatctgccaggagccccttgctctcgggctcactatgacttgacctgtgggggccctgctcagggctcctgcaatcgagcagcctaggaaagaggggatcgctgccaagcggccttcgggtctctaaaaacccctacccgcaactgccacaaccagtgtctgagcctccctccctgcggaccccagccatggaactctcggatgtgcactgccttagcggcagcgaggaactctataccattcacccgacgcccccggccgcggacggcgggagcggctctcggccgcagcggctgctgtggcagacggcggtgcggcacatcaccgagcagcgcttcatccacggccaccgaggcggcggcggcgggggctcccgcaaagcctcgaaccctgcgggcagcggaccaaaccaccacgcgccgcagctgtctagcgactcggtgctgcctctctattctctgggctccggagagcgagcgcacaacaccggtggcaccaaagtctttccggaacgcagcgggagcggcagtgccagtggcagcgggggtgggggcgacttgggcttcctgcaccttgactgtgccccaagtaactcggatttcttcctcaatgggggatacagctaccgtggggtcattttcccaaccctacgcaactccttcaagtctcgggatctggagcgcctctatcaacgctatttcctgggccagaggcgcaaatcggaggtagtgatgaacgtgctggatgtactaaccaaactcacccttctagtccttcacttgagcctagcctcggctcccatggaccctctcaagggcatcctgctaggctttttcactggcatcgaggtggtgatctgcgccctcgtggtggtcaggaaggacaccacctcccacacttacctgcaatacagcggcgtggtcacttgggtggctatgaccacccagattctggcagcaggcctgggctatgggcttctgggcgacggcataggctacgtgctttttacactcttcgccacctacagcatgcttccgctgcctctcacctgggccatcttggccggcctgggcacatccttgctgcaagtcacacttcaagtgctcatacccagactagcggtcttttccatcaaccaggtcctggcccaggtggtgctcttcatgtgcatgaatacagcaggcatcttcatcagttacctttcagaccgcgcccagcggcaggccttcctggagacccggaggtgtgtggaggccaggctccgcctggagacagagaaccaaagacaggagcggcttgtgctctctgtgctccccaggtttgtcgtcctagaaatgatcaatgacatgaccaatgtggaggacgagcacctgcagcatcagttccaccgcatctacatccatcgctacgagaacgtcagtattctttttgcagatgtcaaaggatttaccaacctctctacgaccttgtctgctcaggagcttgtcaggatgctcaacgagctctttgccagatttgatcggctggcccatgagcatcactgtcttcgcattaaaatcctgggggactgctactactgtgtgtcaggactgcctgagccccgccaggaccatgctcattgctgtgttgaaatgggcctcagcatgatcaaaactatcaggtttgtgaggtccagaacgaagcatgatgttgacatgcgaattggaatccattcaggctctgtgctgtgtggtgtgttgggcctgagaaaatggcagtttgatgtctggtcttgggatgtggacatcgcaaacaaacttgaatctggaggaatccctgggagaattcacatttccaaagccacactggattgcctcagtggtgactataatgtggaagagggccacggtaaggagaggaatgaattcttgaggaagcataatatagagacctatttgattaagcagcccgaggagagtttgctatccttgcctgaagatatagttaaggagtcggtgagctgctcggacaggagaaacagtggggcaacgttcacagaaggatcctggagcccagaactgccattcgacaacatcgtgggcaaacagaatactctggctgccctaacaagaaattcaataaatctgcttccaaaccatctcgcacaagctttgcatgtccagtctgggcctgaggaaattaacaagagaatagagcataccatcgacttgcggagtggcgataagttgagaagagagcatatcaagccattctcactgatgtttaaagactccagcctggagcacaagtattctcaaatgcgggatgaagtattcaagtcaaacttggtctgtgcatttatcgttcttctgtttatcactgcgattcaaagtttgcttccttcttcgaggctgatgcctatgaccatccagttctccatcctgatcatgctgcactccgccctggtcctcatcaccacggcagaagactataagtgtctgcctctcattctccgcaaaacctgttgttggattaacgagacctatttggcccgcaacgtcatcatctttgcttccatcttgattaatttcctgggagccgtcataaatattctgtggtgtgattttgacaagtcgatacccttgaagaacctgactttcaattcctcagctgtgtttacagatatctgctcctacccagagtactttgtcttcactggggtgttggccatggtgacgtgtgcagtatttctccggcttaactctgtcctgaagctggctgtgctgctcattatgatcgccatctacgccctgctgacagagaccatctatgcaggtctctttctgagttatgacaacctgaaccacagtggagaagattttctggggaccaaggaggcatcactgctactgatggccatgttccttcttgctgtattctaccatggacagcagctggagtacacagcccgcctagatttcctgtggcgagtacaggccaaagaggagatcaacgagatgaaggacttgagggaacacaatgagaacatgcttcgcaatatcttacccggccacgtggcccgccacttcctggagaaagacagagacaatgaggagctgtattctcaatcctatgatgccgttggggtaatgtttgcctccattcctggatttgcagacttttactctcagacagaaatgaacaaccagggagtggaatgtctgcgcttgctgaatgagatcattgctgactttgatgagttacttggagaggaccgctttcaggacatagagaagattaagaccattggtagtacatacatggctgtctcaggactgtcaccagagaaacagcaatgtgaagataaatggggacatttgtgtgccctggctgacttctctcttgccctgactgaaagcatacaagagatcaacaagcattcgttcaacaattttgaactccgtattggcatcagccatggctcagtggtagcaggtgtaattggcgctaagaaaccacagtatgacatttggggtaaaactgtgaacttggcaagccgaatggacagcacaggagtgagtggccggatccaagttcctgaggagacctatctcatcctgaaggatcagggctttgccttcgactaccggggagagatatatgtgaagggcatcagcgaacaagaagggaaaatcaaaacatattttctcstgggacgagtccaacccaacccattcatcttacccccaagaagacttyctgggcagtactctctggctgcagttgtccttggscttgtccagtctctcaacaggcaaaggcagaagcaactactcaatgagaacagcaactctggcatcatcaagagccattacaaccggcggactttgctaacgccaagtgggccagagcctggagcacaggctgaaggcactgacaaatccgatttgccataaaagcattttctttgtgtttctttctctttttttgtatttcttttatatataaaataaatatactaataaaaaggttwrwywwwwwwarammaaaaaaaaaaaaaaaaa

SEQ ID NO: 2360 - DNA, 1497 bp, Rattus norvegicus
gaattcccccacatcatggagagcccggtgcgactcagccttctctatgttgtcctggccagcctcctgctcccggggagaagtgtgtttattaaccgggaacgagccaacaacgtcctgcagaggattcggagagcaaactcattttttgaggagataaagaaaggaaatctggaaagggagtgtgtggaagaaatttgttcttttgaagaggcccgcgaagtctttgaggacaatgagaagacgacagaattctggaacaaatatgaagatggtgaccagtgtgagagcagtccttgccagaaccaaggcgagtgtcgagatggccttgggagttatacatgcacctgcacggagggattcgaaggcaaaaactgtgaactctttgttcggaaactctgcagcctagacaacggagactgcgaccagttctgccgtgaggagcagaactcagtggtgtgctcctgtgccaagggttacttcctgggtaatgacggcaagtcctgcctctccacagctcccttcccctgtggaaaaaccaataaaggacgcgcgaagaggtctgtggccctaaataccagcaacagtgaacctgaccctgaagacctcatgcctgatgcagatattctatatcctactgagagtccttctgaactgctcaatctcaacaagacagagcctgaagcaaacagtgatgacgttattcggattgtgggtggccaagaatgcaagagaggagaatgtccttggcaggctctgctctttagcgacgaagagactgatgggttctgtgggggcaccatcttgaatgagttctacatcctcactgccgcccattgtctccatcaagccaagcgattcaaggtgagggtaggggacctgaacacggaacaggaagacggcggcgagatggtgcacgaggtggatatgatcatcaagcacaacaagtttcagagggacacctacgacttcgacattgccatgctgaggctgaagacccccatcacgttccgcgagaacgtggcccctgcctgcttgcctcagaaagactgggccgaggccacactgatgacgcaaaagacaggcatcgtgagcgggtttggacgcacgcacgagaagggccgscagtccaaagtcctgaagatgatggaggtgccctatgtggrmcgcaacacctgcaggctctccaccagcttcagcattacgcagaatatgttctgcgcaggctatgacgccaagcaagaggacgcctgccagggggacagcggtggccctcacgtcacacgattcaaagacacctactttgtgaccggcatcgtcagctggggagaggggtgtgcaaggaaagggaaatacggcatctacacgaaggtcacggccttcctcaaatggattgacaggtccatgaaagccagggtggggcccacctctgagaccccaaggttaacccatccaccctattaaagcagtccttctccagaaaaaaaaacggaattc

SEQ ID NO: 2361 - DNA, 1867 bp, Rattus norvegicus
  misc_feature (1108)..(1108): n is a, c, g, or t
ttcagtcggatcccgrcascagctgcggcggctctgttcttctgtagctcttttctgtctccctttcgtttccggaaacatggcctctggtgtggctgtctctratggagtcatcaaggtgttcaatgacatgaaarttcgcaagtyttcaacgccagaagaagtgaagaaacgcaagaaggcagtgctcttttgcctgagtgaggacaagaagamcatcatcctggaggagggcaaggagattctggtaggagatgtggggcagactgtggacgacccctacamcacttttgtcaagatgctgccagacaaggactgccgytatgstytctatgacgcaacctatgagaccaaggmgmscaagaaggmggacctggtattcattttctgggcycccgagagtgcaccccttaagagcaaaatgatctatgmcagctccaaggatgccatcaagaagaaactgacaggaatcaagcacgaattacaagctaactgctacgargarktsragsacmgstgcaccytggcagaraaactadgtgsmagcrccgtcawttcsswsgagggcaagcctttgtgasccacytccagccycytgcctggagcatctagcarccccagacctgmtmttgggtgttgmagshtgcccttttcytgccasaccggadgggytggggggkttccarcasgrsgagggttttmmcttcacsscasdwsmvrmacrwssctmccaccccbtggaccktycttttccctccatccytgacggwtctggccttcccaaacwgcttttratcttctrattcctsttgggttgaagcagaccaagtcccgtcytaggcacccagtttggggggagcctgtatttttwtttttaamgayamccstactcstsatytgtcccatcccatgytgccaamttbtaaccacaatagtgactctgtgcttgtctgktwagktctgdgtgtaaatgaactktggaaatgaccctccytgyaccagbtgkykgccctcccctttccctktgatyttgsscactcatggaagcaggvccagtawgkgaccktcaatttaaaaaammmmmvmaavmhvhkaarmmgsbtwwtynmcmrwrwrrmhwhwvrrdddvvrrwmywrkwsmcmmwgwgmtaasasayggatcgswtrwwytcygstgcwtcacccccagctcggcccctggcaaatgtacctcctttttgcggtggggtgctacggttagcgccaaggtagttgaatagggcagttgggcccacagtgtatcacacctgaaactgcttgctaatgggcctttatagtkkacagtraggtgccctgagcccctttctacctgtgggctaaawacagttcactccggtgatctattgagttttaagkttcccttagatctytccctmtggtgttggcttacccttytgccaggttcagtggtgctacgagctgstaaattgagcctttgscctcctgtacttggggctggagtccattyagggtgggtcagcaggtggagtctgggacttcakacccaggtgtcttgccccacytactgtttccccagctagagccctgactgagcctttagcttggattctrtggattmtggcctaagggctgraaaagctggtacthtagggcaggmswscccwwtycctkayctkgcsccamtywtggragsgkwscagkaagggmctgttctcttttgatmscaagggtraagggaattctttttttgttttttaaacagggtttctctgtaggtcaggctgggcttgaactggatcagcctgtctctgcctcctgagtgccgggattaaaggtgttcgttdtcmmhdmrwraaaaaaaaaaaaa

SEQ ID NO: 2362 - DNA, 2267 bp, Rattus norvegicus
gtcaagtgtttatacgtgcaggagactggccgctcggctcaggactgggattagcgggctctgctcaaacccgcgcggcttttacattaggagtgagtgggggagagtcctaggatttctagtgaaaagtgacagcgcttggtggactttgggaccttcgtgaagtcttctgcttggaagctgagacttgcatgccatggaacaccccctctttggctgcctgcgcagcccccacgccacagcgcaaggcttgcaccccttctcgcagtcttctctggccctccatggaagatctgaccacatgtcctaccccgaactctccacatcttcctcgtcttgcataatcgcgggataccccaatgaggagggcatgtttgccagccagcatcacagggggcaccaccaccaccaccaccaccaccatcaccaccaccagcagcagcagcaccaggctctgcaaagcaactggcacctcccgcagatgtcctccccgccaagcgcggcccggcacagcctttgcctgcagcctgattccggagggcccccggagctggggagcagccctccggtcctgtgctccaactcttctagcctgggctccagcaccccgaccggagccgcgtgcgcaccaagggattatggccgtcaagcgctgtcacccgcagaagtggagaagagaagtggcagcaaaagaaaaagcgacagttcagattcccaggaaggaaattacaagtcagaagtgaacagcaaacctaggaaggaaagaacagctttcaccaaagagcaaatcagagaacttgaggcagagttcgcccatcataactatctgaccagactgagaagatatgagatagcggtgaacctagacctcactgaaagacaggtgaaagtgtggttccagaacaggagaatgaagtggaagcgggtcaaggggggacaacaaggagctgcagcccgagaaaaggaactggtgaatgtgaaaaagggaacacttcttccatcagagctgtcaggaattggtgcagccaccctccagcagacaggggactcactagcaaatgacgacagtcgcgatagtgaccacagctctgagcacgcacacttatgatacatacagagaccagctccgttctcaggaaagcaccattgtgatggcaaatctcacccaaacatcgtttacatggcagatgactgtggcagtgttgcttaatataattaaacgcaggcatctcaagtctgtttctcatgattgatagaaggtttacactaagtgcctcttattgaagatgcttccacagtgaaattggagaaagtgaacatatctaaatatacttgttccttatatgacagagagggagatgaatgtttgctttggcttgcactgaaaattaaattgctaccaagagcaaactcggtaagacattttgactcaagttgtctccagagtgaagatgttatagaaatgctttgaacattccagttgtaccaggtcatgtgtgtgacactgggcaggtatttgcttttgcttgcactgaaacttaaactgctatcaagttaacccatgaaatagtttatcttgaacagccacagtgcctgaaatcaccaagtggatataaaatgaactgaaattctgtatatattactcctaagtcattttcctgtcttcactaattttagcaaatgcattcatattagctgatgaaaataggctttcccgtggacaaatgcagccagcttcttgtatttttatacatttttttgtcagtcagagacatcagtatgtgcttacttgtgttcaagtagaggaaatgcagtagagtctgataggacatattcttggtaccacagacaaaacaaatcttctgttgcattgactatcaactgctgcagatacattagagaacacacctagcccccytccagcytccctctgttatcgctcgaagacattagsrtcataggcaagtagttaccttgccaaatgagtcttgtgtggcagatgtctgattttgtatctttaaactgttaatggtatgtgtctgcttcagttaacagggaaaaagatttcttcctcattgtttatgatacaaaacccaagtgccaaacaaagctagttcttcaagggatagatgagaaactgaatgtctgacaagtagactcagcgaaaatacattatttttcagaggctgtgtattcatgcagtacaagtccttgtattttgtaaaaaaaaaagttaaataaatgatctttaaaataaaaaaaaaaaa

SEQ ID NO: 2363 - DNA, 4547 bp, Rattus norvegicus
agagctcagtgactccagcagccacgatgactgcggatgagttggtcttctttgtgaatggcaaaaaggtggtggagaaaaatgcggaccctgaaacaacacttctggtctacctgagaagaaagttggggctatgtgggaccaagcttggctgtggagaaggtggctgtggggcatgcaccgtgatgatctccaagtatgaccgtcttcagaacaagattgttcatttttctgtcaatgcctgcttggctcccatctgctccttgcaccatgttgctgtgaccaccgtggaaggcataggaaacacccagaagctgcatcctgtacaggagagaattgccagaagccatggttcccagtgtgggttctgcactcctggcattgtcatgagtatgtacacactgctccggaaccagcctgagcctactgttgaggagatcgagaatgccttccaaggaaacctctgtcgctgtacaggctacagacccatcctccagggattccggacctttgccaaggatggtgggtgctgtggagggagtggaaacaacccaaactgctgtatgaaccagacgaaagaccaaacggtttctctctcaccttctttattcaacccagaggatttcaaacctttagatcccacgcaagagcccatcttccccccagagttgctgaggctgaaagacactccccagaagaagctgcgttttgaaggggaacgtgtgacctggatccaggcttcaactatggaggagctgcttgacctgaaagctcagcaccctgatgccaagctggtggtgggaaacacagagataggcattgaaatgaaatttaagaatatgctatttcctctgatcgtctgcccagcctggatccctgaactgaattcagtggtgcatgggcctgagggaatctccttcggagcttcttgcccccttagcttggtggaaagtgtcctggcggaggagattgctaaacttccagagcaaaagacagaggtgttcagaggcgtgatggagcagctgcgctggtttgccggcaagcaggtcaagtccgtggcgtccatcggagggaacatcatcactgccagccccatctctgacctcaaccctgtgttcatggccagtggagccaagctgactctggtgtctagaggtaccaggagaactgttcggatggatcataccttcttccctggctacagaaagactctgctcagaccagaggagatattgctgtccatcgagatcccctatagcaaggagggagagtttttctcagccttcaagcaggcctccaggagggaagatgacattgccaaggtgactagtggcatgagagtcctgttcaaaccggggaccattgaagtgcaggaactgtccctttgcttcggagggatggccgacagaactatctcagccctcaagaccactccgaagcagctatcgaagtcctggaatgaggagctgctgcagagcgtgtgtgccggcttggcagaggagctgcagctggcccccgatgcccctggtggtatggtggaattccggcgcaccctcaccctcagcttcttcttcaagttctacctgacagtgctccagaagctgggcagagcggaccttgaggatatgtgtggtaaactggaccccacctttgccagtgccaccctgctctttcagaaggaccctccagctaatgtccagcttttccaagaggtgccaaaggatcagtctgaggaggacatggtgggccggcccctgcctcacctggcggcaaacatgcaggcatcgggagaggccgtgtactgtgatgacattccccgctatgagaatgagctctctctcaggctggtcaccagcacccgggcgcatgctaaaatcacgtccatcgacacttcagaagccaagaaggtgccagggtttgtttgcttcctcaccgcagaggatgtccctaatagtaatgcaaccggccttttcaatgatgaaactgtctttgcgaaggatgaggttacttgtgttgggcacatcattggtgctgtggtcgctgacaccccagaacacgcacagagagctgcgagaggggtgaaaatcacctatgaagatcttccagccattatcacaatccaggatgctataaacaacaactccttttatggctctgagataaaaattgagaaaggagatctcaagaaaggcttttcagaagctgacaatgttgtctcaggagagttgtatatcggtggccaggagcacttctacctggagaccaactgcaccattgccgtgccaaaaggcgaggcaggcgagatggagctgttcgtgagcacacagaacaccatgaaaacccagagctttgttgcaaaaatgttgggcgttccggacaacagaatcgtagtccgagtgaagaggatgggtggaggctttggagggaaggagacccggagcactgtggtgtccacagcactggccttggctgcacacaagactggccggcccgtacgttgcatgttggaccgagatgaggacatgctgataactggtggcagacatcccttcctggctaaatacaaggttggcttcatgaagactgggactgtagtggctctcgaggtggctcacttcagcaatggtggtaacactgaggatctctctcggagtataatggaacgagctttgttccacatggataacgcctataagatccccaacattcgaggcactgggaggatttgcaagactaatctgccctccaacacagccttcagaggttttgggggtcctcaggggatgctaatcgcagaatactggatgagcgaggtcgccataacctgtgggctgcctgcagaggaggtacggaggaaaaacatgtacaaagaaggggacctgactcacttcaaccagaagctggaggggttcaccttgcccaggtgctgggatgaatgcatcgccagctctcagtatcttgctcgcaagagggaagtggagaaattcaacagggagaattgttggaaaaagagagggctgtgtataatcccaactaagtttggaataagctttacacttccttttctgaaccagggaggcgctctggttcacgtgtacactgatggttcggtgctgttgacccatggagggactgagatgggccaaggccttcacaccaagatggttcaggtggccagcagagctctgaaaatccccacctccaagattcatataagtgagacaagcactaacaccgtccccaacacttctcccacagctgcctctgccagtgctgacctcaatggacagggtgtttatgaagcatgccagaccatactgaaaaggctggaacctttcaagaagaagaaacccaccggcccctgggaggcatgggtgatggacgcctatacgagcgcagtgagtttgtccgcaactggattttataagacacccaaccttggctacagctttgagacaaactccggaaatcccttccactatttcagttatggggtggcttgctctgaagtagaaattgactgcttaacaggggatcataagaatctccgtacggatatcgtcatggatgttggttccagcttgaatcctgccattgatattggacaagtagagggggcatttgtccagggccttggtctcttcactatggaggagctgcactactcccctgaggggagcctgcatactcgtggccccagtacctacaaaatccctgcatttggtagcatccccattgagttcagagtatccctactccgggactgccccaacaagagggccatctatgcatccaaggctgttggggmrcsasctcttttcctggcttcctctatcttctttgccatcaaagatgccattcgtgcagctcgagctcagcackkwsayrasgcwwwacaacttttccagctagacagccctgccactccggagaagatccgaaacgcctgtgtggaccagttcaccaccctgtgtgtcactggagtaccagaaaactgtaaatcctggtctgtgaggatctgaagagaaggtctccascaktggtttgtaccgcacmaggattcyttggagccacaagcacatcctgtagtatccagatttccgcatgccgsgtgggactcagcaggatgacattttcargaagatggrcattttgaycmaaataagagctgcaaacaaaccaataagcaaatggggagctgttggchtaaggggcgaatcagcagyttggatgatttsgagtccactttgaccacgtgtttgaaatgagtttaggaagcatttgtgttatgtccctactcactcaatggtgtatgtaaccagaatcctcacacacctcytgaatcttaaaccaaagttcctctagatctgcatgccatattcagaaagcttacatcgctcaagtcactcaaagtgccatgctttaaccccagagtcacactcatagttttcagcgagacagcagagggacataaaaacctccacctacgtttgcatcatggaaggcaataaaaatgaagtgaaawmarraaaaaaaaaaaaaaaaaa

SEQ ID NO: 2364 - DNA, 1859 bp, Rattus norvegicus
ggcacgagcggtctcggcgctgtggccatgcctggcggcaccttagcggctgtcctgagcccgacacaaccccggtagaggactccccgggcccggctggcccggccatgcagctagagacgcaggacgcgctgtacgtggcgctggagctggttatcgccgcgctggcagtggcgggcaacgtgctggtgtgcgctgcggtgggagcctcgagtgctttacagacccccaccaactactttctggtgtccctggcgacggcggacgtggctgtgggactcttcgccatcccctttgccatcaccatcagcctgggcttctgcacggactttcacagctgcctcttcctcgcctgcttcgtgctggtgctcacacagagctccatctttagcctcttggcggtggctgtcgaccggtatctggccattcgcgtcccgctcaggtataaaggtttggtcactggaacacgagcaagagggatcatcgctgtcctctgggtccttgcctttggcattggactgactcctttcctgggttggaacagtaaagaccgtgccaccagcaactgcacagaacctggggatggcatcacgaataagagctgctgccctgtgaagtgtctctttgagaacgtagttcccatgagctacatggtttatttcaacttctttgggtgtgtccttcctccactgctcatcatgatggtgatctacatcaaaatcttcatggtggcctgcaagcagcttcagcacatggaactgatggagcactccaggaccacgctgcagcgggagatccacgcggccaagtcactggctatgattgtgggcatctttgctctgtgttggctccccgtgcatgccatcaactgcatcaccctcttccatccagccctggccaaggacaagcccaaatgggtgatgaatgtggccatcctcctgtcacacgccaattcagttgtcaatcccattgtctatgcctacaggaaccgggacttccgctacagtttccacaggatcatctccagatacgttctctgccagacggacaccaagggtgggagcgggcaggccgggggacagtcaactttcagtctgagcttgtgacctaggctctggcctttgggagaagaaggcttaaaatwaacaatggactggacacagctggtgacctcactgtggaggacaactaccctctcaagcatgtggcccacytgccctgaacgcttgccaggagtcacacaagtctggctcacacgtacatgcaactaggaggccctgaggctaacagatacacttaggaatctattcagctgctcttacttactgtgtggatggcgggcggctagaactgattccaaaaactgttttatttttaagaatctgcctcattcgtggtagaaaaatgactgaaacttaccttactgtgaaacactgtgaactatataatgtaagtatttttcacttacagcaatgggaaaataaaagttggctctattaamwwawamwmawwmmrrrramarcaactcagaaaactgaagtataattcttcagtcaagatactgtagtgttaatttagggaatggtactaccctaagtttgaaagtagaattatgtaacaaamcmwtwwrarwwmarwawmwwmcttgcccacaaaacactagaggtggaaacttggagagctgggtccttcctccactgcacccctgctttagagctaggtactagagtttgcttctctctcacattacagtttattggatcccaaagtatgaaaattttactgagcaaaatcccctagctgtgtattatatccagtgaaataaaactttgaaaggtgaaaaaaaaaaaaaaaaaaaa

SEQ ID NO: 2365 - DNA, 1466 bp, Rattus norvegicus
ctggaaagggagatgtggaaaggcatggcctggctttccttctacctcctaaatgttctctgggctgtggcaggaaccagtaccagagcccagcgctcttgctctgtccccccagatcagcagccctgggtcaatggcctacaattgctcatggaaaactcagtaactgagtcagacctcccaaaccccagcatcctgattgccatgaacctggccagcacctacaacctggaggcccagaagctcctgacttaccagctcatggccagtgacagtgcagacctgacaaatgggcagctcgccctcaccattatggctctcacctcctcctgccgagaccctggaagtaaagtgtccattctacaaaagaatatggagagctggacaccttcaaacctgggtgctgaatcctcatccttctatgggcctgctctggcgatccttgcactgtgccagaagaactcagaggcaaccttacccatcgcggtgcgcttcgctaagaccctcatgatggaatcctctcccttcagtgtggacacaggagcagtggcaaccttggccctgacatgcatgtacaacaggattcctgtgggttctcaggaaaactacagagacctgtttggtcaggcactgaaggttattgtggataatatcagcttgaggatcaaagctgatggtattattggagacatctacagcactggccttgccatgcaggctctctctgtgacacctgagcaacctaccaaagagtgggactgtgagaagactatgtatacgatactcaaggagattaagcaggggaaattccagaaccccatgtccattgcccagattctcccttccttgaaaggcaagacttacctagatgtgccccaagtaacgtgtggccctgatcatgaagtgccaccaactttaactgactatcctaccccggtccccacttcaatatctaatatcacagtcatatacaccataaacaaccagctgaggggggttgatctgcttttcaatgtgaccatcgaggttagtgtgaaaagtggatctgtgctccttgctgtcctggaagaagcgcagcgcagaaaccacatgttcaaatttgaaaccacaatgacatcctggggccttattgtctcttctatcaacaatatcgctgagaatgttaagcacaagacctattgggagttccttagtggcaaaacgcctttgggtgaaggggttgcatactatattcccttcaactacgagcacatcacagccaacttcacccaatactgagaaggagtatcttctgttgtatgtgaccaaaggatggtttggtttcttttcatatcgtttcaaatctgtaccaagaaaagcagatattaacagtgctactccattcctgagccacggtgtggaataaatgatgcaggttcctgaggtgctcaccactgtgactcatgaaataaaattcctggcttctc

SEQ ID NO: 2366 - DNA, 931 bp, Rattus norvegicus
gactcggcctcgcgcgtccattggtcggctgcgtgaggggaggagccgctgcccgccgagatgagctggggccgtctgagccgcttattgaagccagcactgctgtgcggggctctggmwktscctggcctggctggcaccatgtgtgcatcccgcgatgattggcgctgtgcgcgctccatgcacgaattckcagccaargacatcgatgggcacatggtttgcctggataartacasksrttryrtgygmatygkcaccwacgwggcctcgcaatkmggcaarrccgacgtaaactacactcagctagtcgatctgcatgcccgatacgccgagtgtggtwtacgaatcctggccttccmttgcamccagttcggsargmakkmgscasgargtaatcaagaaatcaaggmrykwgsagccggctacaatgtcargttygrcaygtasrgcaagatctgtgtaaatggggacgatgcccacccactgtggaaatggatgaaagtccagcccaarggcaggggcatgctgggaaaygscatcrarkgraactttaccaagtttctcattgatmrgmacgrstgcgtggtgaagcgctatgrkcccatggaggagccccaggtgatagagaargacctsccgtgctatctytagcccyacaagtsykkgcccstgcaccgagcccccstgccctgtgacccytggagccttccaccccggcactcatgacggtytgcctgaaaaccagcccgctggtggggcagtcccgaggacctggcgtgcatccccgccggaggaaggtccagasgcctgtggcccykkgctcgagcttcaccttggctgccktgtgggaataaaatgtagaaatgtrvaaaaaaaaaaaaaaaaaaaaaaaaaaaaaaaaaaaaaaaaaaaaaaaaaaaaggaattc

SEQ ID NO: 2367 - DNA, 4322 bp, Rattus norvegicus
aaagcagaagtaagagcgcggctgagcaagacgtgccctgccggactgcctgggacccaggcggttgctgcacgagggacccctgagtcccccccacccgtggctggcaggcccagggattgtgcgggtggctgtgctccggtggtaccgccagcctccggatttctcctgcttcttccctctccctggagcggctgacaatgaccaccatggtcaacgtggacacccttccagaatatgagaagagtcagatcaagagagccctggagctagggacggtgatgaccgtattcagtgcccgcaaatccaccccagagcggaggacagtacagatgatcatggagacccggcaggtggcatggagcaagacagcagataagatcgaaggcttcttggacatcatggaaataaaggaaatccggccagggaagaactccaaggactttgagcgagccaaggctgtccgtcacaaggcagactgctgcttcaccatcttctacggcacccagttcgtgctcagcactctcagtctggcaaccgactcaaaggaggatgcagtgaagtggctctctggcttgaagatcttacaccaggaagcgatgaacgcatccactcccacaatgattgagagttggctgcggaaacagatttattcagtagatcaaacccgaagaaacagcatcagcctccgggagctgaagaccatcttgcccctggtcaacttcaaagtgagcggcatcaagttcctcaaggacaagctggtggaaattggcgcccagaaagatgagctcagttttgaacagttccatctcttctataaaaaactcatgtttgagcagcagaagtcgatacttgacgaattcaaaaaagactcctccgtgttcatcctagggaacacagaccggcctgatgcctcagccgtctacctgcaagacttccagaggtttcttttacatgaacagcaggagctatgggctcaggatctgaacaaagtccgggagcggatgaccaagtttatcgatgacacaatgagggagaccgcagagcccttcttgtttgtggatgagttcctcacgtatctgttctcacgggagaacagcatctgggacgagaagtacgatgccgtggacatgcaggacatgaacaaccccttgtcccattactggatctcctcttcccacaacacgtacctcactggagaccagctgcgtagcgagtcctccacggaagcgtatatccgctgtctgcgtgctggttgtcgctgcatcgagttggattgctgggatgggcctgacgggaaacccataatctatcacggttggacacggaccaccaagatcaagtttgatgatgttgttcaggccatccgggatcatgcctttgttacctccagctttcccgtgattctgtctatcgaggagcactgcagtgtggagcagcaacgtcacatggccaaggtcttcaaggaagtgttaggagacctgctgttgacgaagcccacggaggccagtgctgaccagctgccctcacccagccagcttcgtgagaagatcattatcaagcataagaagctgggcccccgaggtgatgtcgatgtcaatgtggaggacaagaaagatgagcacaagacccagggcgagctgtatatgtgggactccatcgaccagaaatggactcgccactactgtgctattgcggacgccaagctgtccttcagtgacgacattgaacagactgtggaagaggatccggtccaggacactccccccacggagctacattttggggagaaatggttccataagaaggtggagagcaggaccagtgcggagaagctgctgcaggagtactgtgccgagactggggccaaggatggcaccttcctggtgcgggagagcgagaccttccccaacgactacacactctccttctggcggtctggccgggtgcagcactgccgaatccggtctaccatggagggtggggtcatgaagtactacctgactgacaacctcacgttcaacagcatctacgccctcatccagcactaccgggaggcacacctgcgctgtgcggagttcgagctgcggctcacagacccggtgcccaaccccaacccacatgagtccaagccgtggtactatgacaggctgagcaggggggaagcagaggacatgttgatgcggattccccgagatggagccttcctcattcggaagcgggaggggaccgactcttacgccatcaccttcagggccaggggcaaggtgaaacattgccgtatcaaccgggacggacgtcactttgtgctggggacctctgcctactttgagagcctggtggagctcgtcagctactatgagaagcacgcactctaccgcaagatgaggcttcgctaccccgtgaccccggagctcctggaacgatataatatggaaagagacatcaactctctctatgacgtcagcaggatgtatgtggacccaagtgagatcaacccttccatgcctcagaggactgtgaaagcactctatgactacaaagccaagcgcagcgatgagctgaccttctgccgaggtgccctcatccacaacgtctccaaggagccgggaggatggtggaaaggggactatgggacccggatccagcagtatttcccatctaactacgttgaagatatctcggcaggcgatgctgaggagatggaaaagcagattattgaagacaaccccctcgggtctctctgcagaggcatattggatcttaatacctacaatgtggtgaaggccccccaggggaaaaaccagaaagccttcgtctttatcctggagcctaagaaacagggggaccctcctgtggagttcgcgactgaccgtgtggaggaactgtttgagtggtttcagagtatacgagagatcacttggaagatcgacaccaaggagaacaacatgaagtactgggagaggaatcagtccattgctattgagctctctgacttggttgtgtactgcaagccgactagcaaaaccaaggaccatttggaaaatcctgacttccgggaaattcgctcttttgtggagacaaaggcagacagcattgtcaggcaaaagcccgtggatctattgcggtacaaccagaagggcctgacccgtgtctaccccaagggacagagagttgactcttccaactacgaccccttccgtctgtggctgtgtggctcccagatggtggcgctcaatttccagactccagacaagtacatgcagatgaaccatgcattgttttcgctcaatgggcggacaggttacgtcctgcagcccgagagcatgcggtctgagaagtatgacccgatgcccccggagtcccagaggaagatcctgatgacactcactgtcaaggttcttggtgcacgccacctccctaaactagggcggagtatcgcctgtccctttgtagaggtggaaatctgtggggccgagtatgacagcaacaaattcaagacgacggttgtgaatgacaacggtctcagccctgtctgggctccaactcaggagaaggtgacatttgaaatttatgacccaaaccttgcgttcctacgctttctggtctacgaagaagacatgttcagtgaccccaacttcctggctcatgccacataccccattaaaggcatcaaatcaggatttagatcagtccctctgaagaacgggtacagtgaagacatcgagctggcatccctcctggttttctgtgagatgcgsccrgtcctggagagtgaagaagaactctattcctcctgtcgccagctgcggaggcggcaggaagagctcaacaaccagctcttcctgtatgacacacaccagaacctgcgaggagccaaccgggatgccctggtgaaggagttcaatgttaackagaatcagctgcggctgtaccaggagaagtgtaacyggaggctgagagagaagagagtgagtaacagcaggttctactcctagaagctctgtgcgcgcacatgcgtgcggtgttcatgagcgcatccggatacaggcgagccttataatcagttcccaggaagaggttcatctgtgacattcattgtcctctctycgagccactcaccatagagatgacatttctgaagacgtcccccccatgggcaggaggagttgagaccttcctgctgtttttccaccttggacaacttaacttatactccttatagaggattcccccaactgtgtgcctcacgtttgtccttccctgttctcagcctctttgaataaaggcaagagtttcatgccawwaarmwwwmwawmyra

SEQ ID NO: 2368 - DNA, 1892 bp, Rattus norvegicus
gcagcctctgcttttgcaggactttctgccaccatgaaggctgttgggggctgagcaggatgttgactggctatcgttcattgagcactctcacgatcagcatcacgcacggaatccatccttcctgtgttgcagcttgtagaccctgatgcttgggctgccagcataaacgtggggatccagactctgtctaccgaggctgcccatagggacaggccctgggaagaggagctgagaccaggctaaaaagaacccaagaaatgaagcgcctcctcacgctggcttggttcctggcttgcagtgtgcctgcagtcccagggggcttgctagaactgaagtccatgattgagaaggtgactgggaagaatgccgtaaagaactatgsyttytacggctgctactgtggctggggcggccacgggacccctaaggatggcactgattggtgctgtcggatgcacgaccgttgttatgggctactggaggagaaacactgtgccatccggacccagtcctatgactacagattcacacaggacttagtcatctgcgaacacgactccttctgtccagtgaggctttgtgcttgtgaccggaagctggtctactgcctgaggagaaacctctggagttacaaccgtctttamcagtattaccccaacttcctctgctaatgtcctctgtgggctctcgccgggagtgcctcccacagtggcggcccccctcggctgtattcctgatccgtccacccaaggtcttggatctgccttcctctgtgtaccactgggctggacagagcccagggttacaccctaccctccagaatcctagagagggactctgatgtagagtctgcggactctggatagctgagcctgcackwgsagaatttggcgctgggccccggagctccctcagctccaggccagtgtcgtgttgactttcctttcaatttctggaacccaactgccattaccaccctccagagacctcttactagaggagaagccaaattaactctataaatctgccatgtagctattaaataaaacccattcacgaggcgagaagaacaccaccccagcactccctctgacagggctggggtaggagtgccaatgcttctctaacccctgaggcatctgtgcaccctctaggatggaggtcaggaaacaggtgggggccttacatgcctttcatggtttgtcttgagtttattttcttaaaccttagggtctttcaagccagacctggagctcaagattcttctggaggaaggtgagacacagccctatgccaccttgacgctccaggctagaaagggacagcccctagccctggcttctgcaactgtgtggtcttgaacctccgtatagtccgaatccctmtggctctcctcaaaatataaaacaagcctccttccaatagcatattggtgcacacccctaatcccakcacctgggaggaggaggcggcaggagcatcrggagttcaaggccagctcytgcmccmtagcagggatggtaggctgcatgaragtgtgtytcagaaagaaccmcctggtkcgggtacagggatgctgggattytgaratgtcactcagtgsgggaaaagattcaaggaggggaacagatcaatggcrgaatgactgtytgtgccgagttaagggcactgaaaatctcagstcatytatcgctttataraagatagagctttgggaggaagcaaggcactytacagtaaaggagtggcctttccaaggaagkgtctaggstccttyttytccagaacatgcacaggacataggagatccattatttagagacctttygtgttcsaacsyyyyctmaataaagttaattatatyvrvvhwhaaaaaaaaaaaaaaaaaa

SEQ ID NO: 2369 - DNA, 3053 bp, Rattus norvegicus
gaattccgccgagcgcagcaggccggatcgcgcagcgcgccagggaaggtctgggctccgcgcttcccgccccacacgccgacgcgctcgcaagccctccctcggcgctgggacccctggcggacatggccggcgacgccgtgcagagtgaacctcgcagctggtcactgctggagcagctgggtctggctggggcagacctggcagcccctggggtgcagcagcagctggagttagagcgagagcggctgaagcgggaaatccgaaaagagctgaagctgaaggagggcgctgagaacctgaggcgggccaccactgacctgggccgcagcttggcccctgtggaactgctgctgaggggctccgctagacggcttgacttgctgcaccagcagctgcaggagctgcatgcacatgtggtgctgcccgaccctacagcggggagtgatgctccccaatcccttgcagagggcagccctgtctgctcatccaccaacctgagccgagtggctggcctggagaagcagctggccattgagctcaaggtcaaacagggggcagaaaacatgatccagacctacagcaatggcagcaccaaggaccggaagctgctgttgacggcccaacagatgctgcaggatagtaagaccaagattgacatcatccgcatgcagcttcgccgggcgctacaagcactccaggctggccagctggagagtcaggcagctcctgatgaggcccacggagatccagacctgggagccgtagagctacgcattgaggagctacgacaccattttcgagtagagcatgcagtggcagaaggcgccaagaatgtcctgcgtctgctcagtgctgcaaaggccccagaccgcaaagcagtcagcgaggctcaggagaaattgactgagtccaaccagaagctgggcttgctgcgggagtcactggagaggcgcttgggggaactgcctgctgatcaccccaagggacgcctgcttcgggaggagctcactgcggcctcatcggcagccttcagtgcaatactgcctgggcccttccctgccactcactacagcaccttgagcaagcctgcaccactcacagggaccctggaagtacgagtggtgggctgcaaaaaccttcccgagaccatcccttggagccctcccccctcagtcggggcatctgggacccccgacagccgcactcctttcctgagtcgtccagctcggggcctttacaaccgaagtggaagccttagtggacggagcagcctcaagggggaggcagagaattccactgaggtcagcaccgtgctcaagctggacaacactgtggtggggcaaacagcctggaagccatgcggccccaatgcctgggaccagagcttcaccctggagctggagagggctcgggagctggagttggctgtgttctggcgtgaccagaggggtctgtgtgctctcaaatttctgaagttggaagacttcttggacaatgagaggcatgaggtgcagctggacatggaaccccagggctgcctggtggctgaggtcaccttccgtaaccccatcatcgagcggatccctaggctccaaaggcagaaaaaaattttctccaagcagcaagggcagacatttcagcgtgccagacacatgaacatcgatgtggccacctgggtgcggctgctccggagactcatcccgaacgccgtggccactggctccttcagccccaatgcatctccaggctctgagatccggagcactggagacatatccatggagaaattgaatctcggtgctgactcagacagctcgtcccagaagagccccgcagggctgccctccacctcatgtagcctgagttctccaacccacgaatccaccacctctccagagctgccttcagagacccaggagaccccaggccctggcctgtgcagtcccctgaggaagtcgcccctgacgcttgaggacttcaagttcctggcagtgcttggtcggggtcactttggaaaggtgctgctgtctgaattccactccagtggggagctctttgccattaaagccttgaagaaaggtgacattgtagcccgggatgaggttgagagcctgatgtgtgagaagcggattttggcgaccgtgaccagggcaggacatcccttccttgtgaaccttttcggctgtttccagaccccagagcatgtgtgctttgtgatggagtactcagccggtggggacttgatgctgcatatccacagcgacgtgttctcagagcctcgggctggcttctattcggcctgtgtggtgctgggactgcagttcctccatgaacacaagattgtctacagggacctgaagttggacaatttgctcctggatactgagggctacgtcaagatcgcagactttggcctctgcaaggaggggatgggctatggggaccggaccagcacattctgcggaactccggagttcctggcgccggaagtgctcacagacacatcctacactcgagccgtggactggtggggactgggtgtattkctctatgaratgctgkttgragagtctccgttccctggggacgacgaggaggaagtatttgacagcatcgtcaatgatgaggttcgttatccccgcttcctgtctgcggaggccatcggcatcatgagaaggctactgcggaggaacccagagcggaggttgggatccactgagcgtgatgcagaagatgtgaaaaaacagcctttcttcaggactctggactgggatgccctgctggcccgtcgcctgcctccacccttcgtgcctacactttcggggcgcacagacgtcagcaacttcgatgaggagttcactggggaggcccccacactgagccctccccgggatgcacggcccctgacagctgcggagcaggcggccttccgggatttcgactttgtggcaggaggskattagccmtaagcccytgccttgcccaagagttcttggtttttaaaaaagcctttggggtttactccrdaawdmawaaaaaaaaaaaaaaaa

SEQ ID NO: 2370 - DNA, 1744 bp, Rattus norvegicus
gactgataggcgtgtcgggcgggaccagagcgcgccccactcagcgaaagctgccgtccctctttgccttgagcgccgcagccctgagaatcgcatctggcttggaaacagtcctaagactggagtctcgaagaaagccggagacagtcgcgaagaacggaggacgcccagagactcttcggcttcccggaagtggaaccgagcatacccggaaggagctaatcccacctgaagattgctgagcacccgcaggcgttaagcctaacggagtccacgtcatggcggcggatgggacaggtgtagtcggaggaggggctgtcggcggccccctgtccaaggacggtttgctggatgctaagtgcccagaaccaatccccaatcggcggcgctcttcctcgctgtcccgtgacgcgcagcgccgagcctatcagtggtgccgggagtacctgggcggagcctggcgcagagcgcggccggaggagctgagcgtttgccccgtgagcggaggcctcagcaacctgctcttccgatgctcgctaccgaaccacgtgcccagtatgggcggggagccccgggaggtgctgctacggctgtacggggctatcttgcagggtgtagactccttggtattagaaagcgtgatgttcgccattcttgcagagagatctctagggccccaactttatggagtgtttccagagggccgcttggaacagtacctcccaagccggccattgaaaactcaagagctccgggacccagtgttgtcaggagccattgcaacaaagatggcccgtttccatggtatggagatgcccttcaccaaggagccccgctggttgtttgggaccatggagcggtacctaaagcagatccaggacctgccgtccactagccttccccagatgaacctggtggagatgtacagcctcaaggatgagatgaatcacctcaggacgttgctagacgctacaccgtccccagtggtcttctgccacaatgacatccaggaaggaaacatcttactgctckcagagccagacagtgatgacaacctcatgttggttgatttcgagtacagtagttacaactacaggggctttgacattgggaatcatttctgtgagtgggtttacgattacacttacgaggagtggcctttctacwaagcaagacytgcagactaccccactagagaacagcagctccttttcatccgtcattatctggcggaggttcrgmmmgrkgaggtcctctcsgamgaggagcagaagaracaggargaagatttgctgatakagatcagmcggtatgccmtggcctckcrbbwskwskggggcctatggtccamcctccaggcttccatgtccactatagagtttggctacttggaawacgcccaatctcggttccagttytacwtccagcmgaaggggcagctgaccagcktcctatcaccttgaggatccracccccacctcagatttytcctggagcctccggggcaggccctcggagggaggggcaaagagcagaagcccccagagcttgggctgtgcctctaagtgagactgtcgttgaagtagctgacctccgtactcctttmttagtacttgcccaaggggggcatctgacagcccctggggctgtgcacctaaataaatgaacttcacaaatmcaamwrrrraawamarawwmaaamawwrmrrmmrmaarcttattccctttagtgagggttaatttt

SEQ ID NO: 2371 - DNA, 2738 bp, Rattus norvegicus
cacgaggcctgcttgaggctgtgtgtcagcacttggctggagacttcttgaacttgtcgggagagtgacttgggctccccacttcgcgccggtgtcctcgcccggcggatccagtcttgccgccgcctccagcccggtcacctctctgttccttggccggctgggcccaccccaagacacggttcccttcggggagaacacccggagaaggaggaggtgaagaaaggcaacagaagcccagtcgctgctccaggtccctcggacagagctttttccatgtggagrcwcswsaatggacgtgccccctagtgcttcttagacggactgcggtctcctaaaggtcgaccatggtggccgggacccgctgtcttctagtgttgctgcttccccaggtcctcctgggcggcgcggccggcctcattccggagctgggccgcaagaagttcgccggggcatcssgccccttatcccggccttcggaggacgtcctcagcgagtttgagttgaggctgctcagcatgtttggcctgaagcagagacccacccccagcaaggacgtcgtggtgcccccctatatgctcgacctgtaccgccggcactcgggccagccaggagcgctcgccccagaccaccggctggagagggcagccagccgcgccaacaccgtgctcagcttccatcacgaagaagccatcgaggaactttcagaaatgagtgggaaaacttcccgacgcttcttcttcaatttaagttctgtccctactgatgagtttctcacatctgcagagctccagatttttcgggaacaaatgcaggaagctttgggaaatagtagtttccagcaccgaattaatatttatgaaattataaagcctgccacagccagctcaaaatttcctgtgaccagactattggacaccaggttagtgactcagaacacaagtcagtgggagagctttgatgtcaccccggctgtgatgcgatggacagcacagggacacaccaaccatgggtttgtggtggaagtggcccacttagaggagaagccaggtgtctccaagagacatgtgaggattagcaggtctttgcaccaagatgaacacagctggtctcaggtaagaccactgctagtgacttttggccacgacggtaaaggacatccactccacaaacgagaaaagcgtcaagccaaacacaaacagcggaagcgtcttaagtccagctgcaaaaggcaccctttgtatgtggacttcagtgatgtggggtggaatgactggatcgtggcccctccaggctatcatgccttttactgccatggggaatgtccttttcccctggctgatcacctgaactccaccaaccatgccatagtgcagactctggtaaactctgtgaattccaaaatccctaaggcatgctgtgtccccactgagcttagcgcaatctccatgttgtacctagatgaaaacgaaaaggttgtgctaaaaaactatcaggacatggttgtggagggttgcgggtgtcgctagcacagcaagaacaaawaaawaaaaaawaaatatatatattttagaaaaaraaaaaammwamtcaccccctctccccctaaaaaaaaaccagctgacactttaatatttcccaatgaagactttatttatggaatggaatgaaaaaaaaaacacagctattttgaaaataymtktrymkctacgaaaataagttgggaaaacaaatattttaatcagagaattattccttaaagatttaaaatgtatttagttgtacattttatatgggttcaactccagcacatgaagtataatggtcagagttattttgtatttatttactattataaccactttttaggagaaaaaatagttaatttgtatttatatgtaatcagaagaaatatcgggtttgtatataattttcaaaaataattgtagtttttcagttgtgtgtatttaagatgcaaaswckasrtggaaggttactgagcaaagtgcttgcacatttgctgtctgttttttgcagcactactgttaaagttcacaagttcaaatccaaaaaagaaaaaaaaaaggataatccactctgctgactttcaagattattatattattcaattctcaggaatgttgcagagtggttgtccaatccgtgagaactttcattcttattagggggaatatttggataagaaccagacattactgatctgatagaaaagctcttgccgccctccctgcagaaagaaywmrgcasrassagtggaagtaattaagaaaactgtgaccatgtcaggaagtgatgatgscctcttgttctttcttaaacctatgatcctttccagggggctgatctggccaaagtactaaataaaatatataatatttctwctttakwaacwttgtagtcatatatatgtacaattgattatcttgtggccctcataaagaagtggaaattgacttgtattttgtgtttaccctagcagcaagctctttattctccaaagcacccaattttctacagttgcctgacacgcagcaaaattgagcacgtgtttcctgcmtacaccctgttctctgtcctatcagcytgcttttctttctagggayatgtgtttgaacatatgtctccaaatgttaarcctgtctcagataatarakrtcaaaattctggcatttcrtcctrymaaacctammmmrwrararmaaaaaaaaaaaaaaaaa

SEQ ID NO: 2372 - DNA, 1814 bp, Rattus norvegicus
gagcgcctctcggagctgggttttcccccgcggcgcgggagccaggagccgccttttccgctgggtgtcactcgggggtggggagggtggcccattgaaaagcgctgcgaggggccccggccagtgcccttcagtgagcgctccgcggaagacggcagagagcagcccgctcacggctccgggatcttgtggcgggtcaggactcgcctgtccctctgccgggaccccgagccaccgccgccaccgccaccgctctgtctcctgcgagtcagccttctctgtgcgctccgggcaggcggccgcggaagccgctggagcgaggacagcgcacggctgctactgctacccccagccggagcgtctggaagcctaaaggccgagcggagcagcagcaccccttatgccggaaggatgctggagagcagcggttgcaaggcgctgaaggaaggagtgctggaaaagcgaagcgacgggctgctgcagctctggaagaaaaagtgctgcatcctcactgaggaagggctactgctcataccgcccaagcaggtacaacatcagcagcagcaacagcagcagcaacagcccgggcaggggacagccgaaccgtcccaacctagtggccccgccgtcaccagccttgagccaccagccaagctgaaggaattgcacttttccaatatgaagactgtagactgcgtggagcgcaagggcaagtatatgtacttcactgtggtsmtggcsgarkkcwwagaratcgactttcggtgtccccaggaccagggctggaacgcagagatcacgttgcagatggkgcagtacawaaatcgtcaggccatactggcggtcaagtctacgaggcagaagcagcagcacctggtccagcagcagcctccgcagacgcagcagatccaaccccagccccagcagccgcagatccaaccccagccccagccgcagatccagcctcaaccccaaccccaaccccaacctcagccccaaccccagcagcagccccagccccarcagctccactcytacccgcacccgcatcctsrkstktaccctcaccctcaccctcacgcgcactcgcacccgcacccgcaccctcaccctcatccacaccaactccagcatgcgcaccagcctctccactcgcagccacagggccaccggcttctccgcagcacctccaactctgcctgaagagggcggcacccgggccactcaaggttttgaggacttcgggaagtgggaagagtgcattactatttaagttcacttggatcaaaaccaacggaggtctccccgccctgtgccagatcaagkagtttggacatmaccctacggataacgcgcgcttgcagttcctcgtrgttttttctgcgtaagcttcatcacagtgcaggaagcgattttgagtcaagatgactatttatgaacctttggaaggatcacctaacgtaatggaccttgtaggagcaatttatgtactgtaattttattttaatgtattttggtttatgattatwtatgtttttttaatgcctattctaagacatttctgaatgtaggccacctcctcttccccttctcgccaaaaaaaaaaaaaaagagagactttattttcagaaacctatttcctagtaagccctgatcttggaaaagaaaaaggggaagaagagtggtggagtggggcaaacatgaaaaatggattcatcatccccagaacattctcataaagtcgactctttttcattgtatttgaagaagttgaaattaaattctgatattactttcaaaaaaaaaaaaaaaaa

SEQ ID NO: 2373 - DNA, 1324 bp, Rattus norvegicus
aattcacagctgtctcactttcttccagttcaaccagccctgacagctcccaagccttgagtcacagagacttgggagccactccactcccagcatcgtagagctacagcaggattaagtttacctcaaagatgggagaaatcagggtggataatttcagccttgaagacttcttcagtggagatattgacagttacaattacagttctgacccgccctttactctgtcagatgctgccccatgcccctcagcgaacctagatatcaacaggtatgctgtggttgtcatatacgttctggtgactttgctgagtctcgtggggaactccctggtgatgctggtcatcttgtacaatcgaagcacctgctctgttaccgacgtctacctgctgaacctggccattgctgatctgttctttgccctgaccttgcctgtctgggctgcatctaaagtaaatggatggatttttggctcattcctgtgcaaggtattctcgttcctgcaggagattaccttctacagcagtgttctgttgctagcctgcatcagcatggaccgctacctggccatcgtccacgccacaagtacactgatccagaagagacacttggtcaagtttgtgtgcatcaccatgtggtttctctcactagttctgtccctgcccatcttcattcttcggactactgttaaggcaaacccttctaccgtagtctgctatgagaatataggtaataatacatccaagtggagggtggtactgcgcatcctgcctcagacctatggcttcctcctgccgctgctcatcatgctgttctgctatgggttcacactgcgcacgctctttaaggcccacatggggcagaagcaccgggccatgcgggtcatctttgctgtggtcctcgtcttcctgctctgctggcttccctacaacattgtcctgttcacagacaccctcatgagaaccaagctgatcaaggagacctgtgaacgccagaacgagattaacaaagctttggaagctactgagattcttggcttcctccacagctgtcttaaccccatcatctatgcctttattggccagaaatttcgccatggacttctcaagatcatggctaattatggccttgtcagcaaggagttcttagccaaggagggcaggccttcttttgttggctcttcttcagcgaacacctccactaccctctaagactgtttacttaaactgtggcccctctgggttcccttcttgtccttcaagcatggctcattaccagagactgtgatatttgaattgatgcagttccctctacagctacagga

SEQ ID NO: 2374 - DNA, 868 bp, Rattus norvegicus
cacgaggcccgtctcatctgmrsaggaaccaacaggtgctgccttgttaccaccatgccggaagttgagaggaaatctaagatcactgcctcccgtaaactcatgctgaagagcctgatgctagccaaggccaaggagtgctgggagcaggagcacgaggagcgagaggctgagaaggtgcgttacctctcggagcgcatccctacgctgcagacccgcggtctttccctcagcgcccttcaggacttatgccgagagctccatgccaaggtggaggtggtggatgaggagcgctatgatatcgaagccaaatgcctccacaacacgagagagatcaaggacctgaagctgaaggtgctggacctccgtgggaagttcaagcgyccacccytgcgccgggtccgtgtctcasccgacgccatgctccgagcchtactgggttccaaacacaaggtgtccatggatctgsgggccaacctcaagtytgtgargaargargacacmgaaaaggvgcgsccagkgraggtkssaracwsraggwagwmcrtggagsscayrwyykgcawgkmwgghmgmaagmagatgtthgatgytrccaagtccccaacctygcagtagaggtgsywmgagtgctmttcttggtgcccmtcagaatcytgggscactcmggagaagggaygggaggctgacycaaygtacagaaytyttaggagtcagctmtbttgggttcaagcvtamtgcagtgtyttcagacactgggcacagcatgcctgtgtcaggtcwdwtwytgctgdtgttgttccctcaymaataaaacytgggyktgtwwvwddramaamraawamaamaacaaaaaggttcgcggccg

SEQ ID NO: 2375 - DNA, 735 bp, Rattus norvegicus
ggcacgaggggcttgaccwcgmkcccagcactgctgcacagaatctaggctcagagcttgagatctcaagatgggagatgaggagaagcgcaacagggccatcacggcccggagacagcacctgaagagtgtgatgctccagatcgcggccacagagctggaraaagaggaaagccgccgcgaatycgrsamgcagractacctgtcagaacactgcccgcctctgcacatcccaggctccatgtctgaagtgsaggaactctgcaaacaactgcatgcgaagatcgatgcggctgaagaggagaaatatgacatggaggtgaagskgcasragagcagcaaggagctggaagacatgaaccagaagctatttgacytgaggggmaagttcaagagscccccactccggagggtgcgtatgtcagctgacsccatrctgaaggcgctgctgggctmtaagcacaaggtgtgcatggacctgagagccaacctgaagcaggtcaagaaggaagacactgagaaggagcgggacctgcgtgacgtgggtgactggaggaagaatattgaggagaagtctggcatggagggtcggaagaagatgtttgagtytgagtcctaamtgcctacttccccagtcccaccctaccattggggaagcacctaacatccagtctggagtacttggcctcactccaataaaggattcgcatcccwwmmwaaaaaaaaaaaaamaaa

SEQ ID NO: 2376 - DNA, 1501 bp, Rattus norvegicus
gtgaacgagaaggagggactcaggcctcaggagcactgaagatggaaaggctttgaaaaacaagcccttcagctgctctcgtggacagagttctgagactgcgagctctcgagacatctctgacgatttgagaagagcctgtgttgagccgacctcatcatggaactggacgactttgatcctgaagacaaagagatactgagctgggatattaacgacatgaagctgcctcagaatgtgaagaagactgactggttccaggagtggccagactcctacgtgaaacacatctacagctcagacgacaggagcgcacagcgccatctgagcagctgggccatgcgcaacaccaacaaccacaactcccggatcctcaagaagtcgtgcctgggggtagtggtgtgcagcagggactgttccacggaggaaggccgcaagatttacctgagacccgccatctgtgacaaagccaggcagaagcagcagaggaaaagctgtcccaactgcaatggacccctgaaactaattccctgcagaggccacggcggcttcccggtcaccaacttctggaggcatgacggacgcttcatctttttccagtccaaaggagagcacgatcatcccaggccggagaccaagctagaagcagaggcaagaagagccatgaagaaagtgcacatggcctctgcctccagctccttacggatgaaggggagaccagaaatgaagggtctcccaggtgaaatcccgagtcagggaagtttacctttaacttggtcattccaggaaggggtccaactgcccagcggttacagcacacctttaatagctaacgctccccagcagaactccctcaatgattgcctgtccttccccaagagctatgacttggggggaaccactgagctagaagatccaacttccaccttagatcccacgaagctctatgagagatataagttctccagcagtaaggtctacagcgctgaagaccagttccagcctcctgtccccggggtgtacggagattatgatgaagcacaaacctggaataaaaatgctgtcttagggagaagtcctactgacgacacctactatccaccctatcctctgcctgtggccagctggccctgtgactaccttccctcccagagctctttggagcactctccccaacaggttccactagagccacctgcagctcaacccggccatcatcccttgtggaccaatcccggaggtgagccttacgaagagaaagttcctgtggatttcagcagctatgtgccttctgtcacgtaccactcccctcagcaggacccctttctgctcgcttacggctctcatcctcagcagcagtacgcgctgcctggtaagagcaacaggtgggatttcgatgaagagatggcgtgcatgggcttggatcacttcaacaacgagatgctcctaaacctctgttctttaaaataactcatagcccgcttcctgctctccccatcat

SEQ ID NO: 2377 - DNA, 1862 bp, Rattus norvegicus
ccatccaaagcctggccttgcccctccctgagaccatggtgcttctctctgaaaatgcttcggaaggctccaactgcacccacccaccagctccggtgaacatttctaaggccattctgcttggggtgatcttggggggcctcatcattytcggagtyctggggaacattttagtgatcctctcagtggcctgtcatcggcatctgcactccgtgactcactactacattgtcrrcytggctgtggcagacctcctcctcacctccactgtgctgcccttctctgccatctttgagatcctgggctactgggcctttggcagggtgttctgcaatatctgggcggccgtggacgtcttatgctgcacagcgtccatcatgggcctctgcatcatctccatcgaccgatacattggtgtgagctacccgctgcgctatcccaccattgtcacccagaggaggggcgtcagggctctgctctgcgtctgggtgctttctttggtcatctccatcggacccctgttcggctggaggcagccggctccagaggatgagaccatctgccagatcaatgaggagccgggctacgtgctgttctcagcgctgggctctttctacgtgccactggccatcattctggttatgtactgtcgagtctacgtagtagccaagagagaaagccggggcctcaagtccggcctcaagacggacaagtcagactcagagcaagtgacgctccgcatccaccgtaaaaatgtccctgcagaaggcggcggagtcagcagtgccaagaataagactcacttctcagtgaggctgctcaagttttctcgagagaagaaagctgccaagacgctgggcatcgtggtgggttgcttcgtcctctgctggctgccgttcttcctagtgatgcccattgggtctttcttcccggatttcaagccttcggaaaccgtttttaaaatagtattttggctcgggtatctaaatagttgcatcaaccctatcatatacccatgctccagccaggagttcaagaaagcctttcagaatgtcctgcgaatccagtgtcttcgcagaaggcagtcttccaagcatgccctgggctataccctgcacccgcccagccaggctctagagggacagcacagagacatggtgcgtatcccggtgggctcgggagagactttctataagatctccaagacagatggagtctgtgaatggaagtttttctcttccatgccccagggatcggccaggattacagtgccaaaggaccaatctgcctgtaccacagcccgggtgagaagtaaaagctttttgcaggtctgctgctgtgtggggtcctcggccccgcgccctgaagaaaatcaccaagttccaaccattaagatccacaccatctccctcggtgaaaacggggaggaagtctagaggatgggaaaggtcacaggaaaagggagaacacttaggtactgctgattttcccactcggaaggccaggaccattcaacaggggaaaaggggagaaggaggatgccagtttatcaggcgagtgggtagagcacaagggaagaggcaggacgtagggtaactgaccgcttctaagtgatgagaggcccatttccctcagtcgttctctgatcctgctttccactactgaccctttcaacaagaaataccatgggaaagaaaatttcatacacaatccaaaagactataaatacaggatgatgatttcattgtgaatattttgagcacacactctaagtttggagctatttcttgatggaagggaggggattttattttcaggctgaacctactggcgactacatttgacatttatggagcgggccg

SEQ ID NO: 2378 - DNA, 2768 bp, Rattus norvegicus
ccccctcgagcacagccaacagtcaccaaagtcagccactggctgtcccggggcgcagacgccaaggccactcaggccagggcagggaccctggccggcctagccagtgctcagtcysatskccsmggmcggmcactgrgcmycaccatgggcggtttatactcagagtacctcaatcctgagaaggttcaggaacactacaattacaccaaggagacgctggacatgcaggagacgccctcccgcaaggtggcctccgccttcatcatcattttatgctgtgccatcgtggtggagaaccttctggtgctaatcgcagtggccaggaacagcaagttccactcagccatgtacctgttcctcggcaacctggcagcctccgacctgctggcaggcgtggccttcgtggccaacaccttgctctccggacctgtcaccctgtccttaactcccttgcagtggtttgcccgagagggttcagccttcatcacgctctctgcctcggtcttcagcctcctggccatygccatcgagagacaagtggccatcgccaaggtcaagctctacggcagtgacaaaagctgtcgaatgttgatgctcattggggcctcttggctgatatcgctgattctgggtggcttgcccatcctgggctggaattgtctggaccatctggaggcttgctccactgtgctgcccctctatgctaagcactatgtgctctgcgtggtcaccatcttctytgtcatcttactggctatcgkggccttgtacgtycgaatytacttcgtagtccgctcaagccatgcggacgttgctggtcctcagacgctggccctgctcaagacagtcaccatcgtactgggtgttttcatcatctgctggctgccggcttttagcatccttctcttagactctacctgtcccgtccgggcctgtcctgtccyctacaaagcccattatttctttgccttcgccaccctcaactctctgctcaaccctgtcatctatacatggcgtagcsgggaccttcggagggaggtactgaggcccctgctgtgctggcggcaggggaagggagcaacagggcgcagaggtgggaaccctggtcaccgactcctgcccctccgcagctccagctccctggagagaggcttgcatatgcctacrtcgccaacatttctggagggcaacacagtggkctrasgggaaatgtramctratctgtaaccaagccacagagagagctctgtggggagagaccaggtgacctcatcatgtccctcagtgccacaggtctggaggaactgaccacggctcataggtcaggtggccaacggaggcactgactaatcagattgtagtactgtgactgtggggaccattaagggtctagggggacagcaggctcgagtttagggctagacatttgccacttggtacatagggtgtcggcatcctgtctgtcctatcttccagcttcccggttcccttcctgcctcctccttttaagggcctctctacatagccccggctggctagagcttgctgtgcagaccaggctgacctggacctcccagagatagatcaactaactgtgtcctgagtgctgggattttaaagccgtgtgcccccacacccggctcctgccaccttccagaagcaatcttaggccacttgttgaggaaacactctccccagaggacccaagccttcttccctgtctctctgaggcctgaatccacagcttccccattttatcaactgctgcttcttccctttccttctgtgttcaggggaaaccactgtgggggcagggaggggtcctgggatcccagtttttatgctcagatctcactgagcacttgctttattggggagcagagaggaatcagctgaggcagtgtggggcagatgttgaggagaatttgggcttcctggtgagaaaactctaggggaggcgttggttattcctggaacccagcctctctccccacgaactcttcacacccgcagccttgagctggatgcaaaggctgctttcaatttgtctttgtagttttgttttgttttgttttgtttttttaaattgggacaggatctcacgtaccccaggctggcctccgactcactatgtagccaaggctggctttggactkckgmcsctccwrcmtcmgmwtstggagtgcaggtattacaagggtgtaccaccaccaccaccrccaccamcaacaacaacaacaacaacacctgtcktgaaaactatcatgaatgacatggttcacayrgcckwgggtgsccaaggacatcccggatactcwtatggcatcttccttgaaggrctttrctaaatcctgtggakargtakaaaatccaatacggtacaaacggtatttatgtgtgtctgtgyrkcarwgkggggtctgtgacctcmtatcccagtgtgggtgctgtctgacctcttatgtgcacatccgtgtcaagactgctagagakatgsacgggggtgtgtgtgcttgtgggggtctagccatgatcaggcctcctgggaattgctgaatcatctctcccacacacagacacacacctccgccttaaagaaatgtgtgaaagaaaaggctgaggaaggggagatttgggaggcaaggagccagtcgggagtgtgtctcccctcatacagcttcccagatgtcccccttgtgctggaaacccagaactgggccaataamcagttcaatttctcttgmaaamaaaaaaaaaaaaaaaaa

SEQ ID NO: 2379 - DNA, 1774 bp, Rattus norvegicus
gcttgtcaaagctcagaataacctgagaaccagacatcaggatgacaatggctctgcttgggaccctgcttctcctggcactctttggcagaagccaaggcaagaatgaagagctgagcctgtatcaccatctcttcgacaattatgacccagaatgccggccagttaggagacctgaggacactgtcaccatcaccctcaaggtcaccctaaccaacctcatctcactgaatgagaaagaagagactctgaccaccagtgtctggattggaattgaatggcaagactatcggctcaacttcagcaaggacgattttgcaggcgtagaaatcctgcgggtcccttccgaacatgtatggctgccagagattgttctggaaaacaatattgatgggcagtttggagtggcctacgactgcaatgttctggtctatgagggaggctctgtgagctggctgcccccagctatctaccgcagcacgtgcgcagtggaggtcacctatttcccctttgactggcagaactgctctctcatttttcgttcccagacctacaatgctgaagaggtggagttaatctttgcagtggatgacgatggcaatgccatcaacaaaattgacatcgacaccgcagcttttaccgagaatggagaatgggccattgactactgcccaggcatgattcgccattatgagggaggctccacagaagaccctggagaaactgacgtcatctacacgctcatcatccgtcgaaagccgcttttttacgtcattaacatcattgtgccttgtgtgctcatttctggcttggtgctactcgcttacttcctacctgcgcaggctggtggccagaaatgcacggtctctatcaacgtcctgctagcccagactgtcttcttgttcctaattgcccagaaaattccagagacttctctgagcgtgccgctgctgggcaggtatcttatttttgtcatggtggttgccacgctcattgtcatgaattgcgtcatcgtgctcaacgtatctttgcgaacgccaacgactcacgccacatcccctcggctgcgccagattttattagagctactgccgcgcctcctcggcttgagcccacccccagaggatcccggagctgcctcaccagcgaggcgtgcctcatctgtgggcattctgcttagagcggaggagctcatcttgaaaaagccgcggagcgaactcgyrykwgrgggacagaggcatcggcatggaacttggaccgcagccgccctctgccagaacctgrgtgmtgcagcccstgaagtccgmtgctgtgtggatgctgtgaactttrtggctgagagcacaagggaccasgaagccaytggagaggaactgtctgactggktgcgtatggggaaggccstygacaatgtctgtttttgggcagcgttggtgctcttcagcgtcggttctacgctmatcttccttggaggttacttcaaccaagttcctgatctcccmtacccaccgtgcatccaaccatgagcmtgcaccaggacccacctcatccccaccccccaagaaagagattttgaaaacaggctgmtgacaataaatctggtttgtgaacttgcamaaaaaaaaaaaaaaaaaaaaaaaaaaaaaaaaatctcgcggccgcaagcttattccctttagtgaggggttawttttagcttggcactggccgtcgttttacaacgtcgtgactgggaaaaccctggcgttacccaacttaatcgccttgcagcaca

SEQ ID NO: 2380 - DNA, 2539 bp, Rattus norvegicus
cccgggcggaaggtaccgccgcacggtgggcgctcctcaccgcttccccacacctcccagtcccactgcacctctaggctgcgcggagtcctctcggctattaccggctctttggagccgcctgtgccccctcagagcccgcgctctccacagtctcctcagagaaggaccccctcagagagcgcaccccgccccttcgcagtccgggcgcgcctcccgctccccgcggcccgcagcgtcccgccctccagagcccggctcgagcggcgagaggagaacgcggggctgccgcccgcgcacactcccgcgctctctctgggtttggctgccgccaggaggaggaggagcggagcgagcgcagaagtagctgctgctgctggtggtgacaatgtcaaataacggcttagacgtccaggacaaacccccagcccctccgatgagaaacaccagcactatgattggagctggcagcaaagaccctggaaccctaaaccacggttccaaacctctgcctccaaacccagaggagaagaaaaagaaggaccggttctatcgatccatcttagctggagataaaacaaataaaaagaaggagaaggagcggccagagatttctcttccttcagattttgagcatacaattcatgttggttttgatgctgtcacaggggagtttacggggatgccagaacagtgggcccgcttgcttcaaacatcaaatatcaccaagtcagagcagaagaaaaacccacaggctgttctggatgtgttggaattttataactccaagaagacctccaatagtcagaagtacatgagttttacagataagtcagctgaagattataattcttctaatactttgaatgtgaagactgtgtctgagaccccagcagtgccaccagtgtcagaagatgaagatgatgatgacgatgctaccccacctccagtgattgctccacgcccagaacacacaaaatctgtatatacacggtctgtgattgaaccacttcctgttactccaactcgggatgtggctacatctcctatttctcctactgagaataacaccactccgccagatgctttgacccggaatactgaaaagcagaagaagaagcctaaaatgtctgatgaggagatcttagagaaattacggagcatagtgagtgtgggcgatcctaagaagaagtacacacgcttcgagaagattggacaaggtgcttcaggcacagtgtacactgcaatggatgtagccacagggcaggaggtggccattaaacagatgaaccttcagcagcagccgaagaaagaactcattattaatgagatcctggtcatgagggaaaacaaaaacccaaacattgtgaactatctggacagttaccttgtgggagatgagctatgggttgtcatggaatacttggccggaggctccttaacagatgtggtgacagaaacctgtatggatgaaggccagatagcagctgtgtgccgagagtgtctacaagctttggagttcctgcattcaaaccaagtcattcacagagacatcaagagtgacaatattctgctgggaatggatggctctgtcaaattaactgactttggattctgtgcacagataactccagagcagagcaaaaggagcaccatggtgggaactccatattggatggcacctgaagttgtgacacgcaaggcctatggacccaaggttgacatctggtccctgggtattatggcaattgaaatgattgagggggagcccccatacctcaatgaaaaccctttgagagccttgtacctcattgctaccaatgggacgccagagcttcagaacccagagaagttgtcagctattttccgggactttttgaaccgctgtcttgagatggatgtggagaagagaggttcagctaaagagctactgcagcatcaattcctgaagattgccaagcctctctccagcctgactccactgmwygmkgcagcaaaagakgcaaccaagaacaatcactgaaaccacgctcaccccagcctcatgtgccaagccttctatgaaataaacactcgtttcgggaactccgacccctcatgtcctcttctcctttccttgcttctcccatttcctgatctagtgctctcaagactttgatccttggwaaccgtctagcactgaagagaaccgcaaccggatgactaatccagcagaggccatttctaaataggaattccctttakcttgtgggcatggaggggactgatgagcaagggtttacctgaataaacctgtttctacgaaacagaaatctcaaccatcccattccttacccctcacaatcagttcttaactctataaacttatggtttgatagcattatcaatttgctatcagttgaaattgctttygttttttatttctgtgaccaaattgcccaaacacttcattgtatttgaaaaccagaacagctttgaaatgccacggggcctgataatctgccwrggacatgaagaggtcttgtttccctgaacccac

SEQ ID NO: 2381 - DNA, 2489 bp, Rattus norvegicus
gccaacgccgcgatcgccgccaatcccgccagcctcgggccgggccatccgctgtgggcttagccacccagatgcagagccagtgccacagcctcttcagaggagcctctcaagcaaaacgaggagatggccaccaaggagaagcttcaatgtctgaaagacttccacaaagacatcctgaagccttctccagggaagagcccaggcacgcggcctgaggatgaggctgatgggaagccccctcagagggagaagtggtccagcaagatcgactttgtgctgtctgtggccggaggcttcgtgggtttgggcaatgtctggcgtttcccgtacctctgctacaaaaatggtggaggtgcattcctcataccgtattttattttcctgtttgggagcggcctgcctgtgtttttcctggaggtcatcataggccagtacacctcagaagggggcatcacctgctgggagaagatctgccccttgttctctggcattggctacgcgtccatcgtcatcgtgtccctcctgaatgtgtactacatcgtcatcctggcctgggccacatactacctattccagtctttccagaaggatcttccctgggcccactgcaaccatagctggaacacgccacagtgcatggaggacaccctgcgtaggaacgagagtcactgggtctcccttagcgccgccaacttcacttcgcctgtgatcgagttctgggagcgcaacgtgctcagcctgtcctccggaatcgaccacccaggcagtctgaaatgggacctcgcgctctgcctcctcttagtctggctcgtctgttttttctgcatctggaagggtgttcggtccacaggcaaggttgtctacttcactgctactttcccgtttgccatgcttctggtgctgctggtccgtggactgaccctgccaggtgctggtgaaggcatcaaattctacctgtaccctaacatcagccgccttgaggacccacaggtgtggatcgacgctggaactcagatattcttttcctacgctatctgcctgggggccatgacctcactgggaagctataacaagtacaagtataactcgtacagggactgtatgctgctgggatgcctgaacagtggtaccagttttgtgtctggcttcgcaattttttccatcctgggcttcatggcacaagagcaaggggtggacattgctgatgtggctgagtcaggtcctggcttggccttcattgcctacccaaaagctgtgaccatgatgccgctgcccaccttttggtccattctgttttttattatgctcctcttgcttggactggacagccagtttgttgaagtcgaaggacagatcacatccttggttgatctttacccgtccttcctaaggaagggttatcgtcgggaaatcttcattgccatcgtgtgcagcatcagctacctgctggggctgacgatggtgacggagggtggcatgtatgtgtttcaactctttgactactatgcagctagtggtgtatgccttttgtgggtcgcattctttgaatgttttgttattgcctggatatatggcggtgataacttatatgacggtattgaggacatgatcggctatcggcctggaccctggatgaagtacagctgggctgtcatcactccagctctctgtgttggatgtttcatcttctctctcgtcaagtatgtacccctgacctacaacaaagtctaccggtaccctgattgggcaatcgggctgggctggggcctggccctttcctccatggtgtgtatccccttggtcattgtcatcctcctctgccggacggagggaccgctccgcgtgagaatcaaatacctgataacccccagggagcccaaccgctgggctgtggagcgtgaaggggctacgccctttcactccagagcaaccctcatgaacggtgcactcatgaaacccagtcacgtcattgtggagaccatgatgtgaggtccgggctgtgtgaccggcgccgctttcctgccgtttactaaccttagattctcctaggaccaggtttacagagctttatatttgtactaggattttttttttaattgtcacagaaaatgttactctgtgtgtgtgtgtgtgtgtgtgtgtgtgtgtgtgtgtgtgtgtgtttcgtgtgtgtctgtatatgtgtattttgttttrtttgggggattattttgtacaaaaagaaaacccatgggcctatgtcctggggggagaggatggactttcatattgattttgatgtattttatgggaacttggtaaatttttctttgtatttttttaacatataactatatatagagtctgtcatacactttgccacttgaattggtcttgccagcaacggatctcgttttttgttttttgtttttttttcaaaagcaattcttcggtgcttacatagctggcagagagttctgcccaaaamcaaawraaaaaaaaaaaaa

SEQ ID NO: 2382 - DNA, 1302 bp, Rattus norvegicus
tgtcagtgctggaagcggcatgttggtcagccggcgactgacaggggcgcgagcccgggcacctctgcttgcgagtctcctcgaggcttggtgccgccagggcaggaccacctcctcctactccgctttctcggagccgtcgcatgtgcgggcgctggtctatggcaaccacggggatccagccaaggtcatccaactgaagaacctggagctcactgctgtggaaggatctgacgtccatgtgaagatgctggcagcccctatcaatccatctgacataaatatgatccaagggaactatggcctccttcccaagctgcctgctgttggagggaatgaaggtgttggacaggtgatagcagtgggcagcagtgtgtctggattgaagccaggagattgggtgatcccagcaaatgctggtttgggaacctggcggactgaggcggtgttcastgaggaagcgctgattggagtccctaaggacatccctctccagagtgctgccaccctaggtgtcaacccctgcacagcctacaggatgttggtggactttgaacagctacaaccaggggactctgtcatccagaatgcgtccaacagtggagtagggcaagcagtcattcagatcgcctcagcccttggcctaaagaccatcaacgtgatccgagacagacctgacatcaagaagctaactgacagactgaaggatctaggagctgattatgtcctcacagaggaggagmtaaggatgcccgagaccaaaaacatcttcaaggacctgccgctgccccgactggctctcaactgtgtckgtgggaagagttccacagagctgctccsgcacctagcgcccggaggaaccatggtgacctatggaggaatggccaagcagcctgtaacagcctctgtgagtatgctcatttttaaggacctcaaacttcgtggcttttggttgtcccagtggaagaagaaccatagtccagatgagttcaaggagctgattctcattctctgcaacctcatccgccaaggccagctcacagcccctgcctggtccgggattccactgcaggactaccagcaggctttggaagcctccatgaagccttttgtgtctttgaagcagattctcactatgtgattactccagaggaccaggaggaaagcaggagaggcaggccagcaagattggctggctgctggccctccatgaggactccagactgcctcaccctcactgcctcttcctaccaggagggtgggaggccaaccccagggtccctaataaaccctggacttccc

SEQ ID NO: 2383 - DNA, 5519 bp, Rattus norvegicus
ccccacaccaaggctccatcgggatggcctgtgcagcctgctccacacgagctatgtgcagctctgggtacatctgtctgcagtactccagcaccgctgcgggtccagaagacagcgtcgtgaacgctgtgggtctggttcccagcggccggtgcgcaggtctcggtgaagggtgagacgcccacatagtccagccacttgagccgaccccggagcctcggccgcgaacccaagatggcggtgtgtggacgtgtacggaggatgttccgcttgtcggcggcgttgcagctgctgctgctagtggcagcaggggtccagaatagccacggtcagggccagggtctgggggtcaactttgggcccttcgcagggcaagctggaggcggcaacccggtcgggcagcagccacctcagctgcctcagttatcgcagcagcagcagcagcagcagccgccgcctcagcagcagcagcctttcccggcgggcgggctcccggcccggcggggcggagcagggcccggtgggactggcggaggctggaagctggcggaggaagagtcctgcagagaggacgtgacccgtgtgtgccccaaacacacctggagcaacaacctggcggtgctcgagtgcctgcaggacgtgagggagcctgagaatgagatttcttcagactgcaatcatttgttgtggaattacaagctgaacctgactactgatcccaaatttgaatctgtggccagggaagtttgcaagtcaactatttcagagattaaagagtgtgctgaagaaccagttggaaaaggttacatggtttcctgcttggtggatcaccgaggcaacatcactgaataccagtgtcatcaatacattaccaaaatgacagccatcatttttagtgattatcgtttgatctgtggcttcatggatgactgcaaaaatgacatcaacctcttgaaatgtggcagcattcgccttggggaaaaggatgcacattcacaaggtgaggtggtatcatgtttggaaaaaggcctggtgaaagaggcagaagagaaagagcccaagattcaagtctcagaactctgcaagaaagccattcttagggtggctgagctgtcctcggatgactttcatttagaccggcatttgtattttgcttgcagagatgatcgggagcgcttttgtgagaatacacaagctggtgaaggaagagtgtataaatgcctttttaaccataaatttgaagaatccatgagtgaaaagtgtagagaagcactaactacacggcagaagctcattgcccaggattataaagtcagctattcattggccaagtcctgtaagagtgacttgaaaaaataccgatgtaatgtggaaaaccttcctcgctcccgagaggccaggctctcctaccttctgatgtgcctggagtcagccgtgcacagagggcgacaagtgagcagtgagtgccaaggtgagatgctggattaccgacgcatgctgatggaagacttctctctgagccccgagatcatcctgagctgtcgaggggagatcgaacaccactgttctggattacatcggaaaggacgcaccctccactgtctgatgaaagtagtccggggtgaaaaggggagccttggaatgaactgccagcaggcgcttcagacactgattcaggagactgaccctggcgcagactaccgcattgatcgagctttgaatgaagcttgtgaatctgtaatacagacagcctgcaaacatatacgatccggagacccaatgattctttcatgtctgatggaacatttatacacagagaaaatggtggaagactgtgaacaccgtctcttagagctacagtattttatctctcgggattggaagttggaccctgttttataccggaaatgccagggagatgcttcccgtctttgccacacccatggttggaatgagaccagtgaacttatgcctcccggagctgtgttttcttgcctgtatagacatgcctaccgcacagaagagcaaggacggaggctctcacgagaatgccgagctgaagtccagaggatcctacaccagcgtgccatggatgttaagctggatcctgccctccaggacaagtgcctgatagatctaggaaagtggtgcagtgagaagacagagactggtcaggagcttgagtgccttcaggaccatctggatgacttagctgtggaatgcagagacatagtgggcaacctcacggagttagagtctgaggacatacaaatagaagctttgctgatgagagcctgtgagcctataattcacaacttttgccacgatgtggcagacaaccagattgactctggggacctaatggagtgtctgatccagaacaagcaccagaaggacatgaatgagaagtgcgccattggcgtcactcacttccagctggtccaaatgaaggattttcgattctcttacaagttcaaaatggcctgcaaggaggatgtgttaaaactttgccccaacataaaaaagaaggtggatgtggtgatctgcctgagcaccaccgtgcgcaacgacactctgcaggaggccaaggagcaccgggtgtctctcaagtgccgcaagcagctccgtgtggaggagctggagatgacagaggacatccgtttggaaccagatctgtatgaagcctgcaagagtgacatcaagaactactgttctacagtgcaatatggaaatgctcagattattgaatgtctaaaagaaaacaagaagcaactgagtacccgttgtcaccagagagtatttaagctgcaggagacagagatgatggacccagaactagactatacactcatgagagtctgcaagcagatgattaagcggttctgtccagaagcagattctaaaactatgttacagtgtttgaaacaaaacaagaacagtgaattgatggaccccaagtgcaaacagatgatcaccaagcgtcagatcacccagaacacagattaccgtttaaaccccgtgctaaggaaggcctgtaaagctgacattcctaaattctgtcatggcatcctgaccaaggccaaggatgattcagagctagaaggccaagttatctcatgcctcaagctgagatacgctgaccagcgcctgtcttcagactgtgaggatcagatccgtatcatcacccaagagtctgcgctagattaccgcctagaccctcagctccagctgcactgctcagacgagattgctaatttatgtgctgaagaagcagcagcccaggaacagacaggccaagtgsamgagtgcctaaaggtcaacytgctcaagatcaggacagagctgtgtaaaaaggaagtgttgaacatgttgaaggaaagcaaagcagacatctttgtggatccagttcttcacacagcgtgtgccttggacattaaacaccactgtgcagccatcacccccggccgtgggcgtcagatgtcctgcctgatggaggccttggaagacaagcgcgtgaggttgcagcccgagtgcaaaaagcgcctgaatgaccgaatcgagatgtggagttatgcagccaaggtggcmcsagcggacggcttctctgatcttgccatgcaagtgatgacatccccatcaaagaattacatcctgtctgtgatcagcgggagcatctgcatattgttcctgattggcctgatgtgtggacggatcactaagaggstgacacgagagctgaaggacaggtagagctgccksaccmccagaggagcctcctgccaggcccgcccgcctgtacagccgtcctgtgtagtgtaccctctcacttcgcccttctaacggtggcaccagcacccacagtagagcagcatcaggtgcccactgcatcttcccatccagacttggccatgtcctcggtgtcctcctcctcccagctgcccttgcagcggcggcagctggctgctttggtggtagcttttgttggcgaaggtttacctgcctgtagacaattctgtcacaccaacagaactgctggtacttcagaaccgactcacctgacctgcaactcaaattttttttttaaaaamaraaaamaaaacaaaagmcaaaaaaaawwwwaaaaargaaaamrygwrkatagtagaacatctccttcagtcttgactcgagcagtaggattctttctttcacgtaaatgcagcaggtgtcagcagaacttggaggagacgcgcatatccggtgcctgatcatgaaatgtctatttcctctcctagaagcaacttggggccacagcaagtagtggggacggacactaagcagccgctctagggcctgttggcttctactgcattgtgatgccttctgccctctaccccagacaagccactgctccccacaatcccctgacaacaggcatttctgtgatcgccccagtgcagacatgagccttcttcctgggtctggcaatggactagggagggagcaaagtctgaagcagcccgagtgcacarccagcagggtcccagccaccatcttcctccaggatggacggagctgcctcgtctttatgaaccctgccaagtgtggggctgccctgggggttctgtacatcggcaagaagtagttacagtgctagggtgtggggcttctgaggtgagggtgagggtggcagggcaggaagggacaggtgtgggactcacttcacttagcttcctgagcaacagtacaggcaggaagtgatggcttctgaagatttggcgtggtctcgggtgtgtgactggcattgaagcctgactttctatccgtgccaggcagacttccctgacaagctcctttgtgcctctaaatgaagggatgtggaaaggggttgcattaaaagatggaggattttcttcgttcywwwwwwwwmmmmwwwmwgttcatttgctgcgtgtacccactctaataggcactggataaatgttctattttggtgacttgacaaccttccataatctgagagagcagtgtcccagccatcttccctcactcctccagtgtgaagatggtgacagtgctggggcctargagcgaggagcccaggcactgcagttccccttcggcgagtttgggccatggtgtcacagtggctgtacagagggtggcatgtacagtaggagatatatttatataatatatatttwattaacctgttagatgtccacagagtattataaatcatgtgcctaaaactgtccacacagacccaggccctctgcggtgccctccctgctcctgccttccatgtgcaccagagccatgcgcgtcttcctgaggtgttcgctgcaggctgtgtcagttgctccaagttactctgtctgacctgactacattcataggaatactgtggttttcttctctgctgccctttctggtggcagtgagttccagggctagcagtttgtcccctgcttgggtaatggaagtcaccatggggaactgcttgctaagctacctggcccctaagtcctgcggaattc

SEQ ID NO: 2384 - DNA, 3003 bp, Rattus norvegicus
caaaagctggagctccaccgcggtggcggccgctctagaactagtggatcccccgggctgcaggrattckgacasswkctttgcagagcagaagcaactgtgctcaaaatagawacyaymrttbmtyyyrytgyctwtywcwcctcgmksygamtccmacrgttaaacaagatgtgcaaaggactcgctggtctgccggcttcctgcctgaggagcgcaaaggatatgaaacatcggctgggatttctgctgcagaaatcagattcctgtgaacayagttcttcacacagcaagaaggacaaagtagtaacttgccagagggtgagccaagaagaagtcaagaaatgggctgaatcgctggaaaacctgrttaaccatgrwtgtggactggcagctttcaaagctttcctgaagtcagaatacagtgaggagaacattgacttctggwtcagctgtgaggagtacaagaaawtcaaatcaccttctaaactaagtcccaaggccaagaagatctacaatgagttcatctctgtgcaggcaacaaaagaggtgaacctggattcttgcaccagagaggagacaagccggaacatgttagagcccacgataacctgttttgatgaagcccagaagaagattttcaacctgatggaaaaggattcataccgtcgtttcctcaagtctcgattctatcttgacctgaccaatccttccagctgcggggcagagaagcagaaaggagccaagagywcwgsagactgcacttccctagtccctcagtgtgcctaattctcacacagaggcagagaaccgaaatgccaagactctatgctytggaaaacctgaggccaaatattgatctgtattargcatcaatgctttcwccacattgtarhvwarwrwmmawrmwgcmtgccgtgtgtgagtcacttccatgtaaaactagacttagctgtggtgtgggggwtttcattggggtaagacccaacttgttttcaattttcccaagtttccttaaagggtgtcaggtgagcaagtcyccaaataatggccmtgtaggtytggattttcaaagatggttagtagtccaccccttccaacagtttgacctcaagttagttggtacacttcatgtgatgtcacatgcacatgcaatgtcagccagcagcacttyhtacagamtwtcaacgtttaggtgatatttgygtatgtgtakgkatrtattaaatmtmtagwacrtdwrmwwawammwwmwrwawawawwawatctatgtattcagtatgtgtgaatgtgcatgaatatatatatatatgcatatatatatttgtatatgttcacacatgcacacacatttcttcaagaaaagatgggaaagatccttggtgctcaaattggagtgtgtacacatgcttgcatgcatgttctgacttcwsgwssttcatactgtgtctgaacagggcaaactaaattaactgccatgcaggctaagaaaggaacactaacttgtaaaaagtgagttccgtcaagccactgggtcttgatggagcwtagtcwsgrcmttygwgwktaatcycrtmamtgrmstycmcwttgagcactgagctatggggtgagtactccgaaaactctgctgtctgactgacacagagctgcctcgcaccggtgattactactagcacttttaagtccctatgctgttggccatccctcctttgcctgggtgctcagggcatgctgactagcarctgggttggtctggagatggatgtttgagaggaatsaaggaatgcggtccaggccttgttgcctagccctacaaatgactactgcttaggtgagggcagaagaccccgaggttatcttaattctttcctctcttgataaggtgctctcctattcctacccccaaagaacgtcacctgtcagatgagcctctttacttccccgtggttggttgctcacgttagkaaccatggccacctgcaagtcattctaagctacccgcttacatttttcaaaagcatcaccagggggaaaggttatgctgtcccaggaggaagtaagctcttatgagcyryrarsccctttttggttttctgctttgaggtaagagcttgttcatcccatyccaaacaccaaagttagcagagaccaacggwaggagagaggmargawaaaaaaaaarrawraraagmgaaamgaggaggacgggatatcagttggtaggactactgtttggagctttttaaggcacgtgaaatacttgraaatttctcatttgkgttatttatgttgktttgtacaatgtttttattwytktwttkttttataaatggrggtacaggrtattacccgawttattaatgaatgsccaagaagtaattttcttctcattcctctaaaagtcctgcctttgagagcgcacacagactcgtgcatactgcaggcacagctccagtttaaattccatgcatgagcaccattgtggctgcaaagtgaagacactcatagtgtgaatccaagtctcaccattattgaagaarkcagttttctamcagtactkktgtctctcttgacagkcttgcgtatwatatycccagagctyccccatyartggkcctaaytycyttttgtratacacaagyycacagycgtgtctgtataactctccggtcttgccctaawattatcatgactttgagattgtacctgtactcccagactgctgtctcacaaatasgtctgggaaaagtcattctgaatgagaagtaaattattttatgtaatacatmwwrarwrwrwmwwmagttgtatttgccatcgctctttggtctggcgagcctgcctgctgctggcccctgcaaaggacgctccttccagatgcatgtctgtttctgccatgtgctttataggcctcagcgctgatgcttccaatgaaacacatagatctgaatgataacaggaaataaatgcttcctmcaaamcaaaaaaaaaaaaaaaaa

SEQ ID NO: 2385 - DNA, 1906 bp, Rattus norvegicus
cctgcccgttaaataccgctccccgccgcactccgggctcacccagctcgtcgccactgtctccagacgtgcccgggaggmgrggmrttccccmygmsatrrsakcaaysgwsrgtgccaacaatatgcccaagcaggtggaagtgcgcatgcacgacagccacctcagctccgaggagccaaagcaccgaaacctgggcatgcgcatgtgcgacaagctggggaagaacctcctgctctcactgactgtgtttggtgtcatcctgggagcagtatgtggygggctgcttcgcttggcggctcccatccaccctgatgtggtcatgttgatagccttcccgggggacatcctcatgaggatgctgaagatgctcatcctccctctcatcatttccagtctcatcacagggctgtcagggctggatgctaaagccagcggccgcctaggcacgagagccatgrtatattacatgtccacgaccatcattgccgctgtgctgggggtcatcctggtgttggccatccaccctgggaatcccaaactcaagaagcagctggggcctgggaagaagaacgacgaggtgtccagcctggatgccttcctggatctcattagaaatctcttcccggagaacctggtacaagcctgtttccaacagattcagactgtgacaaagaaagttctggtggcacctccatccgaggaggscaatacaaccaaggcagtcatctccctgttgaatgagamcatgaatgaggcccctgaagaaactaagatcgttatcaagaagggcctggagttcaaggacgggatgaatgtcttaggtctgattggattctttattgctttcggcattgccatggggaagatgggtgtagcaggccaagctgatggtggagttcttcaacattctgaacgagattgtcatgaagttagtgatcatgatcatgtggtattccccgctggtatcgcctgcttgatctgtgggaagatcatcgccatcaaggacttagaagtggttgctaggcagctggggatgtacatgatcacagtgatcgtgggcctcatcattcatgggggcatctttctccccttgatttactttgtagtgaccagaaaaaacccattctccttttttgctggcattttccaagcctggatcactgccctgggaaccgcttccagtgctggaactttgcctgtcaccttccgttgcttggaagataatctagggattgacaagcgtgtgaccagattcgtcctcccagtcggagcaaccattaacatggatggtacagccctttacgaagccgtggcagccatcttcatagcccagatgaatggggtcatcctggatggaggtcagatagtgactgtaagccttacagcaactctggcgagcattggtgcagccagtattcccagcgccgggttggtcaccatgctcctcattctcacagctgtgggcctgccgacagaggacatcagtctgctggtggcagtggactggctgctggatagaatgagaacttcggtcaatgtagtgggcgattcttttggggctgggattgtctatcacctttccaagtccgagctggacaccattgactcccaacaccgaatgcacgaagacatcgaaatgaccaagacgcagtccrtttatgacgacacgaagaaccacagggaaagcaactctaatcagtgtgtctatgccgcacacaactctgtcgtaatagatgagtgcaaggtaactctggcggccaatggaaagtcagctgactgcagtgttgaggaagaaccttggaaacgtgaaaaataawgacccgattctcagccaattcttgaataactccccagcgtatcttatggtaaaagatgctctaaacaggcttcctttacaaaagg

SEQ ID NO: 2386 - DNA, 4224 bp, Rattus norvegicus
agttgcagtttgcaacctccgctgcggccgcagctacctattcgctggctgttcaggtggctttcgcttcgatgtcctcctaatcttggggcccccgggccagactcggsagggctcccttcaccatccgctggwatcatgagggckactgggastctgcakgtgctgtgcttccttctcarcctgkcccggggttccgagatgggcaactctcasgcagtgtgtcctgkgactctgaacggactgagtgtgaccggagatgcagacaaccagtaccagacgctgtacaaactgtatgaaaagtgtgaggtggtcatgggtaacctggagattgtgctcacaggacacaatgctgacctttccttcctgcaatggatccgagaagtgacaggctacgtcctcgtggccatgaatgaattctctgtgcttcccttgcctaacctccgagtggtccggggaacccaggtctacgatgggaagttcgccatctttgttatgttgaactacaacaccaactccagccatgctctgcgccagctcaagttcactcagctaacagagattctgtcagggggcgtttacattgaaaagaatgacaaactttgccacatggatacaattgactggagagacatcgtgagggttcgaggcgctgagatagtggtgaagaacaatggtgcgaactgtccaccctgtcaygaggtctgcaagggacggtgctggggtcctggaccggacgactgccagatattgaccaagacgatctgtgcccctcagtgtaacggtcgctgcttcgggcccaaccctaaccagtgctgtcacgatgagtgtgctgggggctgctctggacctcaggacacagattgctttgcctgccgacgcttcaatgacastsgkgcctgtgtgccccggtgtccagagcctcttgtgtacaacaagctaacgtttcagcttgaacccaacccccataccaagtatcagtatggaggagtctgcgttgccagttgtccccataactttgtggtggaccagacgttttgtgtcagggcttgtcctcctgacaagatggaagtagataagcacggactgaagatgtgtgagccttgcggagggctgtgccccaaagcctgtgaggggacaggctctggaagccgctaccagactgtggactcaagcaacattgatgggttcgtgaactgtaccaagatcctgggcaatctggacttcctcatcaccggcctcaacgttgacccctggcataagatacccgcactggacccggaaaagctcaatgttttcagaacagtccgggagatcacaggttacctaaacatccagtcctggccccctcacatgcacaacttcagtgttttttccaatctgacaaccatcgggggcagaagcctctacaaccggggcttctccttgttgatcatgaagaacttgaatgtcacatccctgggtttccggtccctgaaggaaatcagtgctgggcgtgtctacataagtgccaatcagcagctttgctaccaccactctctgaactggaccagactgcttcgggggccctcggaagagagacttgacatcaagtacgaccggcctctgggagaatgcttggcagagggcaaagtgtgtgatccactgtgttcctctgggggatgctggggcccagcccctggtcagtgcttgtcttgtcgaaactacagccgggaaggtgtctgtgtgactcactgcaacttcctgcaaggggaaccccgggagtttgttcatgaggctcaatgcttctcctgccatccagaatgcctacccatggagggcaccagcacatacaatggctcgggctctgacgcttgtgcacgatgtgctcattttcgtgacgggccccactgtgtgaacagctgcccccatggaatcctaggtgccaaaggtccaatctacaagtatccagatgctcagaatgagtgtcggccctgccacgagaactgcacccaagggtgtaatggaccagaactacaagactgtttaggccaagcagaggtgttgatgagcaaacctcatctggtaatagcggtgacggtgggactggccgtgatcctcatgattctgggaggctcttttctgtattggcgtggacgcaggattcagaacaaaagggctatgagacgctacttggagcggggtgagagcatcgagcctctggacccaagcgagaaggcaaacaaagtcttggctagaatcttcaaagagacagagctgaggaaacttaaagtgcttggctctggcgtctttggaactgtccacaaggggatttggattcctgagggtgaatccatcaagattccagtctgcattaaagtcatcgaggacaagagtgggcgccaaagttttcaagctgtgactgaccatatgctggccgttggcagcctggaccatgcccacattgtacggctgctaggactgtgcccagggtcatctctgcagcttgttactcagtacttgcccctgggctccctccttgatcatgtgaaacagcaccgtgagacattgggaccacagctgctgctcaactggggagtacaaattgccaagggcatgtattacctcgaggaacatagcatggtgcacagggaccttgcgctccggaacgtgatgctcaagtcaccaagtcaggtccaggtggcagattttggtgtggctgacttgctgccaccagatgacaagcagttgctacatagtgaggccaagactccaattaagtggatggcccttgagagtatccactttgggaaatacacacaccagagtgatgtctggagttatggtgtaacagtttgggagttgatgaccttcggggcagagccctatgcagggttacgactggctgaaataccagacctkctagagaagggrgagcggttrgcacagccccagatctgcaccattgacgtctacatggtcatggtcaagtgctggatgattgatgagaatattcgcccaacctttaaagaactagccaatgagtttaccaggatggcccgtgacccaccaaggtatctggtcatcaagagagcgagtgggcctggaacacctcctgcggcagaaccctctgttctgaccaccaaagagttgcaggaggcagagctggagccagaactggacctagacctagacttggaggcagaggaggagggcctggccacctccctgggttctgctcycagcttgcctacgggaacgctcacccggccacgtgggagccagagccttttaagtccctcatctgggtacatgcccatgaaccagagcagtctcggagaggcttgtctggattctgcggttttggggggtcgtgaacagttctcccgtcccatctctctgcacccaattccacgggggcgtccagcatcagagtcatcagagggscayrtgacaggctctgaggctgaactccaagagaaagtgtcagtgtgtaggagccgaagccggagtcggagcccgcggcctcgtggggacagtgcctaccattcgcagcgacacagcctgcttactcctgtgaccccgctctccccaccagggttagaggaggaggacggcaatggctacgtcatgccagatacacacctcagaggtgcgtcctcctcccgggaaggcaccctctcgtcggtaggtctcagttctgtgttgggtactgaggaggaagatgaagatgaggagtatgaatacatgaaccggaagagaaggggtagccctcctcggccccccaggcctggctccctggaagaactgggttacgagtacatggatgtgggttcagacctcagtgcttctctgggcaskasrcagagctgcccgctccatcccatggscatcgtgccctctgctggcacaactccagatgaagactatgagtacatgaaccggasgcgtggtgcgggtggcgccggaggggactatgcagctatgggggcctgcccagcagctgagcaagggtacgaggagatgcgagctttccaggggcctggacatcacgccccccatgttcgttatgcccgcctcaaaactctgcgtagtttakaagccaccgactctgccttcgacaaccccgattactggcacagcaggcttttccccaaggctaatgcccagagaacgtaaacttctgctccgtgacgctctgcgggcgtgtggcggcagctagtgcctcttcgagggtacccaatg

SEQ ID NO: 2387 - DNA, 1715 bp, Rattus norvegicus
ttaaaatcaggctctttttgtcttttaattgccgtctcgagacccaactccgatgtgttccgttaccagcgaccggcagcctgccatcgcagcccctgtctgggtggggatcggagacaagtcccctgcagcaacagcaggcaaggttatataggaagagaaagagccaggcagcgccagagggaacgaacgagccgagcgaggaagggagagccgagcgcaaggaggagcgcacacgcacacacccgcgcgtaccagctcgcgcacagaccggcgcggggacggctcgcaagtcctcaggttccgcggacgagatgctgctgctgctggccagatgttttctggtggcccttgcttcctcgctgctggtgtgccccggactggcctgtgggcccggcagggggtttggaaagaggcagcaccccaaaaagctgacccctttagcctacaagcagtttatccccaacgtagccgagaagaccctaggggccagcggccgatatgaagggaagatcacaagaaactccgaacgatttaaggaactcacccccaattacaaccccgacatcatatttaaggatgaggaaaacactggagcagaccggctgatgactcagaggtgcaaagacaagttaaatgccttggccatctccgtgatgaaccagtggcctggagtgaagcttcgagtgactgagggctgggatgaggacggccatcattcagaggagtctctacactatgagggtcgagcagtggacatcaccacgtctgacagggaccgcagcaagtatggcatgctggctcgcctggctgtggaggcwggmttcgactgggtctactatgaatccaaagctcrcatccactgctctgtgaaagcagagaactccgtggcggccaaatctgrcggctgcttcccgggatcagccacagtgcacctggagcagggtggcaccaagttagtgaaggatctaagtcccggggaccgcgtgctggcggctgacgaccagggccggctgctgtacagcgacttcctcaccttcctggaccgcgacgaaggtgccaagaaggtcttctacgtgatcgagacgcgggagccgcgggagcgtctgctgctcactgccgcgcacctgctcttcgtggcgccgcacaacgactccgggcccactccgggaccgagcccactcttcgccagccgcgtgcgtccggggcagcgcgtgtacgtggtggctgaacgcggcggggaccgccggctgctgcccgccgcggtgcacagcgtaacgctacgagaggaggcggcgggtgcgtacgcgccgctcacggcggacggcaccattctcatcaaccgggtgctcgcctcgtgctacgcagtcatcgaggagcacagctgggcacaccgggccttcgcgcccttccgcctggcgcacgcgctgctggccgcgctggcacccgcccgcacggacggcgggggcgggggcagcatccctgccccgcaatctgtagcggaagcgaggggcgcagggccgcctgcgggcatccactggtactcgcagctgctgtaccacattggcacctggctgttggacagcgagaccctgcatcccttgggaatggcagtcaagtccagctgaagtccgacgggaccgggcagggggcgtgggggcgggcggggcgggaagcgactgccagataagcaaccgggaaagcgcacggaagga

SEQ ID NO: 2388 - DNA, 2249 bp, Rattus norvegicus
gctccagcagaccctgaaagctgagctgtccagacccccgaagtgaagaaaagaggcgagggcaagggagggccagaaccgagggagagagaaaggaggggcagcccaccagcccgctgtcctgccacagaaccggctcagctccagctccaggagtcactcagctgcagaggcagtggcagccccactcctcaggcaaagggcagcagacagacagacagaggtcctaggactggaggtcctcagtcattgaccactcagcctggcccagccccatggccttcaatgacctcctgaaacaggtggggggcgtcggacgcttccagttgatccaggtcaccatggtggttgctcccctactgctgatggcttcccacaacaccttgcagaacttcactgccgctatcccccctcatcactgccgcccacctgccaatgccaatctcagcaaagatggaggtctggaggcctggctgcccctggacaagcaaggacaacccgaatcgtgcctccgctttacttccccccagtggggaccaccyttttacaatggcacagaagccaatggcaccagagtcacagagccytgcattgatggctgggtctatgacaacagcaccttcccttcaaccatcgtgactgagtggaaccttgtgtgctctcatcgggctttccgccagctggcccagtccctgtacatggtgggagtgctgctgggagccatggtgtttggctacctggcggacaggctgggccgccggaaggtgctgatcttgaactacctgcagacagctgtgtcgggaacctgtgcagcctatgcacccaactatactgtctactgcgttttccggctcctctcgggcatgtctttggctagcattgcaatcaactgcatgacactaaatgtggaatggatgcctatccacacccgtgcctatgtgggcaccttgattggctatgtctacagcctgggccagttcctcctggctggcatcgcctatgctgtgccccactggcgccacctgcagcttgtggtctctgtgccttttttcattgccttcatctactcttggttcttcattgagtcagcccgctggtactcctcctcaggaaggctggacctcaccctccgagccctgcagagagtggcccggatcaatgggaaacaagaagaaggggctaagctaagtatagaggtgctccggaccagcctgcagaaggaactgactctaagcaaaggccaagcctcagccatggagctgctgcgctgccccacccttcgacacctcttcctctgtctctccatgctgtggtttgccactagctttgcctactacgggctggtcatggacctgcagggctttggggtcagcatgtaccttatccaggtgattttcggtgccgtggacctgcctgccaagtttgtatgcttcctagtcatcaactccatggggcgccggcctgcacagatggcctccctgctgcygrsrggcatctgcatcctggtgaatggcataataccgaagagccatacgatcattcgcacctccctggctgtgctagggaagggctgcctggcttcctctttcaactgcatcttcctgtacaccggagagctgtaccccacagtgattcggcagacaggcctgggcatgggcagcaccatggcccgggtgggcagcatyrygagsccgctggtgagyatgactgcagagttctacccctccatgcctctcttcatcttcggcgctgtccctgtggtcgccagtgctgtcactgccctgctgccagagaccttgggccagccgctgccagatacagtgcaggayctgaagagcaggagcagaggaaagcagaatcaacagcagcaggaacagcagaagcagatgatsccgctccaggcctcaacacaagagaagaatggactttgagaacggaagggcttcacacagcactaaagggagtggrgttmtacaggtcctgccgtctacatgaggagggggagtgagtwkagggactggrccatccaaatgtggaggctgccattcagagaaatccctccccaaaggtcatgtcagtagacccactaggaacaaaagctctgactatgtgcagcttcttaagcagaatgttctcgtcaccggccatcttcctgctcatggtcactccgccacctccaggaccttgcaaagaatctcagacaattaaatgaatctcttctaaaaaaaaaaaaaaaaaaaaaaaaaaaa

SEQ ID NO: 2389 - DNA, 4402 bp, Rattus norvegicus
ggcacgagggggagccgggcatgggggccgccctccgggggggccggggccgccgccgccgccgccgcggcagcgactgaagccgcgcaacaaggaggggcggggagtggtcgccgccgtccccgggaggcgccggagctcgactgcactcgctgccagccagccgtcccgagccgctcgcagattccctgagaacacccggcaagyascrmgtgcctacaactgcttccccggtcacagctgtggggagcttggggtgcggcagacaaatttctgtattcagctgcccaggcagaggagaatgggggctccacagcttgaagaatgaagacacgacagaataaagactcgatgtcaatgaggagtggacggaagaaagaggcccccgggccccgggaagagctgagatcgaggggccgggcctcccctggaggggtcagcacgtccagcagtgatggcaaagccgagaaatccaggcagacagccaagaaggcccgagtagaggagacctctaccccaaaagccaacaagcagggccggagcgaggagatctcagagagtgagagcgaagagaccagtgcgcccaaaaagaccaagaccgaggagcttccgcgcccacagtctccctcggatctggacagcttagatggccgcagcatcaatgatgacggcagcagtgaccctagagatatagaccaggacaaccgaagcacatcccccagcatctacagccctggcagtgtggaaaatgactcggattcatcctctggcctgtcccagggcccggctcgcccctaccacccacctccactctttcctccttcccctccaccaccagacagcatyccccgacagccagagtctggctttgaaccgcacccttctgtgccgcctactggatatcatgctccaatggagccccccacatctcggttattccagggcccacctcctggagctcctcccccacacccacagctctaccctgggagtgctggtggaggtgttttatctggaccccccatgggtcccaaagggggagcagccgcctcctcagtgggtccccctagtgggggcaagcagcaccccccacccactaccccaattccaatatcaagctctggggccagtggcgctcctccagcaaagccccccaatactccagtgggtgctgggaacttaccttctgctccaccaccagctactttcccccacgtgacaccaaacctgcctcctccacctgccctgagacccctcaacaatgcctcagcctctcctcctggcatgggggctcagccaatccctgggcatctgccctctccccatgccatggggcagggtatgagtggacttcctcctggcccagagaagggcccaaccctggccccctctccccaccctttacccccggcttcttcctccgctcctgggcccccaatgcggtacccgtattcatcctgctccagtagctctgttgcagcgtcttctagttcctccgccgccacctcccagtacccagcttcccagaccctgcccagttaccctcactccttccccccaccaacaagtatgtctgtctctaatcagccacccaagtacacccagccttctctcccatcccaggctgtgtggagccagggcccacctcctcctcctcctccttatggccgcctcttgcccaacaacarcactcatccgggccctttccctcctaccgggggtcaatccacagcccacccgccagcccctgcacatcaccatcaccagcagcagcagcagccacagccacagccacagccgcaacaacatcatcatggaaactctgggccccctccacctggggcatatcctcaccccctagagagcagtaactcccaccatgcacacccttacaacatgtcaccctccctggggtctttgaggccctacccaccagggccagcacacctgcctccgtctcatggccaggtgtcttatagccaagcaggtcccaatggtcccccggtttcttcttcttccaactcttccgggtcttcgtctcaagccgcctattcatgctcacacccttcttcatcccagggcccccaaggggcatcctaccccttmccaccagttcctccaatcaccacctcctcagctactctttccactgtcatcgccaccgtggcttcctcgccagcaggttataagacagcctcaccacctggcccccctcagtacagcaagagagccccatccccagggtcctacaagacagccaccccgcctggatacaagccagggtcaccaccgtccttcagaacagggaccccacctggctatcgaggcacctctccgccagcaggcccagggaccttcaagccaggttcacccaccgtggggccggggcscctaccacccgcggggccttcaagtttgtcatctctgcctccaccacccgcggccccgactacagggccgcccctgactgccaygcagatcaaacaggaaccagctgaagagtatgaaacccccgagagtccggtgcctccggyycgcagcccctcgccccctcmtaaggtggtggacgtgcctagccatgccagccagtcagccaggttcaataagcacctggacygtggcttcaactcgtgcgcgcgcagcgacctgtactttgtsccgctggagggatccaagctggccaagaagcgcgcggacctggtggagaaagtgcggcgcgagsccgagcagcgcgcgcgcgaagaaaaagagcgcgagcgcgagcgggaacgtgagaaggagcgcgagcgcgagaaagagcgcgagctggagcgcagtgtgaaattggcccaggagggccgtgctccagtggagtgcccgtccctgggtccagtgccccatcggcctccctttgaacctggcagcgctgtggctaccgtgcccccttacctgggtcctgatactccagccctgcgcactmtcagtgaatacgcccgacctcatgtcatgtctcctggcaatcgcaaccacccattctatgtgcccywggrrrmarwrrammmrrrrmttctgggttacaatgtcccagccctgtacagcagcgacccagctgcccgagaacgggagcgggaagcccgtgaacgtgacctccgtgaccggctcaagcctggctttgaggtgaaacctagtgagctggaacccctacatggggtccccgggccaggcctggatcccttcccccgacacgggggcctggctctacaacctgggccacctggcctgcatcctttcccttttcatccgagcctggggcccctggaacgagaacggctagcgctggcagctgggccagccctgcgtcctgacatgtcttatgctgagcggttggcagctgaaaggcagcatgcagaaagggtggcagccctgggcaatgacccactagcccggctgcagatgctcaacgtgactccccatcatcaccassaskcccacatccactctcacctacacctgcaccagcaggatgccatccatgcggcctccgcctcggtgcaccctctcattgaccccctggcctcagggtctcaccttacccggatcccctacccagctgggaccctccctaatccccttcttcctcaccctctgcacgagaacgaagttcttcgtcaccagctctttgctgccccttaccgggacctaccggcctctctatctgcgccaatgtcagccgcccatcagctgcaggccatgcacgcacagtcagccgagctgcagcgcttggcactggaacagcaacagtggctgcacgctcatcacccattgcacagcgtgccgctgcctgcccaggaggactactacagtcacctgaagaaggagagtgacaagccgctgtagaacctgccatccagacagcacccactgctcsttcatccagaccttggaggaccaccccsgaccttttgaccccatcccacccccaagccgaggacagggtgctgcccacttgcagagcttctgcagccgggcagagggagggagggaagaagggacagacaaggtcagggcccggggaagtggcaagggtggggacagaaagtggacagtatcttggaccaggtccctcctcccatcccctgcttttcttctgtatgcccaatccttggtggccactgctcctcccctaacccgttggtgtgatttttttcatctgttagatgtggctgttttgcgtagcattgtgtgctgcccctgccccatccctgtgtgtgcaccccctcggcgatatgtgccccttgcccgtcccacattaataakttatatwtataaawawmwmwawdawrmtctttaaaaacatcstgaccaaaacatcccaacaaaaacatcctcacggtgccccarrraaaaaaaaaaaaaaaaaaaa

SEQ ID NO: 2390 - DNA, 4381 bp, Rattus norvegicus
agcgcccggaacggggagggcgcggggtcggcgagcgccagcggcctcccggcagcccggggctatgaggaaggacgagcgcgagcgggacacgccagccatgaggtccccgccgccgccgccgccgccggccacggccacggccgcctcgccccccgagagcctgcgcaacggctacgtgaagagctgcgtgagcccgctgcggcaggaccctccgcgcagcttcttcttccacctctgccgcttctgcaacgtggagccgccggcggcctcgctccgcgccggggcacgcctctcgctcgccgctctggccgcctttgtcctggccgcgctgctgggcgcggggcccgagcgctgggcggccgcggcgaccgggcttcggacgctgctgagcgcttgctcgctcagcctcagcccgctcttcagcatcgcctgtgccttcttcttcctcacctgcttcctgacgcgcgcgcagcgcggsccggaccgcggcgccggctcctggtggctgctggcgctgcctgcctgctgctacctgggcgacttcgcggcgtggcagtggtggtcgtggctgcgcggggagccggcggcggcggckgccggccggctctgcctggtgctgmgctgcgtggggctgctgacgctcgcgcctcgcgtgaggctgcggcacggagtcctggtgctgctcttcgccggcctggtgtggtgggtgtccttctccggcctcggggctctgccgcccgcgctcaggcctctgctgtcgtgcctggtcgggggcgcgggatgcctgctagccctgggcttggaccacttctttcacgtccggggagcctcacctcccccgcgctcggcgagtaccgcggatgaaaaagtgcctgtgatcagaccccggaggaggtccagctgcgtgtcgctgggagaaagcgcggccggttactatggcagtggcaagatgttcaggagaccgtcgttgccttgtatttctcgagaacagatgattctctgggactgggacttgaagcagtggtgtaaacctcattaccagaattctggaggtggaaatggagttgatctttcagtgctaaatgaagctcgcaatatggtgtcagaccttctgattgacccaagccttcccccacaagtcatttcttctttgcggagtatcagtagcttgatgggtgctttctcaggttcctgtaggccaaagattaattctttcacaccatttcctggattttatccctgttctgaagtagaagatccagtagagaaaggcgatcgaaaacttcacaaggggttgagtagcaaacccagtttcccgactgcacagctgaggaggagctcaggagcgtcaggattgctgaccagtgagcaccactcacggtgggatcgcagcggtggcaaaaggccttaccaagaactcagtgtttcaagtcatggatgccacctaaatgggccttttagttcaaatcttatgacaattccaaagcagaggtcatcatctgtgtcgctgacgcaccatgcaggtctgagaagagctggtgctttgcccagccccagtcttctgaattcttcaagccatgtacccgtgtctgctggctgtctaactaatcgatcacccgtaggatttcttgataccagtgattttcttactaagccaagtgttactttacatagatcactgggcagtgtatccagtgcagcagatttccatcagtaccttaggaactctgacagcagtctgtgtagcagctgtggacaccaaatactcaagtatgtttcgacatgtgaacctgatggtacagaccaccacaatgaaaaatcaggtgaagaagacagcactgttttctcaaaagaacgattgaacattgtggaaactcaagaagaagagacagtgaaggaagactgcagggaattatttttggaaggtgatgatcacctaatggaagaggcccagcaaccgaatattgaccaggaagtgttattggacccgatgttagtggaagattatgattcattaatagaaaagatgagcaactggaactttcagatttttgagcttgtagaaaaaatgggagaaaaatcaggaaggattctcagtcaggttatgtatactttatttcaagatactggtttattggaaacatttaaaattcccactcaagaatttatgaattattttcgtgcactagaaaatggctaccgagatattccatatcacaatcgtgtgcatgccacagatgtcctacatgctgtttggtatttgacaacacgaccaattcctggcttacagcagctccataataaccatgaaacagaaaccaaagcagattcagatgctagacttagttctggacagattgcttacctttcttcgaagagttgctgtattccagataagagttatggctgcctgtcttcaaacattcctgcgttagaactgatggctttatatgtggcagctgccatgcacgattatgatcacccaggaagaacaaatgcattcctagtggctacaaatgcacctcaggcagttttatacaatgacagatctgttctagaaaatcatcatgccgcatcagcgtggaatctgtatctttctcgcccagaatacaacttcctccttaaccttgatcacatggaattcaagcgttttcgatttttagtcatagaagcaatccttgctacagatctcaaaaaacattttgatttccttgctgaattcaatgccaaggccaatgatgtaaatagtaacggtatagaatggagcagtgaaaacgatcgactcttagtctgccaggtgtgcatcaaattagcagacatcaacggcccagcaaaagatcgggatcttcatttgagatggacagaaggcattgtgaatgagttttatgagcagggagatgaagaagcaaccctgggtctacctattagtcccttcatggatcgttcttctcctcaactagcaaaactccaagagtcatttatcacccacattgtgggccccctgtgcaactcctatgatgctgctggcttgctgcctggtcagtggatagaagcagaagagggtgacgatacagaaagtgatgatgatgatgatgatgatgatgatgatgatgatgatgatgatgaagagttagattcagatgatgaagaaacagaagacaatctaaatcctaaaccacaaagaaggaaaggcaggcggcgaatattttgccaactaatgcaccacctcactgaaaaccacaagatctggaaggaaatcatagaagaggaagaaaaatgtaaagctgaggggaacaaactgcaggtggataatgcctccttacctcaggcagatgagattcaggtcattgaagaagcagatgaagaggaagaacaaatgtttgaatgagaagaaaactcatgctgaagaagcctggggtgctcttcccagggtcgttacctagtgctcaccgtactgattctcaactgaccattcccatgtggacaggccttaatactgtgaggggatccttgctaccttggtagttctcactcctaagcactttgattacagactagagactgaccttagagctttctgcagttgagtgatgctgcagagccttctccaagccttcactggtgtgtaaatagtgtgtcataatgctgctttgctgggtagtgagctctcgtttgtcatggtgagggagggaggtagggagggagggagggatggagggatggagggaaggagggagggctaacacagaaaagtcaagtgaccttggttttcaaagtgaccataattcttttatgaaaacaggatacctcgggtatttccaaatatatcttctatgtctttgtttgggggtgggatggggccagaaacaaacttctatgcttaatccaaaaaggaattyaysasggcctttctgagtgatttctgctcgtggcagtacactgttccatgtggttctcctagcttcatccgtgaaggactgaggacctttgttatacttaacaaaacccagatgcatcaatttctgatgctttttactgttgtgtataatctacttaagtgttttatttctgccgaaagtattcaggtttgctgtggacatcaggagtctgaattctgttcttactgattttgttccatggttgaattttaaaagtgtttaacaatgaaggaactttattctttagtcaaaactgttatttttattcttgctcaggatacataattttaaacattaattattataaacgtggcatagatttgccagaaaaaaaacattgtcctaatattgatgttaccttttatgaaatgagcaccattttcttttaattaaagccaagaaaarggarawramwawmwwwwrmcttagtggaaaatcaa

SEQ ID NO: 2391 - DNA, 4403 bp, Rattus norvegicus
cttcaggagtacgaagaccctgcctacgaaggaactcagctctgtgttcctgccagctcccccgccagcttcacttgccaccaacgctgccacaactgctgccaccaccgctgccacctctgcgatgctcttccgagctgtgctgctctgcgctgccctggcgctcagccatgcagcaaatccttgctgttccaacccatgtcaaaaccgtggtgaatgtatgagcataggatttgaccaatataaatgtgactgtacccggactggattctacggtgaaaactgtactacgcctgagwttctgacaagaatcaaattacygctgaagcccaccccaaacacagtacactacatcctgacccacttcaagggagtctggaacattgtgaacaacatycccttccttcggaattcaatcatgagatacgtgttgacgtccagatcacatttgattgacagcccaccaacttacaatgtgcactacggttacaaaagttgggaagctttctccaacctctcctactacaccagggcccttcctcctgtggctgatgactgcccaactcccatgggtgtgaaaggaaataaggaacttcctgattcaaaagaagttctggaaaaggttcttctgaggagagagttcatcccggatccccaaggcacaaatatgatgttcgcattctttgcccagcacttcactcatcagtttttcaagacagatcagaagcgaggacctgggttcacccgaggactgggccatggagtggacttaaatcatgtttacggtgaaactctagacagacaacataaacttcgacttttccaggatggaaaattgaaatatcaggtcatcggtggagaggtgtatcctcccacagtcaaagacactcaggtagacatgatctaccctccccacgtccctgagcacctgcggttcgctgtggggcaggaagtctttggtctggtgccgggtctgatgatgtatgctaccatctggcttcgggagcacaacagagtgtgtgatatwctcaaacaggagcatcctgagtgggatgacgagcgactgttccaaaccagcaggctcatactgataggagagacgatcaagatagtgatcgaagactacgtgcaacacctgagsggttaccacttcmaactcaagttcgacccagasctgcttttcaaccagcagttccagtatcagaaccgcattgcctctgaattcaasacactctatcactggcatccgctgctgccggacaccttcaacattgaagaccaggagtacactttcaaacagtttctctacaacaactccatcctccttgaacacggacttgctcactttgttgagtcattcaccagacagattgctggccgggttgctgggggaaggaatgttccaatcgctgtacaagcagtggcaaaggcctccattgaccagagcagagagatgaaataccagtctctcaatgagtaccgcaaacgcttctccctgaaaccttacacatcgtttgaagaacttacaggagagaaagaaatggctgcagagttgaaagccctctaccatgacatcgatgccatggaactgtatcccgccctgctggtggaaaagcctcgtccagatgctatctttggggagaccatggtagaacttggagctccattctccttgaaaggccttatgggtaatcccatctgttctcctcaatactggaaacctagcaccttcggaggagaagtgggktttaggatcatcaacactgcctcaattcagtctctcatctgcaataatgtgaaagggtgtcccttygcctctttcaatgtgcaagacccgcagsctaccaagacagccaccatcaacgcaagtgcctcccactccagactagatgacattaaccctacagtactaatcaaaaggcgttcaactgagctgtaaragtmwactgaccatatttatttatttatatgaacaatttaatttaattatttaatattatacagaatgcttttttttcacttaacatcttctataacagaaggcaatattcttgaacaatgttccatttgtgaagattcctgtgttgtacttttaaatatggttatccgaaagtgaaagggaaaaaaaagaacactttcatttttcggcataagccagtgagaagggaaatgaattttgatatctttatacttgaatgtcagctcatgactagccttaattaagaacaaatgaaaggtgtatgaatatttaaatgctgttacaaggagggaaatgtgaatatttaaatgctgttacaaggagggaaatgctgcattgttggttatgactgtgtcatccttactatgttaggagcaaccgatgtggaattgtttttaaatcttgcatatctttatctcatcaaagcaaaggggtacaagtccagttttaaatgaacatgaaggcagataccggcaactgtctttttattttttaaaagcaatctttgaaacaaatgatttgcaatgtctaaatcgggagttggaatcactttcgaaagcccttactttcttgagctgtcaaatttgtacccacacagattaagcagctaccataaacacaaatctaaaactggggaaaactattatgactgatggttaagataccatgtcagggatctttcttttctcaggagtagtgaaaagctactatgacaatcagaccttccttgtacgtcagattgctggcgtaggaaggtggcggagcccgtgatgttctgtcctaaacgatggaaaagctttaaagcttgtgtgtgagtggtagccagcaaaacctatcatagcaacaaaagagtccacaaacaaaataaccaagaacaaagaagggttcccaagcttaaagaccgcatcgagggttaaactttttggaagggagacttttcagatcctcctgtgggtgcttggcttgtgactttggcaggctggattttaaagagtttttctgttgcacagtatgacacaacagcccatctctcaatgcaaaaggtatcagtgggcttcttcaaaactttgaaatgtcttccagctcacggtaccagaagtgcagtaggccccatgcaatgtgtgagttcagcctggatgccagcatgatgctctccttactctgtttcttgtagtcattttgctctgagaaactgctgattgatctgtttttgtagctgtgttccaggctcttagtattctttctttaacctccattaatattttctctacttgaagttttacattcaggaaaaacctcagctcaggactactgtgtagctccccttcggaggaagaagttactttagacaaaagggaaaaaaaattaaatgtatttttcatttgtaattaaatggaagggccctaccaagattctagaattggagggggttctgacaagaaagttacattcttgtcctgaagaattgctttcttatttaaaaacagagtcagttagtgggtagttctgggcaatagaaataaatataaaacaataatgacaatcattctctacatctcattatcagctsasgwrstgtatattactgaatttactgaagatagttatgtctttcagacattgttgttataaactatgtttaagcctactacaagtgtttcttttttgcattatgtcagaattgatgtaccttttttttaatgattacctccctgtactactgtgcgaacaatcaamcaaaatgatgagattaatggtcatggataaatttcaagaaaactagtgtatttgattgaaaagtttaaagttagaacttagkccattggaatttaytcatatagcaaactgcgtagagycaatattgactcacctacacacgttatacagattgacattttagacatttkgaaggccccgtaggtattttattagttagaacttaattttttgaaaaaacatatccaaagcacawtaggcattwgaatktgtgcatcgagaactgattacaaataatattgatatgtatgtaaataactgagaagtatgtcttatgaagaaatatattttattacaaaaaattataaaacrttttcaagwttatatgctttaaaagtttaagatcagaaaataatcaactttagaaaaacacgtwtaaaaattgttaacatcattgawwaaaaaaaaaaaaaaaaagccaacatgattgttgtgaacatcaacctgctgactgaacctgggaattcaggttaagtatgtgactgctgccgtgcctcagagaaatttgtatttaaattaacttatgtaaaaaaaaatcttagaacaaatgtttgtttatttttatacttatttaagaaattgaaaacttctgaaaataaagtttgattgtgtctttaaaaaaaaaaaaaaaaaaaaaaaaaaaaaaaaa

SEQ ID NO: 2392 - DNA, 3374 bp, Rattus norvegicus
gggaaggcagagagggcgataggcgcgagactgaggaaatccgcgctgggaggccccgagctggggccgktrctgctgagggcgccaaggaccgaggcggcacgctgagcccaggatgagggcgtcggtggtgctgacctgctactgctggttgctggtgcgggtgagcagcatccacccagaatgccggtttcatctggaaatacaggaagaggagacaaaatgygcagagctgctaagcagccaaatggagaatcacagagcttgcagcggtgtctgggacaacatcacatgctggcgccctgcagacattggggaaactgtcacagtgccctgccccaaagtgttcagcaatttctacagcagaccaggaaacataagcaaaaactgcactagtgatgggtggtcggagacatttccggatttcatagatgcgtgtggctacaacgaccccgaggatgagagtaagatcacgttttatattctggtgaaggccatttataccttgggctacagtgtttctctgatgtctcttacaacaggaagcataattatctgcctcttcaggaagctgcactgcacaaggaactacatccacctgaatctgttcctctccttcatgctgagagccatctctgtgctggtcaaggacagtgtgctctactccagctcaggtacactgcgctgccacgaccagccgggctcctgggttggctgcaagctcagcctggtattcttccagtactgtatcatggcgaacttctactggcttctggtggagggtctctacctgcacaccctcctggtagccatccttcctcccagcaggtgtttcctggcctaccttcttattggatggggtatccccagtgtgtgtataggtgcatggatagcaactcgcctttctttagaagacacaggttgctgggacacgaacgaccacagcatcccctggtgggtcattcggatgcccattctaatttctattgtagtcaactttgccctcttcatcagcattgtaaggatcttacttcagaagctaacttctccagatgttggtggcaatgaccagtcacagtacaagaggctcgccaagtccacactgctgctaatcccactgtttggcgtccactacatggtgtttgctgccttccccattggcatctcctccacgtaccagatcctgtttgagttatgtgttggttccttccagggcctggtggtcgcagttctatattgctttctgaacagtgaggtacagygtgaactgaaaagaaggtggagaggcctgtgcctgacccagcctgggagccgggactaccggctgcacagctggtccatgtcccggaatggctcagaaagcgccctacagatacaccgtggctcccgtacccagtccttcctgcagtcagagacctcagtcatttagctgtgtccctcatacagagctgacagtgctgctgggtttgacatatgtgtttgccagcttcctctgcttgccccagtgtctggtgccttattgggtcagccctggtccttaactcgattgtaacttgattgaaacaccagttattgttgacagactctagcstttaagccatcctcttcataatatggcacagccatattctactttcaaagagagcaaggaaaccaggtggccctgaacatcaaaactgggttctagaacgtccgaaaaaaaacaaggaggaagattccagtttctccactgcctcctgtcagggagaaccacgtccagaaccagctgagcatcaccaccctgtggcccagcgcatgcctatggttgtctctgacattcctctcaatctatggcataccagggaaagtggatgaaagcaaccttctcatcctacaagcttcctggtgcccccggccttgagttctgtcctgtggactacatctggacagccacacccttgccattccctggaccatctggtagtgaccaaagataagtcagggaggatattcatggttcagcggccaagccaggaactcatctcctcccagggcacttagcatctgctgcttcctacaagtggtgagcagccctggatcccaggccggctgctggcatgaaggccctcattcatgacttgtccattcagcccaaggttgttctctagctggtagaaaacttcgatttttattttaaagaaaaccaccatcttaaaattgcttaaagagatttattttatcaaagtatgaagaggcatcaagttttcctatccaacatttgccagtaacaatccttatttttccagtgttatttgcaactgtgggcaggcagacctgagggaatgcttgctgtgattgaaaagcagctgcagacagagagtgcctttccttgcggtgtccaaagaccctgggagaccatgtcatggcccagtgcaagggctgtaggttctggacctagtgttcaggcatagtctatgtaacttacaccccaacacacacacacacacacacacaggataaaagctgcaaaatgttttcctgtgctttctgaggcatgtaggccacggccagcatgaataccaatgatctcagcaattgtaccagagccagaggttttggggtcagaaaaatcacaaaagtaggggctccacttctggtacatgggggctttagtacagcagagaagtatctagaaactagctgaggcccgggggccagacatctgtcctgaatgtctgwccacagaacccctcctgcactwttgcctctatccactcttgaaaggcctccagtttgtctgcaactgcacaggatagacacctcasatgatctagaaaacaccactaacctgctgccttgcagggctaccaggytagagaacaggttgtggggaacaaatggcctaggtcagaaacacttaaaagagctgttggcagtgacaaaagrtgggtgctacaagccctggtgtcagccttgcctgtctttatacagagctcactgcttactccagcagctcggcggacacacagccctcccatatctgaaagttgtcctatcaaccactaggcgtgaccctgccatgaccctgaagagacatgtagatcctgtgaacacargcagccactgagtacacacggaacattcagaacaccattccctcagcccagcatgtgstaatgctaactatagctgggtcctcgtcctgsgaaagagatcggctgatcacaaagtggtcgctgctggaactcaccagtagcagaggtgtagtaaccatatggccagcgcrtgatcttacgtgttgtatgtggaatatctacaaacmcmccscggagtggaactgagttgtgtatatactgcaataaacctgatttcattctgaaaaaaaaaaaaaaaaa

SEQ ID NO: 2393 - DNA, 3057 bp, Rattus norvegicus
  misc_feature (2757)..(2757): n is a, c, g, or t
cgcttccctgttcacctctgtatttgagaatccgacgccatctgccaccatggtgaacttcacagtagatcagatccgtgccatcatggacaagaaagccaacatccggaacatgtcagtcatcgctcacgtggaccacggcaagtccacgttgaccgactcccttgtgtgcaaggctggcatcatcgcctctgcccgagccggtgagacacgcttcactgacactcgaaaggatgagcaggagcgctgcatcaccatcaagtccactgccatctccctcttctatgagctctccgagaacgacctgaacttcatcaagcagagcaaggatggctctggcttcctcatcaacctcattgrctctccaggtcatgtggacttctcctcagaggtgmccgctgctctgcgtgtcactgatggagcactggtggtggtggactgtgtgtctggtgtctgtgtgcagacagagacagtgctgcggcaggccatcgctgagcgcatcaagcccgtgctgatgatgaacaagatggaccgggccctgctggaactgcaactggagcctgaggagctytaccagaccttccagcgcatcgtggagaacgtcaatgtcatcatctccacctatggcgagggcgagagtggacccatgggcaatatcatgatcgatcctgtcctgggcactgtaggctttggctctggcctgcatgggtgggccttcacactgaagcagtttgcagagatgtatgtggccaagtttgcagccaagggtgagggccagctgggtgcagctgagcgggccaagaaggtagaagacatgatswagwrgytgwrrrrarammrrwawwwtgacccggccaacggcaagttcagcaagtcagccaatagcccagacgggaagaaacttccccgcaccttctgccagctcatcttggaccccatcttcaaggtgtttgatgccatcatgaacttcagaaaggaggagacagccaagctgatcgagaagctggacatcaagctggacagtgaggacaaggacaaggagggcaaaccactgctgaaggctgtgatgcgtcgctggctccctgctggtgacgccctgctacagatgatcaccatccacttgccgtccccggtcactgcacagaagtaccgttgtgagctgctgtacgagggcccacctgatgacgaggccgccatgggtattaagagctgcgaccccaaaggccccctaatgatgtacatctccaagatggtgccaacatctgacaaaggccgcttctatgccttcggtagagtgttctctggggtggtgtccacaggtctgaaggtccggatcatgggccccaactatacacctgggaagaaggaggacctgtacctgaagcctatccagaggaccattctgatgatgggccgctatgtggaacccattgaggatgtgccctgtggcaacattgtggggttggtcggggtggaccagttccttgtgaagaccggcaccatcactacctttgagcacgctcacaacatgcgggtgatgaagttcagcgtcagccctgtagtcagggtggcagtggaggccaagaacccagctgacctgcccaagctggtggaggggctgaagcggctggctaagtctgaccctatggtgcagtgcatcatcgaggagtctggggagcacatcattgctggtgctggagagctgcacctggagatctgccttaaggacctggaggaggaccatgcctgcatccccatcaagaaatctgaccctgtcgtgtcctaccgggagacagtcagtgaggagtccaacgtgctctgtctttccaagtccccaaacaagcacaacaggctgtacatgaaggccaggcccttccctgatggcctagcagaggacatcgataagggtgaggtatctgcccgccaggagctcaaggcgcgtgcccgttacctggccgaaaagtatgagtgggatgttgctgaagcccgcaagatctggtgctttggacctgatggcactggtcccaacattctcaccgacatcaccaagggtgtgcagtacctgaatgagatcaaggacagtgtggtggctggattccagtgggccactaaggagggtgctctttgtgaggagaacatgcgtggtgtgcgatttgatgtccatgatgtgaccctgcatgctgatgccatccaccgaggaggtggtcagatcatccccacagcgcgccgctgcctctatgccagtgtgctgactgcacagccccgcctcatggagcctatctacctggtggagattcagtgtcytgagcaagtggtgggcggaatctatggtgtcctsaacaggargcgtgsccatgtstttgagrrgtcccagktrgstgkkrhmcccatgttygtggtymwggcmtacykgcytgymaatgartcytwtggyttcacygcygayytkcgatcmamcacygbbggcmaggcyttccmccagtgygtgtktgaccactggcagatcctgcctggkgahsmhttkgacavcagcasccgcccmagccaagtkgtagytgaracscgcaagcgcaarggcbtgaargagggcatccmagcgstggacaacttyytggacaaactgtaggcagmbtgrtamtgccacabsytgmacagtgmccrcccrtcagaaracacyktgrgactgtcsccmcagtgcyccthtrgakghtgmtgggvccaycctgacatcaytcagcavtcacktgstvccaaktntatttatttmggaattacaagryagmgkgaatggcycthtgcaggctggavtggcagvcygtggggtgggcrssrcacgryksttavcatytkmagwrggaaayracgcagatgtccaaaaktbtmartaaatgcattcagaggttwwwrrrrwmmawrrmmaagtgkarttcccccagagggggargtggggragtgcctccaggaaggcaggcamcccttagacytgcarcccrsytgtgbgaatcattggrgtaataaactmttywgtggttrawmmmhaaaaaaaaaaaaaaaaaa

SEQ ID NO: 2394 - DNA, 1753 bp, Rattus norvegicus
atacattccccttgtcacttcttggggctcctaagtaggggccagtcggtactccttgccgcaggatgtgagaccctttaacctgtaatgctgtggctggcccttggcccctttcgtgccatggagaaccaggtgctggtgattcggatcaagattccaaatagtggcgcggtggactggaccgtgcactccgggccgcagttactcttcagggacgtgctggatgtgataggccaggttctgcctgaagcaacgacgacagcctttgaatatgaagaygrasrtgstgatrkgattasrsyargwwstgmcgaagmraygamgrcarygctktsmtaytattattccacagtaatggaacagcaagtaaatggccagctaatagagccgctgcagatctttccaagagcctgcaagcctcctggggaacggaacatacatggcctgaaggtgaatacacgggctggaccatctcagcacaccagccctgtggtctcagattcacttccaagcaatagcttgaagaagtcctcggctgaactgagaaagatactggccaacggcmagwkgawtgaacaagacatacggtatcgagacacccttggtcatggcaacggaggcacagtctacaaagcatatcatgtcccaagtgggaaaatcttagctgtaaaggttattctgttagacatcacactggagcttcagaagcagatcatgtctgakttggaaattctttataagtgtgactcatcgtatatcataggattttacggggcattttttgtagaaaacaggatttcgatttgtacagaattcatggatggggggtctttggatgtatataggaaaattccagagcacgtcctcggaagaattgcagtagcagttgttaaaggccttacctatctgtggagtttaaagattttacacagagatgtgaagccttccaacatgcttgtaaacacaagcggacaggtcaagctgtgtgacttcggcgtgagcacccagctggtgaattctatagccaagacgtatgttggaacaaatgcttatatggcacccgaaaggatttcaggagagcagtatgggatccwttcmkrsrkbykgmdckwaggsakytcwttchwksrkrytcwkraramccasssatctttaatgcctctccagcttctgcagtgcattgttgatgaggattcgccggtccttccgcttggagagttctcggagccgtttgtacatttcatcactcagtgcatgargaagcagcccaaggaaagaccagcgcccgaggagytgatgggtcacccattcatcgtgcagttcaatgacggaaacgccaytgtggtgtccatgtgggtttgccgagctbtggaggagagacggagccagcaggggcccccatgagacctcagcaggacactgaccacccaggaccaggcatcaakgtcacaacaagccgygacccctctgtytgctgcctgattgggaakagatgtwctgggcacagctcmtgctttcacctthtaccttacctgggagtcttcaagaaggbtggyctctgccgaacccctcaccaytggtagggaggaggcactgacaatggcaggtggagatggtgcagggttggggtgatgaggttatggaacctcctytggccccaccmtcatytctcchtactgttgtaaagggtcagcctatcagcagcactgatgggartaaagtrttaytgcttwrrawwrwaraaaaaaaaaaa

SEQ ID NO: 2395 - DNA, 6384 bp, Rattus norvegicus
cggccgctccgcgttaggagcgctaggctccgccgtgtggccgccgccgccgccgctgccatgtccccggggaarcccgggrcggrcggagcggggactaggcggaccgrctggcggagaaggaggcggaggcgtcgrctggagrcggagaccagggcgcccggcttcgggcacacggcggggcgcgtcccgggcacgttccarggcgcgcagggcatkaagcccgcggcgcgggagacgcggacacccccgcgctcgcccgggctccgctgggcgctgctgccgctgctgctgttgctacgccagggccaggttgtgtgcrcaggtgcggcgcccagtcctgtatttgacgttgaagctgtcaccagccctaccagtgtggtattaacgtggaaacacaatgattcagccacttcagmwyrtmmgataaatgagggaaacacgctgcggtatactgttaaaaaccagacatcatttaacatcacaggcttaagcccagctacttcctacaaattctccatcaccttgggaacagtcaatgagacctcaggaaagcccacatacaaaaatatcacaacagagccctggccagtgtcggatctccaagtcgcctacatcggtgtgacacaggctcttctcgcctggagcaatgcaaacggcaccgcttcttaccggatgcagattgtagagctgaccacaaattcatcaggtggtatttcagatctgaagccggggacccataagagcttggctgtccaaggatcgaatgagacccagcatgacttatgggtcacagaaggcgtctcggasccamyskcwscsmgggawscctcmstsrcmrasrtmtyscwcmctgwgctaaagcctgatactcagtacaaagtcaccatttattctcaagcagcagatggcacagaaggacagcctgggaacaaagtgtttaaaacaaatcccatccaagtttctgacatccgagctgtgaacatcagtgactcgaacatgaccctgacctggaaaagcaacaataatgagtcccatgcttcatttacctacaaaatatacgtggctgggggttccgactccatcaacgaaactgtcaatgagactcaggccgtcatccgtggactcagctccagtaccttgtacaacatcacagtgcttcctttcctgggtcagaccgcgggtataccaggcttcctccaagtgtacacttccccccgtcctgtttctgacttccgagtgacaaatgtcagcctgagggaaatcggtttggcttggagaagcaatgactcggagtcattcgagattttcatcacgcaggagggaagtgagaaacgttggaatgcttcgacgggagacctgagctatatcgttgtaaatttaaagcctgggaccagttaccaatttgaaatattcccacgaggaccaaatgggactgaagggccatcccagacagttgttggtagaactgactgcagtgctgtgactgacatccgcgtggtcagcgttagcaccactgaaatacagctggagtggcagaatacagacagtgcttctggatacacttaccatttagttctagagtctgagaatggctccatcaagaccaacagttctcagaaatggatcacagtggggggccttaccccaggcaccttatacaatgttacaatctttccagaagtggaccagatggagggcaactccagctctattacccagtacacaaggcccagcaatgtgtcctacattgaagtaaacaccaacaccaccgtgggagccatccagtggaagaacctggacgcagcctctgcttcctactcctactccgttcttatcttgaaggctggagatggcagcaatgtaaccagcagggtcagagacatcccttctgtcaccatccctgggctaatccccggcgtctcttccgaagtgaagatctttacaaagattaggaatacagaggttgggaatgaggtacctggtcagaagctgttctgtatggaacctgcacaagtggattccttacactgtgaagtggtcccgaaggagccagcgctggttctgaagtgggcctgcccccctggcatgaactcaggctttgaactgggggtcaggagtgatgcttgggacaatatgacacacttggagaactgcactttggacaatgacacagagtgcaggacagaagtcacctatttgaatttttctacctcgtacaacatcagcattgccaccttgtcatgtggaaagatggcattgcccacccagagcacctgcaccactggcatcacagacccacctcctccagatggatcccctaatattacatcggtcagtcacaattcagtaaaggtgaagttcagtggttttgaagccagccatggacctatcaaagcctatgctgtccttctcaccacaggggaagctggccaaccctccacagatgttttgaagtacacatatgaagatttcaaaaagggagcctccgatacttatgtgacatacctcataaggatagaagagaagggacagtctcagggcttgtctgaagcattgaactatgagattgatgtggggaaccaatccactaccctcggctactacaacgggaggctagagcctctgggctcctaccgggcttgcgttgctggctttaccaatattacctacaaccttcagaacgatggccttattaatggggatgagagctatgtatctttcagtccgtattcagaggccgtgtccttgcctcaagatccaggtgtcatctgcggagcggtgttcggatgtatctttggtgccctggccattgtggctgtgggaggcttcatcttctggagaaagaaaaggaaagatgccaagaataatgaagtgtccttttctcaaattaaacctaaaaaatccaagttaatccgagtggagaattttgaggcctactttaagaaacagcaagccgactccaactgtgggtttgcagaggaatatgaggatctgaagctgattggaataagtttacctaaatatgcagcggaaatagctgaaaacagggggaagaaccgctacaacaacgtcctgccctatgatatttctcgagtcaaactttcagtccagacccattcgacagacgactacatcaatgccaactatatgcctggctaccattccaagaaagatttcattgccacacaaggacctttacccaacactttgaaagatttttggcgtatggtttgggagaaaaacgtatatgccattgttatgctgaccaaatgtgtggagcagggaaggaccaaatgtgaagagtactggccttccaagcaggctcaggactacggggacataactgtggcaatgacatcagaagttgttcttccggaatggaccatcagagattttgtggtgaaaaatatgcagagtagtgagagtcatcctctgcggcagttccatttcacctcctggcctgaccatggtgttcctgacaccaccgacctgctcatcaactttcggtacctggtccgggattacatgaagcagatcccccctgagtcaccaatcctggtgcattgcagtgctggggttggaaggacgggcactttcattgctattgatcgcctgatctatcagatagagaacgagaacaccgtggatgtgtatggcattgtctacgatcttcggatgcacaggcctctgatggtacagacagaggaccagtatgttttcctcaatcagtgtgtgttggatattatcagagcccagaaagactcaaaagttgacctcatctatcagaacacaaccgcaatgacaatctatgaaaacctcgagcgagtgagcatgtttggaaaggctaatggttacatcgcctagtgccaaagcaaacccttctgaagctaaccagaccgtcacacccacagtgaaggagaacgccctgacggggacatgttttatgtgtctcatttctcaattctttgttctgttctgttagaactacttggagggcatggggctgtgcatgtaaaacatggcagataggcagttggggctctcaggggctgtgggcaggtggtgtgtaaatcagctgcattcctgattaccaatgggatgggttcactttctgtttttctttccttgagaattgtggaaaaccaggaaaagtgagctatgtttttgttttccaagcaggtttgttctcctctctttctattcctcccccttctctctctccctcccctgcctctctctgttttttttttttaagacttttatatgattcacatgctaaagccaggattatgttgggttggatatattttaagtatcagaggtctatttttacctactgtatctcggaatctagccgatggaaaagcatggctgtgggtgtttctcatgcagggaggggcacccggtgcctcttctgcgtgggtttctatttgaacatgtgccttttctgaattatgcttccacgggcaaaactcagtagatatctctatttttatattgaatctcagaattggaatatacagaatatttaaacagtagcttagtatcagaggttcgcctcctcagtaacattcctgtcccatcccattagaggaggctttctctgcggcccgcccttgacacacatttgtgctccatgttccttttccttcctttctttttttttttttctcccctcccagttttcgccaaagaacttctgttggtgagattttcatcccattggttgggtgagaataraagtttaaaatatcaccatgaractctctgtgggtgggagtggggaggaacagaggaatcaacataccatggtgtgtgcaccccttttcatcccgyctcctatgttctctcatttctgtctttggtaaraaggatttttttaaaggtgcaatatgtgacgtrkkggttcacgakgctctgggttcttaktaatgttttactcaggttgtcatttawgtgtgtatrwgtgtgtgtgtgtgtgtgtgtgtgtrtgtgtgtgtrtgtatgtrtgtgtkktktatagsktggtgatctgtgaacatttcagtgtgaactcagattaacccctttccccccaaagtccactggctttagtctctctgcagtgacacacatcagtatctactgtatatataaatactaaactcttacacaccagtcattcctatgaattgaggtgtacaaagtttgatttgtatcaaagatgtaattattatttttaaaacctctttcactacactgctgctgtaattactttgaatttttaaagaaaaatgtagatttttttgytttgtttytggcttcaggtgtgtattcaccaagagtttcagaatttatgtggktttattttattggtacataatctgcaaacttctcaaggcattaacatgacaagatttgtatctcttatttttatcttgtggctcaggttatatttgaagaagtttcaagtttattttctagtaggcagtgaagtatacataaggtcaatgaaggaatcaccaggtccctggagtcctgtggctgttttccacagttacacatcctgctgtatgtttgggaccatgggtattgtgttgaagatgagggcaggggtcttctccgaggacctggccactgtgagccctggggtaacctgtcctctgatgttctgcactctgttcctcgaatcaccggcactttgatgcctgactggacctgatcatgagtgtttgtagggttagagagcctgaaccatgatgtactgaaagccctcgctgtggttcagcactgtagtgtgcgattcttgctgtgacccagcgctgctgtagcactgttgctgccgtggctcggcgctggggcacaacccctttccctttgcggtactgaaaggattgaaagaagaggtcatggcgctgtcatgctctgggggagaattttacttctcacatggaaactgcactttttgctaaatcctttgcattttgatgttcacttagtgtccagccctttaggatgggctggccagggtaggttggccccctggactcaacttcactggggaacttgacgctgcagttgtgaatcagggaagccatgctgtctccaggtatggggtgaagctgaacatgggctcattatttccaaatgccctgtctggtctgctcactaggatgtgctgactttgggcactatacagaggggcctgttctggcagtagttctgtgcaccgcctatacacctcagtctgtcaggaacggttgtagtgggtggtaaggggtccaatcccacgcagcgcctatgccctgcctctgctgccatggaaagtgcgaggaaaggacccgcccctaaaacagccctgtagaagattagagtccctcaaaaaaaaaaaaaaaamtcgag

SEQ ID NO: 2396 - DNA, 1293 bp, Rattus norvegicus
ggagcattctgggtagaggtgaaaggccagagtcagaaggaagagttccaaagcaagcttcccaaggaaaatgggcacccagggaaaggtcattacatgcaaggcagccattgcctggaaaactgacagccccctttgcattgaagaaattgaagtttctcctcctaaggctcatgaagttcgaattaaggtaatcgccacatgcgtgtgccctactgacatcaatgccaccaatcctaagaagaaagctctcttcccagtagtcctcggccatgagtgtgcaggaattgtagaaagcgttgggccaggagtgaccaacttcaaaccaggtgacaaagtaatcccattcttcgcaccacagtgcaaaaagtgcaagctctgtctgagtcctctcacgaacctctgtgggaagctcagaaattttaaataccctactattgatcaagagctcatggaagacagaaccagcaggtttaccagcaaagaaagatcaatttaccacttcatgggagtcagttccttctctcagtacactgtggtttcagaagccaatcttgcccgagtggatgatgaggcaaatttggagagagtgtgtctgattggatgtgggttcacatcaggctatggggctgcgatcaacactgccaaggtcacccctggttccgcttgtgctgtctttggcctggggtgtgtaggtctttctgctgtaattggatgtaaaatagcaggtgcttccagaatcatagctattgacatcaacagtgagaagttcccaaaagccaaggccctgggagccactgactgccttaatcccagagacctagacaaacctgtccaagatgtcatcactgaactgacgggtggaggtgtggatttctccctggactgtgcaggaacagctcagaccttgaaagcagctgtagactgcaccgtcgtaggctgggggtcgtgcactgtggtcggagcaaaggttgatgaaatgaatatatccaccgtggacatgatattgggccgttctgtaaagggaacgttctttggtggttggaaaagtgtagactctgtcccaaacctggttactgactacaagaataagaaattcgatctggacttactggtgacccatgccctaccttttgacaaaatcaacgacgcgattgacctgatgaaccaaggaaaaagcatccgaacaatcctgaccttttgaagacgccaggaggaacttggaatgtcatcagattggatccaagcttgtccagatgacttcccacttcccacgatgagccaaggaaagcg

SEQ ID NO: 2397 - DNA, 1618 bp, Rattus norvegicus
aaggcatcttacgtccgcagcccaccaccctcacacacacctgtgacgcccggcgcgcccccctgcccgcacgcgcacagcccacgcagctctggacacaggcggctgaggttgcggagtccccccacgctgaggcgccaggggccaagcagcgattagggggctgcgtgggtggctgtggtcgtgacaggtggctgcaagcagggtcgcagacatgctgctgctcaagaaacagacggaggacatcagcagtgtctatgagatccgggagaagctgggctcgggtgccttctctgaggtgatgctggcccaggaaaggggctctgctcatcttgtggccctcaagtgcattcccaagaaagcacttcggggcaaggaggccctggtggagaatgagatcgcagtactccgcaggattagccaccccaacattgtggctctggaggacgtccacgagagcccttcccatctctacttggccatggagctggtaacaggtggtgaactgtttgaccgaatcatggagcggggctcctacacagagaaggatgcgagccaccttgtagggcaggtccttggtgctgtctcctaccttcatagcctgggcatcgtgcaccgggacctcaagcctgaaaacctcctctatgccacaccttttgaggactccaagatcatggtctctgactttggcctgtccaaaattcaagctggcaacatgctaggcacagcctgtgggaccccaggatatgtggccccagagctcctggagcagaaaccctacgggaaggccgtagatgtgtgggccctgggtktcatctcctacatcctgctgtgtgggtacccccccttctatgatgagagcgatcctgaactcttcagccagattctgagggccagctacgagtttgactctcccttttgggatgacatctcagaatcagccaaagacttcattcggcaccttctggaacgtgatccccagaagaggttcacctgccaacaggccttacagcatctctggatctctggggatgcagccttggacagggacatcctaggttctgtcagtgagcagatccagaagaattttgccaggacccactggaagcgtgcattcaatgccacatcattcctacgtcacatccgtaagctgggacagagcccagagggtgaggaggcctccaggcagggtatgacccgtcacagccacccaggccttgggactagccagtctcccaagtggtgacaaccaggtggatgccaaggaaggccaagtggactgactcctagcttttctttcctccagcccttttgatctccttccctgatccttgtcccccggactggcctctgttggaaagtccaagaccgtgggtgtgatgcatggcactggggtatggggcttcccaagtatgtccccagcctctgtcctttgttgctgccaccctctatggaaactgaggaggtattcaaaaatggatttggggccatccttcctgcaccttgcacgcacatatgcattgcgtggctgttctgtgctttgctgactgtgggtggtcctgcttgtgttgtagccctttagttcctcctctttccaaccaataaagacaaacagaac

SEQ ID NO: 2398 - DNA, 2145 bp, Rattus norvegicus
  misc_feature (1738)..(1738): n is a, c, g, or t
  misc_feature (1799)..(1799): n is a, c, g, or t
caagcccttgtgtgcgctcctttccccgccatgaatgaggaatacgacgtgatcgtgctgggcaccggcctgacggaatgtatcctgtcggggataatgtcagtgaatggaaagaaggttcttcatatggatcagaacccatactatggaggagaaagtgcatctataacaccgctggaagatttatacaaaagatttaaattaccaggacaaccaccagcatcgatggggagaggaagagactggaatgttgacttaattcccaagttcctyrtgscsaatsgkcagktggtgaagatgctgcttttcacagaggtcactcgttatatggacttcaaagtgatcgaagggagctttgtctacaagggagggaaaatctacaaggttccttccactgaagcagaagccctggcgtctagcttaatgggactgtttgagaaacgccgcttcaggaagttcctagtttatgttgccaactttgatgaaaaagatcctagaacttttgagggtgtggatcctaagaagacctscatgagagatgtgtataagaagtttgatttgggccaggatgttatagactttactggccattctcttgcattgtacagaacagatgactacttagaccagccatgttgtgaacgattaacagaattaaacttttacagcgagtctttggcaagatmwsgwrraagcccatacctctatccactttatggtcytkgggaattgccacaaggatttgcaaggttaagtgctatatatggaggtacctacatgttgaataagccaattgaagaaatcattgtgcaaaatggaaaagtggttggcgtgaaatctgaaggagagattgctcgctgtaagcagctcatctgtgatcccagctatgtcaaggatcgggttgaaaaagtaggccaggtaatcagagtgatctgtatccttagccaccccatcaagaacaccaacgatgctaactcctgccagmtcrtcattccacagaaccaagtcaaccgcaagtcagatatctatgtttgcatgatctcctttgcacataatgtggcagcacagsgcaagtatattgccatyryragkacaactgtggagactaaggaaccagagaaagaaatcagaccagctttggagctcttggaaccaattgaacaaaaatttgtcagcatcagcgacctctttgtacctaaagatttgggaacagatagtcagatctttatttcccgtgcctatgatgctaccacacactttgagacaacctgtgatgacatcaaagatatctataagaggatgacagggtctgagtttgactttgaagaaatgaagcgcaagaagaatgacatttatggagaagactaacagcagtacatattatgtaattaggacaaacttaaaatttggcaaataatgtatattgtatgaaatcaatattgtaagccctgcttttatgatcgaagtggagattgaagagtgctataccagtraatgytccctcacttttctaatatcatgtattaacttgttttcatggaatggctagtcagaattggttggttctgttcagtttaaccaaactgcatttttttttttttgtagtgaagdagctgttctaaacatatattgatatcgatagagaacttgawacagkmcttgtatcktttaatcactgtmgcctttacgattgtgtgatgtkgcccarkagctgdatccawacaatytgttsccatcntgatattgggagtcmmmyysmayaycckttggyttctgaaaacgttcagthttcgsyaywnkgttatgwcaagtatthcagcagggcccagataggasasccamatgttttgttwatgtgggtataaactttamccmmmcttcmsmyttagkgagttgtttggaraasccaatatgtggtakykkmacswrsaattgytgagaaagggaaagcaggtaaaaatatmgaagcmccttttatcccaggtatggyttyttyaacggrccaagctgcaatgcagtattgatttgacaragcctcaatttcgatgatgtytgtkccaaaatggctccaaatgatttytgtactgcaaaataaagccaaactytggrahmmmmwwaraarrwwwaamaaargatttcagtttg

SEQ ID NO: 2399 - DNA, 844 bp, Rattus norvegicus
  misc_feature (825)..(825): n is a, c, g, or t
ctagttcgggtgtgctgtctcackrgtgaggccgcgtacccgggaagtccccgtgtgtgtgtaccttgcagcctcccgsttyccsgaamcatggagtacctcawtggcatccarggkcctgrctatktccyggtcgsttctgatcgggwggccsscarcaatattgtccagatgaaggacgatcaygrcamgakgtttaagatgagtraaaaaatcttactcctatgtgttggagaggctggaracactgtacagtttgcagaatatatccagaaaaacgtgcagctttataaaatgcggaatggatatgaattgtyccccacagcagcarctaatttcacacgccvrarcctkgccgactgtyttcggagtcggacccyytatcatgtgaaccyyctcctggctggctatgacgagcatgaggggccagcactttactacatggaytacctagcagccttggscaaggytccttttgcagctcatggstayggwgccttyctgaccstcagcatmcytgaccgatmmtacacaccaaytatckcacgtgagagggcaktggagsttcttaggaagdrkskrgwkgagctycagaagckcttmwtyytgaatctgsccaccttyagcgttygggkcattgdcaaagwtkgcatccacmatctkgagaacaytaccytcactwarcggagttcctaacatcatgktyttccytcscacttaycagggacyttttkttgatgggttccwwktatywttttmtactcttttgacswtcactstcaatagatggttaattcaaaataaarytgwacacagbthwmttgnmaaaaaaaaaaaaaaaaaa

SEQ ID NO: 2400 - DNA, 827 bp, Rattus norvegicus
aattccgttgctgtcggaaagccagaaccggtttgtaggcagctcagtggagatcgggttcctattacagtgcaatcatgtctgttatgtcctataatggaggggccgtcatggccatgaagggaaagaactgtgtggccatcgytgcagacaggcgtttcggaatccaggcccaaatggtgaccacggacttccagaagatctttcccatgggtgacaggctctacataggcctggccggmctggccactgacgtccmgacagttgcccagcgtctcaagttccgactgaacctgtacragctgaaggaaggacggcaratcaagccttacamcctratgagcatggtggccaacctyttgwatgagaaacggtttggtccctastacacagaacctgtcattgctggcttggacccgaagacctttaagcccttcatttgctctytggacctcattggctgtccatggtgacaratgacttygtagkcagkggcacctkstytkrasarrkbtdkggswkgtsygrgtykytytgsdvksyyrrcwtggatycrgrgcacctkkttgrgamcatttytcargccatgytkratgytgtggacarggatbscgtgtcsrrcatkggsgtcattgkycacatmwtkraaaragmcaagatcmccmccaggrcaytgaaggsgcggrtggrctaacytgtgctytggcyccgtytmccttktgytgkttytctkybtaatamaatytcctttctttcdwrmhhdmvmrmmmwhrwwwmwrmractttgtccccatcagggagagcccaatacagagcgactttatctc

SEQ ID NO: 2401 - DNA, 2712 bp, Rattus norvegicus
gtcgactgcagcccaagcttggatcttaaaagcataataaaaataatagtagtagtacttggggctggagagatggttcagtggttaagagcactgactggtcttccagaggacccaggttcaaatccaatacccacatggcaactcacaactgtctgtaagtccaagatttgacacctcatgcatacatgtagggcaaaacattaaagcaattaaatagacagatagataagataggtagataaacaatacttgctactcagaacatttcaaagaacatcgagtatgttttggtttgtcaaggagaaaaggtagaatttcaagaattaaggaatgagatcagttaataatcaaccatttgtaagtcccaggaacatgagaaaagatgtctgctgtcctataactggtcaggtagtcagcttctcatgacctgtgatctcaggctatctctcatcttagaggatatttgtcagcacctaggggccagcagaaggccttgctcatgcaaaacctgcagagttataaagggcctggggacccggttggaacccaagcagggagggggtcctagccattagccaggaccatctaagcctcattttcttcccatgaacgtagagaaggaaaacttgccttttaacctgtctgaagggcagtggtcttagggacccataaggcagacattgaggtcagagacctggagttgctgccggtgtttgcctaactttaccacagacctttcagacagaaagctagaaagttctttctctgcgtttgggcgggctgtgtgggcccagcctctggtggaggaggggggaggtcaacactccatcagctcctctcttagccttgagctagttagtggttataagtgtggctctggaggtttggggcagagacacttgtgcagcaggaaagtggcagtcgtggggacagtatgctggcaaaaggtctttgcctgcgctcagtgctggtcaaaagctgccaacctttcctgagccctgtgtggcagggtccagggctggccactggaaatggagctggtatctcctctaccaacagtcctcgatccttcaatgagatcccttcccctggtgacaatggttggataaacctgtaccacttcctgagggagaacggcacacacagaatccaktatswtcacatgcmkmakktycasawswaysgccsymtttmcaggkagargcykggcarcatggwgkcagkytasrkcstgsassstaaggrcrcrgsgactcycwwytcctgcgasggtcctaacccggagcgctacctwrtscmycyswsgswggmctmksaycmgtayyaysagwggsccmttgkgktwctstttargagttsagatgccwsrwggaaagacagaattgtcctaaaccaagaggtgatggcccctgactccatcaagaacttcgtgcccctgctggaaggtgtagctcaggacttcatcaaagtcttacacagacgcatcaagcagcaaaactctggaaagttctcaggggacatcagcgatgacctattccgctttgcctttgagtsyatcassaktgywgyatttggggagcgcctggggatgttggaggagatcgtggaccctgagtcccagcggttcatcgacgccgtctaccagatgttccacaccagtgttcccatgctcaacatgcctccagacttatttcgactctttagaactaagacctggaaggaccatgcagctgcctgggatgtgattttcagtaaagctgatgaatacacccagaacttctactgggacttaaggcagaagcgagacttcagcaagtaccctggtgtcctttatagcctcctgggaggcaacaagctgcccttcaagaacatccaggccaacatcacagagatgctggcaggaggggtggacacgacctccatgactctgcaatggaacctttatgaaatggcacacaacttgaaggtacaggagatgctgcgggctgaagttctagctgcccggcgccaggcccagggagacatggccaagatggtccagttggtcccactcctcaaagccagcatcaaggagwywctsagactccaccccatctctgtgaccttgcagaggtatattgtgaaygamctggwrctkcgwamttrcmmsmttsswgccwagrctwtggwgcwgrkgrctagswatgccatgggtcgagaatccagcttctttcccaatccaaacaagtttgacccaactcgttggttggaaaaaagccaaaacaccacgcacttccggtacttgggctttggctggggtgttcggcagtgtctgggccggcggattgcagarctggaaatgaccatcttcctcatcaacgtgstrswmwrsytcwgrawtsaagttcaaagtatccgtgatgtggggaccaagttcaacctcatcctgatgcctgagaagcctatcttcttcaacttccagcctctcaagcaggacctgggctcaactatgcccagaaaaggcgacactgtatgaattgcaggctgcagtcacacggggagatgtctcactggggcatttgagggtggkgtctctatatctccagaaacagcactctgtgattacctgtccacgttagctgggccctcctctctttcatcctgtcwccctttctacttactcaggaggttaataaacacataaatgctgrraaaaaaaaaaaaaaaaaa

SEQ ID NO: 2402 - DNA, 1508 bp, Rattus norvegicus
cgcagcctggatgcgccctgtggcgcacgcacgcagcatcccgagcctcccgccgcgcgcgggatgcctgctctccgggccccggggcttggccccggcggtaaccggagcgggggggcgcgcccccccagcagcagctgcggcgcccgcgcccgggccagtcgccgccggggcccatctcctgtcgccgcgctctgcgacccaccgccttgcgcggccatggggacgctgctggctctcgtggtgggcgcggtgctggtatcctcagcctgggggggctgcgtggaggtggattctgagaccgaggcagtgtatgggatgaccttcaaaatcctgtgtatctcctgtaagcgtcgtagtgagaccaccgccgagaccttcacggagtggaccttccgccagaagggcacagaggaatttgtcaagatcctacgctatgagaatgaggtgctgcagctggaggaagatgagcgctttgagggccgtgtggtgtggaacggtagtcggggcacsaaggacctgcaggacctgtccatcttcatcaccaatgtcacctacaaccactctggcgactacgaatgtcacgtctaccgtctcctcttctttgataattacgagcacaacaccagcgtcgtcaagaagatccacctggaggtggtggacaaggccaacagagatatggcatccatcgtgtcagagatcatgatgtacgtgctcattgtggtgttaaccatatggctcgtggcggagatggtgtactgctacaagaagattgctgctgccacggaagctgctgcacaagagaatgcctcggaatacctggccattacttccgagagcaaagagaactgtacaggcgtccaggtggctgaatagcgctggctctgggctccgcctcaaggrrswgmyagcctrsskstrssctccagccctsmagtgrrgaycagcccctrstgggtaccctccccykgcagtggggatcagcccatcggtctccccagcctcacagwtctgcagtggagccaccagggtgggagsgggcagggactgatcccacctcacccaccgmctcccacctaccctcccaccgccatgcatgatgggtgaagcaatatggccgccccaccctgcttttgctgcctgtttgggggakgggscrstgaggcgagggggcaggccccgcccccttctttttgytgatttgcacataggccacttccacacgcactgccaggccagccggcccaccyctgcttgatggggtgaagaggggtcgggacagggacmgtagtgggcagggggttytgggcctcatytcccctccgcttcctccggstggacctggggttccctycctgtgacacctcctagccctggcccacccsccctytytcaccagccttcaaktgtsgtctcttgggaaggcctyttcggcctcctatctyyacwgaagtagttkttgttcatgaaataaagrttyttggaytmgraaaaaaaaaaaaaaaaaa

SEQ ID NO: 2403 - DNA, 1863 bp, Rattus norvegicus
gaattccctggggctagccggamctgtcccgcgcacagcccgcaaggccatggacgttctgggctggctgctgctgccgctccttctgctgtgcacgcagccgcaccatggcgccagagcaatgaatgacattggggactacgtgggctccaacctggagatatcctggctccccaacctggatggactaatggagggctacgcccgaaacttccgaccaggcattggaggtcctccagtgaatgtggcgcttgccctagaggtggccagcattgaccacatctcagaagcaaatatggaatacaccatgacagtgttcctgcaccagagctggcgagacagcaggctgtcctacaaccataccaacgagaccctgggcctggatagccgcttcgtggacaagskgtggctccctgacaccttcattgtgaatgccaagtctgcctggttccatgatgtgaccgtggaaaacawgcttatccbcctacagcccgacggkgtgattttatacagcatccgcatcacctccacagtggcctgtgacatggaccttgccaagtmccccatggacsagcaggagtgcmtgctggacctgrasagctatggctactcttctgaggacattgwctattattggtcaraaaaccagsagcwgatccacgggctggacaggctgcaactggcccagttyactatcaccagttaccgcttcaccacggagctgatgaacttmaaatcagctggccagttccctygactcagcttacacttccagcttmggaggaaccggggtgtytacatcatccagtyttacatgccctytgtcctbctggttgccatgtcctgggtctccttytggattagccaascagcagtgcctgccaragtatctytaggcatcaccmctgtgctgacaatgaccmcactcatggttagtgcccgctcctccctcccgcgggsttytgctatcaaggctctggatgtgtatttytggatytgctatgtyttygtgtttgctgccctggtggagtatgcatttgcccacttcaatgctgactacaggaaraaacggaaagccwwggtcmmrgtcaygaarymaagssywgrsmtggmcgtgaggaacgccattgtcctcttctccctctctgctgcyggggtcagccaggagttggctatctcccgccgtcaaggccgggtccctgggaacctcatgggttcctataggtctgtagaagtggaggcaaagaaggagggggggtcccgcccaggrggcccaggaggcatccgttccagactcaaacccatcgatgcagacaccatcgacatctaygsccgcscwgkgkkcccggcakcckttscagcagtcaacatcatctactgggcrgcgtataccatgtgacggcagtgcgtacaccacatgacggctttacatgtaccacgtgcggtggttgccacaaactcctggaggaacagccctctccgtggatcccaaagtgggacagagaggagsstccgctccctgggctttacctcaattttgctctaccagcctgcacttcctgtagatggagcaggatgggctttgcacagagggccattagttggcctgtccctgaagctgagcctgcactaaggtgcccttgggagctgtgaagttttagactcaggatgggcctgatttctgggcctttgctctgtgggatcaggatcagagagaaagagagtaggggtggatgaccactctcatggtgaactggaggagaagggcattatgaggcctctttggtcccagsgaatwmagccttggcctggcarmwrrmwwmwrwawwtgttgcaaaaaaaaaaaaaaaaaaaaacctcgtg

SEQ ID NO: 2404 - DNA, 4202 bp, Rattus norvegicus
ccttctaataacaaacacagcaatggtgccttaagagaggacggtcggacggcagctcctcaccggctccttctcacggcttctcgggagaactgtttgatttggaaatctatgttggctgtccggaatatgaaatttggcatattccttttgtggtggggatgggttctggctgctgagagcacagtgcactggccaggaagagaagttcatgagccctctaagaaaggcagcagacctcagagacagagacgaggtgcacatgacgatgcccacaagcaaggcagcccmattctgaaacgaagctctgacataaccaagtcgcctctcaccaagtcagagcagctgctcaggatagatgaccacgacttcagcatgaggcctggctttggaggtcccgccatccctgtgggtgtggatgtgcaggtggagagtctggacagcatctccgaggtggacatggacttcaccatgaccctctatctgaggcactactggaaggacgagaggctgtyttttcccagtaccaacaacctcagcatgacgtttgacggccgacttgtaaagaagatatgggttcccgacatgttctttgtgcactccaaacgctccttcatccatgacaccaccacagacaacgtcatgttgcgggtacagccagatgggaaagtgctgtacagcctcagagttacagtgacagcgatgtgcaacatggacttcagccggkttcmcctggacacacagacctgctccctcgaaatcgaaagctwtgcctacacagaagacgacctcatgctgtactggaaaaargscawtgactccttaaagacagatgagaggatctccctctctcagttcctcattcargaattccacaccaccacaaaactagccttctacagcagtacaggctggtacaaccgtctgtacatcaacttcactctacgtcgtcacatcttcttcttcttgctccaaacctactttcctgccaccctcatggtcatgctgtcctgggtgtccttctggatcgaccgcagagctgtgcctgccagagtccccttaggcatcaccacggtgctgaccatgtccaccatcatcacgggcgtgaacgcctccatgcckcgmgtstcctacawcaaagccgtggacatctacctctgggtcagctttgtgttcgtgtttctctcggtgttggagtacgcagctgtcaactacctgaccacagtgcaggagcggaaggaacggaagcttcgggagaagatctcctgcacctgtgggctgccccagcctcgaggggtgatgctggacagcagctacagtgacggggaggtgaacgacctgggtggctacatgcctgagaacggagagaaacccgaccggatgatggtgcagctgaccctggcctccgagaggggctccccacagaggaaaagccagagaggcagctatgtgagcatgaggatcaacacccacgccattgacaaatactcaaggatcattttcccagctgcttacattttattcaatctgatatactggtcaattttctcttagatagatgtgattgtgtaaatcttggcaggcaccacagaagttgctgtaaaaatgagaatgacagtttaaagccattcctacctgggttttctctgtcccctgttcagctctccaaagctgcaccaacaagacaccttgttttkgcacttattaagtatcagttgtctgcacagcagtatactaggcgttgcaggacgttgccatgatagtaactgatgttagcggctcccagatcccaggaagagcacagaggccacatgtggacatgctgcggtccagggccagggctctggatgcttttcacatcgaggggtttctacgtcggtggaccatgttctttagactacgtagatctgggaaggacctaaataaaactcatctgcattgggctcacaggcacataaaccccctcggctgaaagggcaggcttcgtctgtctccgcacctgctccacatccccatacttaatggaaggcagtggcgctcacagggttcttttccacaagctgcatggctctctccttctaagaaatgccctttacatggctgaaatgtccctagtagactttgaagatagagatacatggatcatttcatctgttttgagggggcaacaaagctagaaaaccgtgtccctttccacgccttctagtcaccgtttccctcctctctaccacagagcaggtgctttcttcaaaataaaatcttttctcagtcgcatgacagcatcactgactgaggcgcttgaagaggtattcatttcttctgcatagtcagcatttcaagaaaactcgaggctgtttctaactcatgggaatgagaagcaaactgtttcttaagagaaagataacattgaaaaacaaaagaaacagacagacatcttcatttccgttcagcaagtgctgtctgggaactagaaagcaattatcttctagattgagcatcccatagaccagataagctggcccatagcaactgatgtcagccatgggttgtaatttgatgtattgttttaaaatagaagcctctatagtctttatctagaagatatatagcagccccaaccgaacttgctcaaacagtattgagcagtatgtcatttgctctggcccacgtctttcactcagagagacaactacttagcatctgccacatcccaccggccattgaagcatcttaaccaagtcctggcccatttagttgtggttgtgttcagatttcagtgagagaatcccaggagaaacataaatgataatttaatattgtggaccatatggttaataaatatagagaaggtctaagagacctgtccaggggcaaccatcctctgtgctgcgaaacctatcttcatatatgtcgttatagctcccatcatttcaaggttaacttaagggatcaatactaaatagtatcatacacatggctattctttactctggtcataaaaagagctatttgcaaattcctacttagaagacagtctctcatttcccccaataaaaggtcatcaaaagcttttatcaaactcaagtggtagacttagagggataaattaagtaattatcattgattttcaaaatgaccgttcgttttgccaagcatggtttgcccatgcacttgggaagtggaatcaggagggtctggagttcaaagctagctttgctttacggcatattggaggcaagcatgggctatgtgaggtttaaaatggttggcttttcatttttattttatgaaacatttaccatcaaagccaacaactttgccactgtcttcttcctcaccactaaggccactgagctgtctaggtttccagagcttgtaactaagccctttgtactgtttgggacactccaccatttgagccagtgtgtagaatgctctcctagcctgctaacctgctatattgaagagcacagactggatggcttaatcaacagagatatattttctcacagttctagagactgatgtccaaggtcaaggtgctggccgacgcagtttccccagaggcctgtcttgctgtctttccaatagccactctcttgctgcatccttgccttctttcctctgtagcaacaacctctgtctagatccctttctccctagttacattgtatcagggcccacatccatggcctcatttaaccttagttacttctttaaaagccttgtctcaaaaccatttgctctttagcgatctcctccaatttggaattcttcatcttgggaagctccttaggacttaggaggtacttaaagaaggtgatgctgtccatcccacagggaagaagcctgttcaggttaagctcaggaaacaaataacaaattcaggaagtccctgaaactgataagctatcacccccccccccaagtatatacaaacaataagaactgctgaggtcacttttagataatccaaaaattctggaagagacaaagaccagccaagctgcctagaagggacagttccaacccatctagctgcctgcaagtcatgctgtgagctccagatttccagctatgggagctgtcacccacgatggggcaggcttttgtartgaaactgtctttgagtcatttctgcacmtctaaataacctcaataaagctcattggttcatcccgttggaaaaaaaaaaaaaaaaa

SEQ ID NO: 2405 - DNA, 1757 bp, Rattus norvegicus
atcaattagtaggttgggaaactcagccttgccaaccatgctcgcacagcccttcagagaagcgctgaccggagactggagacaggatccatggttaagtcacagggcatcttcccctgttcctgttgttcccctgttcctgcctgttgcgtcatagacgtttgcagaatgccttattttatgagactcgctttgttcttgttttgcctgatggctcttgtggagagcagaaaacccaggaggaagagatggacagggcacctggaaacatccaagccaagtcacttgtataaaaagaacctcgatgtgaccaagatccggacaggaaaacctcggcctctgctcagggtagaggaccatgacttcaccatgaggccagcctttggaggcccggccatccctgtgggtgtggacgtgcaggtggagagtctggacagcatctccgaggtggacatggacttcaccatgaccctgtacctgaggcattactggagggatgagaggctggcctttcccagcagcagcaacaggagcatgaccttcgatggcaggctggtgaagaagatctgggtccctgacgtcttctttgttcactccaaaaggtcatttacccacgacaccaccaccgacaacatcatgctgcgagtgtttcccgatggccacgtgctgtacagcatgaggattaccgtcactgccatgtgcaacatggacttcagccacttccccctggactcccagacctgctctttggagctagagagctacgcgtacacggacgaggatctgatgctgtactggaagaatggggacgagtccctgaagacggacgagaagatctccttgtcccagtttctgatccagaagttccacacgacttccagactggccttctacagcagcacgggctggtacaaccgtctgtacatcaacttcactctgcgacgtcacatcttcttcttcttgctccaaacctactttcctgccaccctcatggtcatgctgtcctgggtgtccttctggatcgaccacagagctgtgcctgctagagtttcactgggcatcatgacggtgctgaccatgtccaccatcatcacgggcgtgaacgcctccatgcctcgagtgtcctacatccgggccgtggacatctacctctgggtcagctttgtgttcgtgtttctctcagtgttggagtacgcagctgtcaactacctgaccacagtgcaggaacagaaggaacggaagcttcgggacaaatttccatgcacgtgtggaatgcttcattcaagaaccatgacgctggatggaagctacagtgaatctgaggccaacagcctggctggctacccaagaagccacattcttccagaagaagaaaggcaagacaaaatagtggttcatttggccctcaacagtgaattgacttcatccagaaagaaaggccttctcaaaggccaaatgggactctatatcttccagaacacccatgccattgacaaatactccaggttgatatttcctgccttctacatagttttcaacctaatttattggtcagtgttttcctagggattctaaggctggatctgggaaagggcatgaccatccgttggtggatacatggacctaatgaccacacttcctacaccaggccaagcagctgctcctggcttggaggagcccagggacctccagctgccctcaccccatcttcatggctcttttcctagttcacactattccagatcacacttttgact

SEQ ID NO: 2406 - DNA, 1284 bp, Rattus norvegicus
atgggcagtgtgagaaccaaccgctacagcatcgtctcttcggaggaagacggcatgaagctggccaccatggccgtcgccaatggctttgggaatggcaagagtaaagtccatacccgacaacagtgcaggagccgctttgtgaagaaagacgggcattgcaacgttcagtttatcaacgtgggagagaaaggacagaggtacctggcggacatctttactacctgtgtggacatccgctggcggtggatgctggtaatcttctgcctcgcattcgtgctctcctggctgttctttggctgtgtgttttggttgatagctctgctccacggggatctggatgcttctaaagagagcaaagcgtgtgtgtctgaggtcaacagcttcacggctgccttcctcttctccattgagacccagacaaccatcggctatggtttcaggtgtgttacagacgagtgcccgattgctgttttcatggtggtattccagtcaatcgtgggctgcatcatcgacgccttcatcattggtgcagtcatggcgaagatggcgaagccaaagaagaggaatgagactctggtcttcagccacaacgctgtgattgccatgagggacggcaaactctgcttgatgtggagagtgggcaaccttcgcaagagccaccttgtggaagctcatgtccgggcacagcttctcaaatctaggatcacttcagaaggggagtacatccccttggaccagatagacatcaacgttggtttcgatagcggaatcgaccgtatatttctagtgtccccaatcactattgtccatgaaatagacgaagacagccctttrtatgacttgagtaagcaggacattgacaatgcagactttgaaatcgttgtcatcctggaaggcatggtggaggccactgccatgacaacgcaatgccggagttcatatctggccaatgagattctctggggtcaccgctacgagccggtgctctttgaagagaagcattgctataaagtagactattcaagattccataagacttacgaagtacctaacactcccctttgtagtgccagagacttagcagagaagaaatacatcctctcaaatgcaaattcattttgctatgaaaatgaagttgccctaacaagcaaagaggaagaggacagtgagaacggagttccagagagcacaagtacggactcacctcctggcatagatctccacaaccaggcgagcgtgcctctagagcccaggccyttaaggcgagaatcggagatatga

SEQ ID NO: 2407 - DNA, 3182 bp, Rattus norvegicus
cacgaggggtttacacgcctctgctagctggacctgcgacaccagagtggctcagggcggctgtcggtacgtaggcaatgcctgaggctatggaatcccctggagagccctgagagccacacgcaccgccttgaagggatcgccagaagttagccccaagggttcagagaagctctctgctctacgactatggccggtgattctaggaatgctatgaatcaagacatggagataggagtcacctcccaggaccacaagaagatccccaaacaggctcgggattacatccccattgccacagaccgcactcgcctgctgccggaaggcaagaagccacgccagcgctacatggagaagaccggcaagtgtaacgtgcaccatggcaatgttcaggaaacctaccgctacctaagtgacctcttcaccaccctggtggacctcaaatggcgcttcaaccttctggtcttcaccatggtctacaccattacttggctattctttggcttcatctggtggctcattgcttatgtccgaggtgatctggaccacgtgggtgaccaagagtggatcccttgtgttgaaaaccttagtggctttgtgtctgctttcctgttctccattgagacagaaacaaccattgggtatggcttcagagtcattacagagaagtgtccagaggggatcattctccttctagtgcaggccatcctgggctctattgttaatgccttcatggtgggttgcatgtttrtmaagatcagccagccaaagaagagagcagagaccctcatgttctccaacaatgctgtcatctccatgcgggatgagaagctgtgcctcatgttccgggtwggggacctccgaaactcccatatcgtggaggcctccatccgcgccaagcttatcaagtcccggcagaccaaagaaggggaattcatccccttgaaccagaccgacattaacgtgggctttgacactggtgacgaccgcctcttcctggtgtcccccctcatcatctcccatgagatcaatgagaagagccctttctgggagatgtctcgtgctcaactggagcaggaagagywygaggtygtggtcatactagaagggatggtagaagccacaggcatgacttgccaagcacggagctcttacatggatacagaggtgctctggggtcaccgattcacaccagtcctcaccttggaaaagggcttctatgaggtggactacaacactttccacgacacctatgagaccaacacacccagctgctgtgccaaggagctggcagaaatgaagaggaatggtsagctcctccagtccttgcccagtcctcctttgcttgggggctgcgctgaggctgagaaagaagcagaggctgagcacgatgaggaggaggaacccaatggactgagtgtgtcccgggcaacaaggggctcaawgtgaagcctgtgtgctacccagagcctcttcctgtcagacaccaaggagcctgagaggccagagaggcaattagttgagcaagctttgtggagtcccaggagtatgggacttctacaaagaggaacagtgtggtgaggcctcgcatctcctcctcagggcctcggagcaagtggcgttgactaggcctcccaagaagtgttttctcggcctctgtgaaggagagcattaggggtcaccagggtgggcttcccaaggaggagttcttaggtgtcatccatcctctctctgactgctgaagcctgctcactggcctccctgattctctgtttcctcagcacaatcactgaggcctgtgaatggagggactaattccatccatggatactcaggcctccaactggggatgagttcacagaggccttccaggggcaatgccctgcagtytgaggccaaaacccactgatttaatagcttyttagcaaggccccttaacctytgawamwammwamwrwrwrttttcctcttctgtgtcctcttccatgacactacggcttacagggtaattgatttaattagagtggccctaggacactgagtacctaggagcacacacaatgtcgtcctcacaactgcctggcactcctactcacacttcaaaggacagacacagcagttgtggcttttgtaggagtgtgtggcaaaagaacttcaaagaaccgacctctaaagcggtcccggggaacatgtgaatttcagagagccagattagctcattggtactaacatagggatggcagacaggaaagagacacaaggataattttaaaataagtatctggagcctggtgttgtgatgcatgcctgtaatcctagcatttggcaggctgaggcagaattgagaatttgaagccagccgggctatatagccctgwctgaaaaaagcaagagacaaactacaaccaaggaaacatctgccacagttgttgcatggggctcctcggagaaaagtaggctatgaaacacaagtgacaagaggccataaaggcatcttcactgccaarmmaarwrwrrammagagtcttggctgccgctgagatgcctctgggcctcctccctatggaacagctccaacaggtggtgggacctagagggaggtccctgagaacaggatgagaggttggtgggtgactagggaaagaagagtctaagtgtggagcagagccttggggtccacagcctcagagacctttctcttccagtctaggagatctgatggtcggtcagtgaagcattatgttgaaaacmragktggcctggtcttgggaatatgctagcatgatccccaacacctctacccgggtgttcatggctctcaaccagcctctgagaatagaagcaccttcctgccaggccctagagaactttctctggcatctccaaggagatgagacgctaaggctagggaacagcatcctaacctcaggccttgttccccttacagggtgcccaggtctctakgctggtgagaaggtgtcctaggatggctagctacattgtggrccagacacagatagaasaggggaaccttgrcttgttwtctgggcygaatcttgaaagacagtcyaaagccagtggttctcaaccttcctaatgctgtgaccttttaatatagttcctcatgttgtgatgaccccaatcataaaattatttttgttcctaaaaaaaaaaaaaaaaaa

SEQ ID NO: 2408 - DNA, 7986 bp, Rattus norvegicus
gaggggaccaagccaattctcctttgcagcaaaaaaaagagaaaaaagaaaaaaaagaaaaatttacatgtatatattactaagataatatatacatctgattttattttttacaaaaagtttattttgctccatttttcaaaaaaagaaggagcgtgggtggcaggcggtttttataaattattcttatttttgattatttgtctctgtccttccccaccccctgctgaagcgaaaataagggcagggaccgcgggctcctacctatcagtaacctcccatacccgttcctccccctccctaacgctgagcatagtgccctgcacacagtaggcgctcaataaatgttcgtggatgatgatgatgatgatgatgaaaaaaatgcagcatcaacggcagcagcaagaggaccacgcgaacgaggcaaactatgcaagaggcaccagactccctatttctggtgaaggaccaacttctcagccgaacagctccaagcaaaccgtcctgtcttggcaagctgcaattgatgctgctagacaggccaaggccgcccagaccatgagcacgtctgcacccccacctgtaggatctctctcccaaagaaaacgtcagcaatacgccaagagcaaaaaacagggtaactcgtctaacagccgacctgcccgtgccctcttctgtttatccctcaataaccccatccgaagagcctgcattagtatagtggattggaaaccatttgacatatttatattattggctatttttgccaattgtgtggccttagctatttacatcccgttccctgaagatgattctaattcaacaaatcataacttggaaaaagtagaatatgccttcctgattatttttacagtggagacatttctgaagattatagcgtccggactgctgctgcatcctaatgcttccgttaggaacggatggaacttactggattttgttatagtaatagtaggattgtttagtgtaattttggaacaattaaccaaagaaacagaaggcgggaaccactctagtggcaaatcaggaggctttgatgtcaaagccctccgtgccttccgagtgttaagaccgcttcgacttgtatcaggagtgcccagtttacaagttgttctgaactccattataaaagccatggtccccctcctccacatagcccttttggtgttattcgtaattatcatctatgcgattatagggttggaactttttattggaaaaatgcacaaaacctgtttttttgctgactcagatatagtagctgaagaggacccagctccatgcgcgttctcagggaatggacgccagtgtgccgccaatggcacggaatgtaggagcggctgggtcggccccaatggaggcatcactaattttgacaactttgcctttgccatgctcactgtgttccagtgcatcaccatggagggctggacagatgtgctctactgggttaatgatgcgataggatgggagtggccatgggtgtattttgttagtctgatcatccttggctcatttttcgtccttaacctggttcttggtgtccttagtggagaattctcaaaggaaagagagaaggctaaagcacgtggagatttccagaagcttcgggagaagcagcagctggaagaggatctcaagggctacttggactggatcacccaggcagaagacatagatcctgagaatgaagaggagggtggagaggagggcaaacgaaacactagcatgcccaccagtgagaccgaatctgtgaacacagagaacgtaagtggtgaaggcgagacccagggatgctgtggaagtctctggtgctggtggaaaagaagaggcgcggccaagactgggccctctgggtgtcggcggtggggccaagccatctcgaaatccaagctcagatcgcacggggcccgcgaggctttgtgtgtgtgccggtgcagccttgaatctctcgtgaaactatggacgtctaggttctcagcccacttgcaggctgcatatgtcagaccctacagccgtcggtggcgtcgctggaaccggttcaatcgcaggagatgcagggcagctgtgaagtctgtcacgttttactggctggtgatcgttctggtgtttctcaacactctgacgatttcctctgagcactacaatcagccagactggctgacgcagattcaagatatagcgaacaaagtgctcttggctttgttcacctgtgagatgctggtgaagatgtacagcctgggcctccaggcctacttcgtctctctcttcaaccgcttcgattgctttgtggtgtgtgggggaatcaccgaaaccatcctggtggaactggagctcatgtctcccctgggcgtctctgtgttccggtgtgtacgtctcctgaggatcttcaaagtgaccaggcactggacttccctgagcaacttggtggcgtccctgttaaactccatgaagtccatcgcctctctgctgttgctgctcttcctcttcatcatcatcttctccctgctggggatgcagctgttcggagggaagttcaatttcgatgagacacagaccaagcgaagcaccttcgacaacttcccacaggcgctcctgactgtgttccagatcctgacgggcgaagactggaatgcggtgatgtatgacggcatcatggcctacggaggcccgtcctcctctggaatgattgtctgtatttacttcatcatccttttcatctgtggtaactatatcctgctgaagctcttcttggccattgctgtagacaatttggctgatgctgaaagtctgaacactgctcagaaagaggaagccgaagaaaaagaaaggaaaaaaattgccagaaaagaaagcctagaaaacaaaaaaaacaacaaaccagaggtcaaccagatagccaacagtgacaacaaggttactattgatgactatcaagaggaggctgaagataaggacccttatccaccctgcgatgtgccagtaggtgaagaggaagaggaggaggaagaggacgagcctgaggttcctgctggtccccgtcctcgaagaatctcagagttgaacatgaaggagaaaattgcgcccatccccgaaggaagcgcattcttcattcttagcaagaccaacccgatccgtgtgggttgccacaaactcatcaaccaccacatcttcaccaacctcatcctggtcttcatcatgctgagcagcgctgccctggccgcagaggatcccatccgcagccactccttccgcaacactatactgggctactttgactatgctttcacagccatctttacggttgaaatcctgttaaagatgacaacttttggagcgttcttgcacaaaggggctttctgtaggaactacttcaatttgctggacatgctggtcgttggggtgtctctggtgtcatttgggattcaatccagtgccatctcggttgtgaagattctgagggtcttaagggtcttgaggcctctcagagcaatcaacagagcaaaaggacttaagcacgtggtccagtgtgtctttgtggccatccgaaccatcggcaacatcatgatcgtcacgaccctgctccagttcatgtttgcttgcattggggtccagctgttcaaggggaagttctaccgttgcacagatgaggccaaaagtaaccccgaggagtgcagggggcttttcatcctttataaggacggcgatgtcgacagtcccgtggtccgtgagaggatctggcaaaacagtgatttcaatttcgacaatgtcctttcggctatgatggcgctcttcacggtctcgacttttgagggctggcccgcgttgctgtacaaagctatcgactcaaacggagagaacgttggtcctgtctacaactaccgtgtggagatctccatcttcttcattatctacatcatcatcgtggccttcttcatgatgaatatcttcgtgggcttcgtcatcgtcaccttccaggagcagggagaaaaggagtataagaactgtgagctggacaaaaatcagcgtcagtgtgtggaatatgccttgaaggcccgccccttaaggagatacatccccaaaaacccataccagtacaagttctggtacgtggtgaactcctcgcctttcgaatatatgatgtttgtcctcatcatgctcaacacgctctgcctggccatgcagcactatgagcaatccaagatgttcaatgacgccatggacattctgaacatggtcttcacgggggtcttcaccgttgagatggttttgaaagtcatcgcatttaagcccaaggggtattttagtgacgcctggaacacgtttgactccctcatcgtaatcggcagcattatagacgtggcactcagcgaagctgacaactctgaagagagcaatagaatctccatcacctttttccgtcttttccgagtgatgcggttggtgaagcttctcagcagaggggaaggcatccggactctgctatggaccttcattaagtccttccaggcactcccatatgtcgccctcctcattgccatgctcttcttcatctacgccgtcattggcatgcagatgtttgggaaggttgccatgagagataacaaccagatcaataggaacaacaacttccagacgtttccccaggcagtgctgctgctcttcaggtgtgcaacaggggaggcctggcaggagatcatgctcgcctgcctccctgggaagctgtgtgacccggactcagattacaacccaggagaggaatatacttgtgggagcaactttgccattgtctacttcatcagcttttacatgctctgtgcgttcctgatcatcaacctcttcgtggctgtcatcatggacaattttgactatctgacgagggactggtctattctggggcctcaccacttggacgaattcaaaagaatatggtctgaatatgaccccgaggcaaagggaaggataaaacaccttgatgtggtcactttgctccgacgtatccagcctcccctgggatttggaaagttgtgtccacaccgagtggcgtgtaagagattggtcgccatgaacatgcctctcaacagtgatgggacagtcatgttcaatgcaactctgtttgctttggtacggacggctctcaagatcaagactgaaggcaacctggagcaagctaatgaagagctccgcgctgtgataaagaaaatctggaagaagacaagcatgaagctacttgaccaagttgtccctccagctggtgatgatgaggtaaccgtggggaagttctatgcyactttcctgatacaggactactttaggaaattcaagaagcggaaagagcaaggcctggtggggaaataccctgcgaagaacaccacgatcgccctacaggcgggattaaggaccctgcatgacattgggccagaaatccgacgggctatatcctgtgacttgcaagatgacgaaccagaagactccaaaccagaagaggaagatgtattcaaaagaaatggtgccctgcttggaaactatgtcaatcatgttaatagtgataggagagagtcccttcagcagaccaataccacccaccgtcccctgcatgtccaaaggccttcaattccacctgcaagtgatactgagaaaccgctgtttcctccagcaggaaattcggtgtgtcataaccatcataaccataattccatagggaagcaagttcccacctccacaaatgccaatctcaataacgccaatatgtccaaagctgcccacggaaagcggcccagcattggggaccttgagcatgtgtctgaaaacggccattactcctacaagcacgaccgagagcttcaaagaaggtccagtattaaaagaacccgctattatgaaacttacattaggtctgagtcaggagacgagcagcttccaaccatttkccgtgaagaccctgagatacacggctacttccgagacccccgctgcttcggggagcaggaatatttcagtagcgaggagtgctgtgaggatgacagttctcccacctggagcaggcaaaactacagctattacaacaggtacccaggcagctccatggactttgagaggccccgaggctaccatcacccccaaggtttcttagaagatgacgactctcccattggctatgactcacggagatctccaagaagacgccttctacctcctaccccaccatcccatcggaggtcctccttcaactttgagtgtctgcgcaggcaaaacagccaagatgacgtccttccgtcgcctgccctgcctcaccgcgctgccctgcccctgcaccttatgcagcagcagatcatggccgttgcaggcctagattccagtaaagcccagaagtactcgccgagccactctacccggtcatgggccacccctccagcaacccctccgtaccgagactggaccccatgctacacccctttgatccaggtggatcgctcagagtctatggaccaggtcaatggcagcctgccgtcgctacaccgcagttcctggtatacagatgaacccgacatctcctataggactttcacaccggccagcctgaccgtccccagcagcttccggaacaaaaacagcgacaagcagaggagtgcagacagcctggtggaagcagtcctgatatccgaaggcttgggacgctacgcaagggacccaaaatttgyytcagcaacaaaacatgagatcgccgatgcctgtgacctaaccatagacgagatggagagcgcggccagcaccctgctcaatggaagcgtgtgtcctcgagccaacggggacatgggccccatctcacaccgccaggactatgagctccaggactttggtcctggctacagtgacgaggaaccagaccctgggcgagaggaagaggacctggcagatgaaatgatttgcatcaccaccttgtagcccagcgagagcaggcttggctccagcctgggakgggcacaggagggccagggataaagtgccwcataattaggaaagtttaggcactagttgggaggaaaatgctcaattagacttttgtacgagtgatttcacgcctcaaggaagccataaacctggtaggagcaggttctsagcggccaggcatgtgcgtacgcatgccacatgctcgggcccagccccagaagacagaatgtctggccccaccgagaggatgggcgagagcagcagcctggcctgcacagagaccaggactgcccaggagtccatgtctgccacccagggctcatgcccacgcccctttgcctgcagacacgagagaggtcaaaggtgatgacagtcaccatgcctgtgtcgttacctcaaccatcggtctagcatatcagacgctcgctgggcccggcatatccgtgtctgagcccccctcccccagagcactggttcctggtttctgtgcagccgttctgagtggcgcacaccagaacccagccgctagtggtcgcgatgaggggagtgggaccggaaccgttttgttaagcgatgccagtttacataaagagaacatcactcagacggtcagttctgtcacattaagggcaattgtaaactggaagggtagcgcacttgcaaaccaggtaaaacttagatacattagtttgtttaaaaattatagatttactgtacatgacttgtaatatacgatttgtatttgtaaararawrrwmwawawwttgtaattatcgtaccgtatttgaactgcagcaatatcccacgggtcctaacaatcgtagtttcccaccaaaacctagaaattattagtatttttactcgggctaaacagaactaggagaattagaggcaattctcacatattcagtaaaaagaatcttttggggataaacttttgagttcataagaacttgacacttcagaactttttctaaagtattttgagttactataaacctatctttacataag

SEQ ID NO: 2409 - DNA, 2446 bp, Rattus norvegicus
gcgacctaaaacgccggctgctggttgaactaggtacgggcctgtgggacgcagagctggggatccattstgagtgcctagggagccacaaggtgcggtcctgttccttccggcatcctgaagatgaaagcggactgaattctatctgcagtcctggcgmwmckgcagwgctsckgsagstkgasckkgycmagmgcykgcgragtggagtgtcatctttgytyaccaggtccatgaggacctggscaacatggtgcccactggccaggtsgsagaaaagcaagcctgygaagagcccaggcaggaccgagaacttaagtcctggcgatggctcgtgttctacctctgcttctttggcttcatggcacagttgcgacctggggagagcttcatcacaccctacctcctggaacgtaacttcaccaaggagcaggtgaccaacgagatcattccgatgctgccctactcccacctggccgtgctggtccccatcttcctgctcaccgactacctacgatacaagccagtcctggtcctacagtgcctgagcttcgtgtgcgtgtggctgctgctgctcctggggacctccgtcgtgcacatgcagctcatggaagtcttctacagcatcaccatggcggcgcgcatcgcctactcctcctacatattctccctggtgcagccctcccgctaccagcgcatggccagctactcgcgggccgcagtcctactgggcgtcttcatcagctccgtgctgggccaggtgctggtcaccctaggaggcatctccacctatatgctcaactgtatctccctgggcttcatcctcttcagcctgagcctctccctcttcctaaagcgtcctaagcggagcctctttttcaaccggagcgcacttgtgcaaggagccttgccctgtgagctggatcagatgcacccgggacctggccgtccagagcccaggaaactggagcgcatgctgggcacttgcagggactccttcctggtacgcatgctaagcgaactggtgaagaacgtccggcaaccacagctgcgtctctggtgcctctggtgggtcttcaactcggcaggctactacctgatcacctactatgtccatgtcctgtggaaaatcactgacagcagrctcaactacaacggtgccgtagatgccgcctccacacttctgagcgccatcacggccttcaccgcgggcttcgtgaacatccgctgggctctgtggtcaaagctggtcatcgcgagtgtcatagccatccaggctggcctggttttctgtatgttccagatcccggacatctgggtctgctatgtgaccttcgtgcttttccgtggggcctaccagttccttgtgcccattgccacttttcagattgcatcttccctgtctaaagagctctgtgcattggtcttcgggatcaacactttccttgccactgcgcttaagacctcgatcacactcgtggtctctgacaagcggggtctgggcctccaagtccatcaacagttccgcatctacttcatgtacttcctgacgctgtccatcatctgccttgcctgggctgggctggacggcttgaggtactaccggcgtggtcgccaccagccgctggcccaggcccaggctctgagtcccttggaggattctgtgcaggcgataagcctacaggatggagacctaaggagaccgcagccctcggcaccacagctgctcccagaggatggcagcgtagaagacggcagggcagacttgagagtcgaagccaaggcctgacctgtcttcaccttcctggcttcatcccagttcagccgccggattcctgactcagtggcagcccctcctgtgtgcactccagcctgaatcagcccttctggggtcccagtgcctgagacrwgkgggggcccccctgttgcctttcaggagccttcaggttaggccacagaactctctccttaggggccaccttttttaacagtggggcgacagacagcttgtccttccggtagcctytgaggaccctaagcccagcctacttcatgctttagcaatggstggagcctgctacagacactcrggaccgctccctggcttttgtgaaccacaatgtcaggccactacgagcctgggttgcmtactgcttgccaagragaacctgtgtaggggtcagctgtgcccaccaggytggtytgccctttgctytgggatgstcaggacaaatcamgtctgcccccagggmtagtgaggtagcccagacaccggacaaggtccgctgagcctgcagggtactggttacctgtcctaggctcctggtgaagctgccatacctccactctcggaggtgcttgtttgwatggttgtctgatttyttaaaacttgacattaaaatggagamsthmraaaaawaaaaaaaaaaaaaaaaaaaaaaaaaaa

SEQ ID NO: 2410 - DNA, 2226 bp, Rattus norvegicus
tttgctggtctccgtcagtcgccgacagcagcaagatgcggatcgcgcggtgtagacccggagcccggcggacgcagcttcgtcccgcttgagcgaggctgctgtttctcggaggcctctccagccaaggaaaaactacataaaaaagcatcggattgcttgctgacctggccttgctgtaactgaaggctcgctcaacctcgccctctagcgtttgtctggagaagtaccaccccgggctcctggggacacagttgcggctatggtgtcctccaccagcatcccagtggttaaggctctccgcagccaagtctccgactatggcaactatgatatcatagtccggcattacaactacacaggcaagctgaacatcggagtggagaaggaccatggcattaaactgacttcagtggtgttcattctcatctgctgcttgatcatcctagagaatatatttgtcttgctaactatttggaaaaccaagaagttccaccggcccatgtactatttcataggcaacctagccctctcggacctgttagcaggagtggcttacacagctaacctgctgttgtctggggccaccacctacaagctcacacctgcccagtggtttctgcgggaaggaagtatgtttgtggctctgtctgcctcagtcttcagcctccttgctatcgccattgagcgctacatcaccatgctgaagatgaaactacacaacggcagcaacagctcgcgctcctttctgctgatcagtgcctgctgggtcatctccctcatcctgggtgggctgcccatcatgggctggaactgcatcagctcgctgtccagctgctccaccgtgctcccgctctaccacaagcactatattctcttctgcaccaccgtcttcaccctgctcctgctttccatcgtcatcctctactgcaggatctactccttggtgaggactcgaagccgccgcctgaccttccgcaagaacatctccaaggccagccgcagttccgagaagtctctggccttgctgaagacagtgatcattgtcctgagtgtcttcattgcctgctgggcccctctcttcatcctactrcttttagatgtggggkgcaaggsgaaracctgtgacatcctgtacaaagcagagtacttcctggttctggctgtgctgaactcaggtaccaaccccatcatctacactctgaccaataaggagatgcgccgggccttcatcaggatcatatcttgttgcaaatgccccaacggagactccgctggcaaattcaagaggcccatcatcccgggcatggaatttagccgcagcaaatcagacaactcctcccacccccagaaggatgatggggacaatccagagaccattatgtcttctggaaacgtcaattcttcttcttaaaaccggaagctgttgatactgttgattctggcttcatcactcactaccctagcatttcaaaaacatctctctttctccactgctgcaaggaagaagcagccgggagcctgagagagggagggaagggagaatgtgcggcttggtgataccatgttgtakgtaggttatgattatgaacaatgccctgggaagggtggagatcagatctgcctgcagagggtttcctgcccccwccymwtytcytcamtwccytcrgwcgyttctgwttwtscmmcwkasycwwwkktcttttctccgtttttctcattccccttctctaccatcgctttcttttctctttctttaaaatttaggggcaacaaaaggaatcccacaaatggatattgtggaaaacatagtgctgaatgacggcaaagaatggtggtaaatcaaaagataaattaacttcataagactgctattctgaaatgcaacaatcttgtacagtcaggactgataaaatggagcaatcagacatttcagatgcccgtcaatgtaaaatcacctacttgaacattgtatgcaatacattcacacaaaaaagcaaatactgtagccttatttgaacaatactgaactcataaatactcatggtttcactctgtccaggcgcctaaggactatgctgctgtaatacaggaaaacacagcggatgcctcctctattaaaatgtcactcaagaaaagtctcttgtaacgtaaaggcaaacacatgtagctactgagctatgactgtccttggtcacactctatgggaaaaacaccggactccac

SEQ ID NO: 2411 - DNA, 1706 bp, Rattus norvegicus
caccagcctcctgaccacatggatctggctgcttaatcagccgagatcacaacctgggaagattggggacgctgatatgcgctccagctgctgagacaacttccagcttggctgtttacttctttgggtcccagggactctgtcctacacctcagcctctcctgccactgtgtgtgggttctgaagtcagctgctgggactcctccgaaggcatccaggaaggggggcaagaggggttaaaagacagccgaaatcccctccaactgctcaccctctgccgaccgcctgtgctgtggggttctgagaggaccttgcgctgtccggggaagcaatgcaagtctccatagcctgcacagagcacaatttgaagagtcgaaatggtgaggaccgacttctgagcaagcagagctccaccgcccccaatgtggtgaacgcagcccgggccaaattccgcactgtcgctatcatcgctcgcagcctggggaccttcacccctcagcatcacatttctctcaaagagtccactgcaaagcagactggcatgaaatataggaatcttgggaaatcaggactcagagtttcgtgcttgggtcttggaacatgggtgacattcggaggtcaaatttcagatgaggttgctgaacggctgatgacaattgcctatgagagtggagttaatctcttcgacactgcagaagtctatgctgctgggaaggctgaggtgattctggggagcatcatcaagaagaaaggctggaggaggtcaagcttggtcatcacaaccaaactctactggggtggaaaagccgaaacagaaagaggattgtcaagaaagcacatcattgaaggactgaaaggctccctccagaggctgcaactggaatatgtggacgtggtctttgcaaatcgcccagacagcaacacccccatggaagaaatcgttcgagccatgacgcacgtgatcaaccaaggcatggcaatgtactggggcacctcgaggtggagcgcgatggagatcatggaagcctactctgtcgcgcggcagttcaacatgatcccgcctgtctgtgagcaagctgagtatcatcttttccagagagaaaaggtggaggtccagctgccagagctctaccataaaataggggttggtgcaatgacatggtctccacttgcttgtggaattatttcaggaaaatatggaaatggggtgccagaaagttctagagcttcactgaagtgctaccagtggttgaaggaaaggattgtaagtgaagaagggagaaaacagcaaaacaagctgaaagacctctctccaattgctgaacgcctgggatgcacactacctcagctggctgtggcatggtgcctgagaaacgagggtgtgagctctgtgctgctgggatcatccactcctgaacaactcattgaaaaccttggtgccattcaggtcctccctaagatgacatcacatgtggtaaatgagattgataacatattgcgcaacaagccctacagcaaaaaggactatagatcctaaggcaatgcatgagccacttaagctgcatgagtaaatcctggtgggtaggcggtgcagaacggccttaccagccactcttttcaatcacttagcagcttgctgctcaacctctagtgtcccaggattctctgaggtctctgctgttgctaccactgtgcaccctgaattc

SEQ ID NO: 2412 - DNA, 1700 bp, Rattus norvegicus
acccatctttaggattcccagaacccaccatgcctgtttcacacatctgaaattctctattagcgctcctattgtgtttggagttttaaaaaaaattctaaagatttagcgtctcgtggatccagtgctggtccagggggtcgcccaatccgccgccacccacgcgaggagtcccgacctgagggataccgctcactcagcacagaacccgccccgcgtcacttttacgtcaaggtagcgcggccaatgagagccagagttcaatgattctgactctacgcgcgcggaccaatcgacgcatcggcgggagctgcaggatttgcatggactccgaaggccactgccaatgagactgtgactggcgtgaatcatagccaataataggatgctaggggcgtggccgcgggcgtcccacgaggtaaagatgctgcgggcggaacctgccggagcaagcgggattcgggggtgctgaagtcgcaagggcagggcgggaaggaagatccggaacggggcgtgggatccggagctggaggcccccaggatttcccctctgtgaaaagacacgctgatctagataagtgaggccggccccatgtatccggaatcaaccacggggtctccagctcgactctccctgcggcagacaggctcccccgggatgatctacagtactcggtatgggagtcccaaaagacagctccagttttacaggaatctgggcaaatctggccttcgggtctcctgcctggggcttggaacatgggtgaccttcggaggccagatcacagatgagatggcagagcacctaatgaccttggcctatgacaatggcatcaacctgttcgatacggcggaggtctacgcagctggcaaggctgaagtggtattagggaacatcattaagaagaaggggtggagacggtccagccttgtcatcaccaccaagatcttctggggcggaaaggcagagaccgagagaggcctttcccggaagcacataatcgaaggactgaaagcttccctggagaggctgcagctggagtacgtggatgtggywykwgsswwcckycmagwcmcsracaywcycatkgaagagactgtgcgggccatgacccatgtcatcaaccaagggatggccatgtactggggcacatcacgctggagctccatggagatcatggaggcctactcggtggctcggcagttcaacctgatcccgcccatctgcgagcaagcggaataccacatgttccagagggagaaggtagaggtccagctgccagagctgttccacaagataggagtaggtgccatgacctggtcccctctggcctgcggcatygtctcagggaagtatgacagtggcatcccaccytactccagagcctctctgaagggctaccagtggttgaaggacaagatcctgagtgaggagggtcgccgccagcaagccaaactgaaggaactgcaggccattgcagagcgcctaggctgcaccctcccacagctggscatagcctggtgcctgaggaacgagggcgtcagctccgtgctcctgggtgcttccaatgcagaacaacttatggagaacattggagcaatacaggtccttccaaaattgtcgtcctccatcgtccacgagatcgacagcattctgggcaataaaccctacagcaaaaarramwawarawmctaagtca

SEQ ID NO: 2413 - DNA, 2266 bp, Rattus norvegicus
gmmykcckgccttccctccgyggctccggcgctgsccggtcccctcgggcggcagctgccatgggcaccgacagccgcgcggscggagcacttytggcgcgggccagcaccctgcacctgcagaccgggaacctgctcaactggggccgcctgcggaaaaagtgtccgtccacgcacagcgaggagcttcgagactgtatccaaaagaccttgawtgawtggagctcccaaatcagccctgatttggtcarggagtttccagatgttttggaatgtaccatgtcccatgcagtggaaaagataaaccctgatgaaagagaaraaatgaaarkttctgctaaactgktcattgtargwtcgawttcttcatcatcaactagaaatgcarktgacatggcatgctcagtccttggagttgcacagctggactctgtcatcatggcttyccctccrwttgaagatggagttaatctttccttgkagcatttgcagccttactgggaggaattagaaaacttagttcagagcaagaagwtygtygctataggcacctcggatctwgacaaaacacagttggarcagctgtaccagtgggcacaggtaaaacccaatagtaatcaagttaatcttgcctcctgctgtgtgatgccaccagatttgactgcatttgctaaacagtttgacatacagctactgactcasaatkmsscamragractgctctctgaggcaagtttccaggaagctcttcaagaaagcatccctgacattgaagcccaggagtgggtgccactgtggctgytgaggtactcggtcatcgtgaaaagcagaggaatcatcaagtcaaaaggatacattttgcaagccaaaagaaagggttcttaactacagctcaagctcacaactcaggggccttgtatttatctggaacataagatwaaaattcatgataaaattgagatgtgtaaaaaaaaatyyrgcwckcgcctacaaaaagcgtcactgaggcgtgaatgtggtggtttggcaatgtgttgagtttragtacctccctggmgtctgcagcagcgcactcacaggaagcattgtattctcttcattaaactcttggtttctaactgaaawmrwmwawaaaraaaaatacttgcaatatatttcctttatttttatgagtaatagaaatcaagaaaatttgttttaagatatattttggcttaggcatcagggtgatgtatatacatattttttatttctaaaattcagkarctgcttcttactctatacttctataactaagcarwkrcattacagttgttaagacatactggaagagatttttttcctgtcgtttgacaaaataatctatctcagagtmrswatwscagtctactagtaatgtmaataaaattgattctttgatccmtgaawrraaawwwaawmmrwgtgttcttgcttgtagcatagctatgcactggccatgtgctctggtcatgtttgttccacctcttgcctacaaaggcagagtgtatctgagaaggaggctgctgctttaacatcattgttggcagtgtctaacagcagctactgctcttcccttcagacctggacctctctgtgcactctcagtgttgctgctcgctcaagaagattcaccacgttgattggattcacaccacacgcttagcactgtgggctctagagagacgaattaagaatcagacaagtaaaacttttgatggtctgcctatcagttgacaagakgggatacagccaggaaaggctgaadgggggaagaatcatttagttgtaatgtcacattawaaatcagaaaattgcaaararrmwawrawmmatacatgtagcacactgaatggttcaaatctatacatgtgtgtctataactcagtttccatttttctttaaaagctaacttgtatgccagtatttttaaatcatggacctttgtaaaactaattttgctcagaaatttcaacttagagaaaagaactagagttctatgttaaaccagtacagtagatctttttcctaagtgagactttgtggttactgattggatggtattctcaattagaagtacatgaaatcaactgatttgcctactaaaacttacagaatttgacctaagagcctataattatattgattgtatataatgctagatatataggtaactgttaaatttggcaatgttttcatgtagcatatactttaaatatatgttgtatttaaaaaaaaaaaaaaaaaa

SEQ ID NO: 2414 - DNA, 1063 bp, Rattus norvegicus
gccacttctggcactgggaaacgcttcctcagccacaccatggagcaaggaacggacttgcagtcacagattttcttccctacagaaaagaatttttggaaaaaaggcaaagaccacttcaggsaaratccrrgtacgccgmktcycraggramctwyagymrccgysakykyygccygvmtmgcaaratgggaaatgaggcgagttaccctttggaaatgtgctcacacttcgatgctgatgagattaaaaggctaggaaagagattcaagaagcttgacttggacaactctggttctttgagcgtggaggagttcatgtctctgcctgagttacaacagaaccctttagtacagcgggtcatagatatattcgacacagacgggaatggagaagtggacttcaaagaattcattgaaggagtctctcagttcagtgtcaaaggcgataaggaacagaagttgaggttcgctttccgtatctacgacatggataaagacggctatatttccaatggagagctcttccaggtgttgaagatgatggtgggcaacaacctgaaagatacgcagttacagcagattgtagacaaaaccataataaacgcagataaggacggggacgggagaatatcctttgaggagttctgtgctgttgtaggtggcctagatatccacaaaaagatggtggtrgatgtgtgactcwktgaagactctaccacccagcacttttgctttcttctccatctctgaagatctgctcaagacgtccagcartgctctctgtgtgtgtaaatggaagtatttttctctgtgaagccacattttccaacatgagcctcatraarmmaacgaagtgttattgaactcctaccctctcaataactcagtgtagcactttcaagtttgaggscatgswgcatgaaaagagcatatcagtatggtggagaaagggaaggggtggctctttaatttatttttcttcatcttttataacaagaaagtatctatatatacatatgtaaatatagatactttcttgttwtaaaaaaaaaaaaaaaaaa

SEQ ID NO: 2415 - DNA, 2319 bp, Rattus norvegicus
atgggctggttcactgggattgcctgtcttttctggggtatattacttacagcaagagcaaactatgcaaacggaaagaacaatgtgccaagactgaaattatcgtacaaagaaatgttggaatccaacaatgtgatcactttcaatggcttggccaacagctccagttatcacacttttcttctggatgaggaacggagtagactgtatgttggagcaaaggatcatatattttcattcaacttggtgaatattaaagattttcaaaagattgtgtggccagtatcttataccaggagagatgaatgcaagtgggctggaaaagatatcctgaaagaatgtgcaaatttcatcaaggtcctcaaggcttataatcagactcacttgtacgcctgtggaacgggggctttccatccaatttgcacctatattgaagttggacatcatcctgaggacaacatttttaaactgcaggactcacattttgaaaacggtcgtgggaagagtccttatgaccccaaacttctgactgcctctcttctaatagatggtgagttatactctggaactgctgcggatttcatgggacgagactttgctatcttcagaacattggggcaccatcatcccatcaggaccgagcagcacgactcccggtggctcaatgatcctagattcatcagtgcccatctcatcccagagagtgataaccctgaagatgacaaagtatattttttcttccgagaaaatgcaatagatggagaacattctggaaaagccactcatgctagaataggtcagatatgcaagaatgactttggaggacacagaagtcttgtgaataaatggacaactttcctgaaagcacgcctgatttgctctgtgccaggtcccaatggcattgacacacattttgatgaattacaggatgtattcttaatgaactctaaagatcctaaaaatccaattgtctatggagtgttcacaacatcaagcaacatctttaagggctctgctgtgtgtatgtacagtatgagtgatgtaagaagggtgttccttggtccatatgctcacagagatggtcccaactatcagtgggtaccttaccaaggaagagtcccttatccacgaccaggaacttgtcccagtaaaacatttggtggatttgactccacaaaggaccttcctgatgatgtcataacctttgcaagaagccatccagccatgtacaacccagtgtttcctattaataatcgcccaataatgatcaaaacagatgtaaattatcagttcacacaaattgttgtagaccgggtggatgcagaagatggccagtatgatgttatgttcatcggaacggatgttggaactgtccttaaagtggtttcagtccccaaggagacttggcatgacctagaagaagttcttctggaagaaatgacagtcttccgggaaccaacaactatttcagcaatggagctttctactaaacagcaacaactgtacattggctcaactgctggagtagcacagcttcctctacaccgttgtgacatttatggcaaagcctgtgcggaatgctgccttgctcgggacccttattgtgcctgggatgggtcatcatgctcacgctattttcctactgcaaagaggcgcacaagacgacaggatataaggaatggagacccactgactcactgctccgacttgcagcatcatgataatcatcatgggcacagtcttgaagagagaatcatctatggagtagaaaatagtagcacattcttggaatgcagtccgaagtcacagagagccttggtatattggcaatttcagaggcgaaatgaagatcgaaaggaggagatcagagtgggtgatcatatcatcaggacagaacaggggctcctgcttcgtagtctgcagaagaaggattcaggcaattacctgtgtcacgccgtggagcacggtttcatgcaaactcttcttaaggtgaccctggaagtcatcgatacagaacatttggaggaacttcttcataaagatgacgatggagatggctctaagaccaaagaaatgtccagtagcatgacgcccagccagaaggtctggtacagagacttcatgcagctcatcaaccaccccaacctgaacacaatggatgagttctgtgaacaagtgtggaaaagggaccgaaaacaacgccgacaaaggccggggcactctcaagggagcagcaacaagtggaagcacatgcaggagagcaagaaaggtagaaacaggaggacccacgagtttgagagggcacccaggagtgtctga

SEQ ID NO: 2416 - DNA, 2764 bp, Rattus norvegicus
ccgtctctactcttttgtgaggactgcagccaacaccgctgacaatgcagatctttgtgaaaaccttaactggtaagaccatcaccctggaggtcgagcccagtgacaccattgaaaatgtcaaggcaaagatccaggacaaggagggcatcccccctgaccagcagaggctgatctttgcaggcaagcagctggaagatggccgcaccctgtcagactacaacatccagaaggagtccaccytgcacctggtcctkcgcctcagagggggcatgcagatctttgtgaagaccctgacaggcaagaccatcaccctggaggtcgagcccagtgacaccattgaaaatgtcaaggcaaagatccaggacaaggagggcatcccccctgaccagcagaggctgatctttgcaggcaagcagctggaagatggccgcaccctgtcagactacaacatccagaaggagtccaccttgcacctggtccttcgcctcagagggggcatgcagatctttgtgaagaccctgacaggcaagaccatcaccctggaggtcgagcccartgacaccattgaaaatgtcaaggcaaagatccaggacwagkagggcatcccccctgaccagcasaggctgatctttgcaggcaagcagstggaagatggccgcaccctgtcagactacaacatccagaaggagtccaccctgcacctggtccttcgcctcagagggggcatgcagatctttgtgaagaccctgacaggcaagamcatcaccctggaggtcgagcccagtgacaccattgaaaatgtcaaggcaaagatccaggwcaaggagggcatcccccctgaccagcagaggctgatctttgcaggmaagcarctkgwagrtkgccgcaccctgtcagactacaacatccagaaggagtccaccctgcacctggtcctgcgcctcagagggggcatgcagatctttgtgaagaccctgacaggcaagaccatcaccctggaggtcgagcccagtgacaccattgaaaatgtcaaggcaaagatccaggacaaggagggcatcccccctgaccagcagaggctgatctttgcaggcaagcarctggaarwtggccgcaccctktyagactwcaacatycagaaggagkycaccctksacctggkccttygvctyaragggggcatgcmgawctttgkgaaramcctkrcaggcaaramcatyamcctkgmggtcgagcccarkgrcaccawtgaaaawgkyaaggcaaaratccaggacaaggrgggcatyccccctkaccarcarargctkatctttkcargcaarcarctkgaaratggccgmaccctgkcaractwcaacatcmaraaggagtcmaccytgcacctggtccttygsctyaragggggcatgcagatctttkkgaaraccctkrcasgcaagaccatcaccctkgaggtcgagcccagkgacaccattgraaatgtsaaggcawwgatycakgacaaggagggcawhccccctgaccagcagaggctgatctttgcakgcaagcagctkgragatkgscgcaccctgtyagactwcaacatycagrargagkscamcctgsacctsgkycttygsctcaragggggcatgcagatctttgtgaagaccctgacasgcwagaccatcaccctggargtygagcccagtgacaccattgaaaatgtcaaggcaaagatccaggacaaggagggcatccyccctgaccagcagaggctgatctttgcmggcaagcagctkgaasatgrccgcaccctgtcagactacaacatmcaraaggagtccaccctgcacctggtyctgygyctmakagggkgcatgcrgatmtttgtgaagaccctgacaggcwagaccatcaccctsgrggksgagcccagtgacaccattgaaaaygtmaaggcavasrtccaggacaaggwgggsatcccccctgamcwssaragsstgatctttgcaggcaagcagytggaagatgsccgcaccctgtcagaykrcamsakscrgmasgagkccaccctgcamytggwcmkkcgcytcagagggggcatgcagatctttgtgaagaccytgacaggcaagmccatcaccytggaggtcrrgcccagtgacaccmttsrraaygwsraggcaaagatccaggrcaaggagggcatcccccctgaccagcaraggytgatctttgcaggcaagcagytggaagatgsccscaccctgtcagrctacrrcatcsagraggagtccaccytgcacctgrtcytkcgccycagassrsrmrkgcagatcwttgtgaagaccctgacaggcaagrccatcactytggakgtcgagcccagtgttaacmccaagaaggtcaaacaggaagatactcgtacmttthtcmccacagtatytagaaagagcccttcttgtgcytgttcytgggtytgatggggaggtgtcttagytttccctatcttttaagctgttaacaagtttcattgcactttgaataaagttcttgcmttccmaaaarwmaawaaawaaaaaaattattggaagcggccgcaagcttattccctttagtgagggttaattttagcttggcactggccgtcgttttacaacgtcgtgactgggaaaaccctggcgttacccaacttaatcgccttgcagcacatccccctttcgccagctggcgtaatagcgaagaggcccgcaccgatcgcccttcccaa

SEQ ID NO: 2417 - DNA, 4042 bp, Rattus norvegicus
ctggagcttgcacacacagacagcacaccccaccctttaaggaagtaaagaggagagcagcaggggtgtggttaacgaccgaaaggaggaggtgggtggggggaaaacaacctgtcagcctcttactcagcctctgccggctgagccttgcgtcctacctgctggcggctgcactcaccttgcccagcccggagccctggcccgagtccgcgcctcgcccgagggactgcaatgtgctggtcctagctgcagtctgagaggatgtccggggtgtctgagcccctgagccgtgtaaaagtgggcactttgcgcccgcccgagggccccccagagcccatggtagtggtaccagtagacgtggagaaggaagacgtgcgtatcctcaaggtctgcttctacagcaacagcttcaacccagggaagaacttcaagcttgtcaaatgcacagtgcagacagagatccaggagatcatcacctccatcctcctgagtgggcgaatagggcccaacatccagctggctgaatgctatgggctgaggctgaagcacatgaagtcagatgagatccactggctgcacccacagatgactgtgggcgaagtgcaggacaagtatgaatgtctacacgtggaggctgagtggaggtatgaccttcaaatccgctatttgccagaagacttcatggagagcctgaaagaagacaggactacactgctgtacttttatcaacagctccggaatgactacatgcaacgctatgccagcaaggtcagtgaaggcatggctctgcagctgggctgtctggagctcaggagattcttcaaggacatgccccacaatgcacttgacaaaaagtccaactttgaactcctggmaaaagaagtcggtctggacctgtttttcccaaagcaaatgcaggaaaacttaaagcccaagcagttccggaagatgatccagcagaccttccagcagtatgcatcactccgggaggaagagtgtgtcatgaaattcttcaatactctggcaggctttgccaacatcgaccaggagacctatcgctgtgaactcattcaagggtggaacattactgtggacctggtcattggccctaaaggcatccgtcagctgacaagtcaagacacaaagcccacctgcctcgccgagttcaagcagatcagatccatcaggtgcctccccttggaagagacccaggcagtactgcagctgggcatcgagggtgccccccagtccttgtccatcaaaacctcgtccctggcagaggctgagaacatggctgacctcatagatggctactgcaggcttcaaggagagcataaaggctctctcatcattcatgccaagaaagatggtgagaagaggaacagcctgcctcagatccccacactaaacctggagtctcggcggtcccacctctcagaaagctgtagcatagagtcagacatctatgcagagattcctgatgagaccctgcgaaggccaggaggcccacagtatggtgttgcccgtgaagatgtagttcttaaccgcattctgggtgaaggcttcttcggggaggtctacgaaggtgtctacacgaaccataaaggggaaaaaattaatgtggccgtcaagacctgtaagaaagattgtaccctggacaacaaggagaagttcatgagtgaggcagtgatcatgaagaatcttgaccaccctcacatcgtcaagctgattggcatcattgaagaggaacccacatggatcgtcatggaactgtatccttatggggagctgggacactacctggagcgaaataaaaattccctgaaggtacccactctggtcctgtacgctctgcagatatgcaaagccatggcctatctggagagcatcaactgtgtccacagggatattgctgtccggaacatcctggtggcctctcctgagtgtgtgaagctcggggactttgggctctcccggtacattgaggatgaggactattacaaagcttccgtgacccgtctccccatcaaatggatgtcccccgagtccatcaactttcgccgctttacaaccgccagtgacgtctgsaygwkkgctgtatgcatgtgggagatcctcagctttgggaagcagcctttcttctggcttgaaaacaaggatgtcatcggggtgctggagaaaggggacaggctgcctaagcccgaactctgcccgcctgtcctttacacactcatgacccgctgctgggactatgaccccagcgaccggccccgctttacggagcttgtgtgcagtctcagtgacatttatcagatggagagggacattgcaatagaacaagaaaggaacgctcgttaccgaccccccaaaatattggagcccactgcttttcaggaacccccacccaagcccagccggcccaagtacaaacaccctccacagaccaatctgctggctcctaagctgcagttccaggtccctgagggtctgtgtgccagctctcctacacttacgagccctatggagtatccatctccagttaactcgctgcacaccccgcctctgcaccgacacaatgtcttcaagcgccacagcatgcgggaggaggacttcatccggcccagtagtcgagaagaggcccagcagctctgggaggcagagaagatcaagatgaggcaggtcctagacagacagcagaagcaaatggtggaagattcccagtggctgaggcgggaggaaagatgcttggacccgatggtttatatgawtgacaagtccccactgaccccagagaaggaggccggctacacggagttcacagggcccccccagaagccaccacggctcggtgcacagtccatccagcctacagccaacttggacaggactgatgacctcgtgtaccacaatgtcatgaccctggtggaggccgtgctggaactcaagaacaagctcagccagctgcctcctgaggagtatgtggtggtggtgaagawtgtggggctgaacctgcggaagctcatcggtagcgtggacgrtctyctwmcctycttgccagcatcttytagaacagagrttgaagggacccagaaactgctcaacaaagacctggcagagctcatcaacaagatgaggttggctcagcagaacgctgtgacatccctaagtgaggactgcaagcggcagatgctcacagcatcccataccctggctgtggatgccaagaacctcctggatgctgtagaccaagccaaggttgtggctaatctggcccacccgcctgcagagtgatcaagggagggaccacctgcctgcatcttctgccccaacctttcctgccttgcctttggttattggtcttctagggaaagctgagaagagtcctccccttaccactttgcacgacccccctttccccaacccaccccagactgtgctacttgggctacatctggacagaaaggactctgggcacagacacggggtggggtgacatagwcataggggtacttctgccagccattccctcctaccccagcctgggttgctggagcatcattggggtcataactgtacccctaccagccaagatggctttctgcatggacatttgagagccagtatttctctgtcctctttagccctcagggacccctgatacagaggggacagagaggggttttatttgtagagaagctggtgagatgagagctgggcatggctctcttgtacagtgtacattggaatttatttaatgtgagtttggcctggacagacagccatgggmcacagtccargmrcmagykrmtsmrgcsasaggraagawgcrgasycaggkktyagaatgggacttcatgtcctccctgcgtttctcttctccctctttcctcctcccctcttttcttagtcctcctttttctcttcccccttttcacatctgttcctttcctctctcacatttgtggagaacatccatttaccttttctctttttgatctgtggttgaattaaaatcattagcattcrmwwwrwrrwwaaaaaa

SEQ ID NO: 2418 - DNA, 1896 bp, Rattus norvegicus
ggcacgakgcgggctctcccatctcggttctctggtcccggccctccgattgcccccgccgcatcccgccgccatgcgcttcagctgccttgcgctgctcccgggcgtggcgttgctgctcgcctcggccctcctcgcctccgcctcagacgtgttggaactgacggacgaaaacttcgagagtcgcgtctccgacacgggctcagctgggctcatgctagtcgagttcttcgccccatggtgtggacattgcaagaggcttgcccctgagtatgaagctgcagcaaccagattaaaaggaatagtcccattagcaaaggtggactgcactgccaacacaaacacctgtaataagtatggcgtcassggctacccaactcttaaaatatttagagatggtgaagaagcgggtgcttatgatgggcctaggactgccgatggaattgtcagccacttgaagaaacaagcaggaccagcttcagttcctctcaggactgaggacgaatttaagaagttcattagtgataaagatgcctcggtrstgrgctttttcagggatttattcartgatggccactccgagttcctraragsagscagcaactygrgagataactaccgatttgsacacaccaacgttgaatctctggtgraggagtacgatgataatggagaggggattactatatttcgkccattacatctggctaacaaatttgmagacaaaattgtggcatatactgaaaagaaaatgaccagwggcaaaatcaagaagtttattcasgaaagcattkttggtctctgtcctcatatgacaraagataakwaagatttgatacamggcaaggrcttactcacggcktactatgatgtggactatgaaaagaatactaaaggktctaactactggagaaacagggtcatgatggyggcaaagacattccttgatgctggacacammctcarctttgctgtagctagscgkaaaacctttagccatgaatwgtctgackttggmttagaaagcactactgragagattcctkktgtggctatcasaactgctaaaggagagaagtttgtcatgcaggaggagttctcgcgggatggcaaggctcttgagcggttcctgcaggaatactttgatggcaacttgaagagatacctgaagtctgaacmtatccccgagaccaacgawggacctstcaaggtggtggtagcagagagttttgatgacatagtgaatgctgaagacaaggacgtgctgatcgagttttatgctccttggtgtgscmactgtaagaacctggaacccaagkrcaaakagctgggggagaaactcascaaagacccaaatattgtcatagccaagatggatgccacagccawtgatgtgccttctccatatgaagtcaagggttytcctaccatctacttctcaccagccaacaagaagcyrrcwcsaragaagtatgaaggtgsccgyraattaaatgatyttatcagctatytacaacgagaagctacaaaccctcmtatarttcargaagaaaaacstadsawgaagaagwrrgcrcamgaggacctytaaagcaacagccaamkgcmcsastttmtaaaaggactcttacmccagagaaagcaaahccatcagagaggacagaatggatatactctgaatcctgttaaattttctctaaactkkktcttagctgcrctgkttsaaaawmmmarrmhhmrhkkmygtttgtgktttggggagaaaattatytgtgttgggaagaatktggtaggggkggggggaattkagttggggggttatyttctaatwttttttgtacatttggaacagtgacaataaatgtgccccctttawamwrwwrrwwwwwwwmmctc

SEQ ID NO: 2419 - DNA, 1902 bp, Rattus norvegicus
  misc_feature (1363)..(1363): n is a, c, g, or t
  misc_feature (1405)..(1406): n is a, c, g, or t
  misc_feature (1426)..(1426): n is a, c, g, or t
  misc_feature (1437)..(1437): n is a, c, g, or t
  misc_feature (1468)..(1468): n is a, c, g, or t
  misc_feature (1514)..(1516): n is a, c, g, or t
  misc_feature (1614)..(1614): n is a, c, g, or t
  misc_feature (1618)..(1618): n is a, c, g, or t
  misc_feature (1620)..(1620): n is a, c, g, or t
  misc_feature (1642)..(1642): n is a, c, g, or t
  misc_feature (1644)..(1644): n is a, c, g, or t
  misc_feature (1656)..(1658): n is a, c, g, or t
  misc_feature (1667)..(1667): n is a, c, g, or t
  misc_feature (1693)..(1693): n is a, c, g, or t
  misc_feature (1772)..(1772): n is a, c, g, or t
gggactctctcatgccgccatacggagatggctgttttgggtgcccctggtgtgctctgtgacaatggagcaactgcagagagacctaccctggaccaccactgggatctctggaagaaaactcgcatgagaaggaatacagatcagaatgaagaagacgtacgacgtctcatctgggaaaagaatctcaagtttataatgcttcacaatctggaacattctatgggaatgcattcatacagtgtgggcatgaaccacatgggagacatgacacctgaagaagtcataggttatatgggctctctgagaattcccaggcmctggaatagaagtggcactctcaagtcaagctctaatcagacattgcccgactctgtggactggcgagaaaagggctgcgtcactaatgtgaaataccagggctcttgwggttcctgctgggctttcagcgccgagggggcccttgaagggcagctgaagctgaaaacggggaagctggtgtctctcagtgctcagaacctggtggattgctcaaccgaagaaaagtacgggaataaaggctgcgggggtggcttcatgaccgaagctttccagtacatcatcgatacgagcatcgactcagaagcttcctatccctacaaagccatggatgaaaagtgtctctatgacccaaaaaatcgagctgccacgtgttcaaggtacattgagctccccttcggcgatgaagaagctctgaaagaagcagtggccactaaagggcctgtctctgtgggcatcgacgacgccagccattcctccttcttcctctaccaaagtggtgtctatgatgacccytcctgtaccgagaatrtgaatcatggtgttctcgtggttggctatgggactcttgatgggaaagactactggcttgtgaaaaacagttggggccttcactttgstgatcaaggatatattcggatggcgagaaatamcaaaaatcactgcgggattgctagctattgctyttayycrgmamkhkaaaycgtttyttctttttctaatgggtcmcaaagacggaatacactytaatttaattttgtytgmtccatccggaggacccaagtgtgtcgtgatcagtgtgtamawwytgtgctwwctggctkacagcttkkttgttttataactttacctctytytgaaaagtytgtaagcaaggacgckstraggayggagctggcmgyytstyctmrawattctyyyyatgcttkyaccctgtygyytmatgtgtytamtamccctttkkrmcwcagataycccyaaagkgcctaataaaatctgtcatttyawgctcmraaawwawawwwwmwwwcttattttttacttnaaattgttattgtggtttgctaagtttttattattccttttnngatggtgagttttgtatttntttatgccttntgtggcacctttgggcttggttctgtttttnatacacccaccttgtgtgtggttagtaccttaggatgggaaaaaannntctgtttctggtctctgtgtggagcctccctacaacctttataaaattgcgggcccttttttggtcaaaatctaatcattttttcccttcatatattnctcntncattagatttttgggtcggttnanaattatgtctgnnnttttttggngatctagtcttacctctgggtttttntcccttttatcttaaactaggtttggctctccaagctcttttaaatggggtcgaaaatgtgtgtctctctccccctcgnaagccggaggtcattataaacccctcgtcggtggttttgtttgttaacacccccaatgtgacctggcttacactatgcctagggtctctaatccctcagcttcttttagctttattttctaatatattcg

SEQ ID NO: 2420 - DNA, 2023 bp, Rattus norvegicus
gaattctccaaatctagtttgtttttttttctggtcattttttttaattctgcgcataaatattttaggacgcatacgggaattttgcctccgggaccgtttgtaatagccaaagactgaactccaaactctgaaagcgaggctccttggggcatttgactttgaattctgggttgcccacttttcaatgcactaagcggccagttgctaaccctgcctgggtgtaaggccgatccgcgtaactagatctcagtcctgctacccccacaaccctccggtagtaataaaggctcctgaacttgtatgttggtctcccgggagcagcttgcagaagatccgagtccctgtcgccgtctagtaggagctgttttcagggtccttactcaatcggcttgttgtgatgcgtatccccgtagatgccagcacgagccgccgcttcacgccgccttccactgcgctgagccccggcaagatgagcgaggcgctgccgctgggcgccccggatggcggcgccgccctggccagcaagctgaggagcggcgaccgcagcatggtggaggtactagctgaccaccccggcgagctagtccgcaccgacagccccaacttcctctgctccgtgctgcccactcactggcgctgcaacaagaccctgcccatcgctttcaaggtggtagcgctgggcgacgttccggatggcactctggtcaccgtcatggcgggcaatgacgaaaactactcggcggagctgagaaacgccaccgcggccatgaagaaccaagtggcgagattcaacgacctcaggtttgtcggtcggagcggcagaggcaagagcttcactctgaccatcaccgtctttacaaaccccccacaagttgccacctaccatagagccatcaaaatcacagtggacggcccccgagaaccccgaagacatcggcagaaactagatgatcagaccaagcccgggagtttgtccttttccgagcggctcagtgaactggagcagctgcggcgcacggccatgagggtcagcccgcatcacccagcccccacgcccaaccctcgggcctccttgaaccactccactgcctttaaccctcagcctcaaagtcagatgcaggatgccaggcagatccagccgtccccaccgtggtcctatgaccagtcttaccagtacctggggtccatcacctcttctgtgcacccggcgacacccatttctcccggccgagccagtggcatgaccagcctctcagcggaactttccagtcgactctcaacagccccggacctgacagccttcggcgacccgcgccagttccccacgctgccgtccatctccgacccgcgcatgcactacccaggcgccttcacctactcgcctcctgtcacatcgggcatcggsattggcatgtcagcsakgagctcgacctctcgctaccacacctacctgccgccgccctacccaggctcctcgcaggcgcaggccgggcccttccagaccggctcgccctcctaccacctgtactacggcacctcggcaggctcctaccarttctccatggtgggcggcgagcgatcacccccgcgcatcctgccgccctgcaccaacgcgtccaccggagccgcgctgctcaaccccagcctccccagccagagcgacgtggtggaaaccgagggcagccatakcaactckcccaccaacatgccacccgcgcgcytggaggaggctgtctggcggscmtactgagcgccttcgggggactgagcccgccgtccatgcacagaccccgccaggagagcccttggagsccaacaggagggaaactgtgaatgcttctgatttagtaatgctgtgaataaaagaaagattttatacccttgacttcactttttaaccacgttgtttattccaaagagtgtggaatgttttcggttccgggtggggaagacgcagcccatcctgtttggcatctatttcttttccgcaccttattgattgcaaaaaaaaaaaaaaaaa

SEQ ID NO: 2421 - DNA, 2266 bp, Rattus norvegicus; identical to SEQ ID NO: 283

SEQ ID NO: 2422 - DNA, 2101 bp, Rattus norvegicus
ctctcgcgctctccctgtctcctgtccgctccgccgagcgatgcgagttcttggccccggcgacgccgcctccagctagagatctgcacccctcacccccggcccggccctctgcccagccctgccctgcgcgcgggggtcggagaaggcgccgggacgcaccgacggccgaggagcggcgatgcacatgcactagcggcaccccctaactcactccctccacacccccgccgccgccgccgccaccgcctccgcctccgcctcctcctccgcctccggcagccgcggcagaaggacccaccctgccccccaccccaccctccgccggctccggctgcggatccagcctcgactcctattttatttattttgggtcgtgcactagtctcggtgcctgcaacccgcgcctcccgggcccgcgggcgcctcctctctcggctccggagccccagaccccggccaccctcacctcgacacccccagaccccagccagccgccgctaatcttcgccgctggaatcttgatagaggctgtccttttggggggattctggtctttcgacaattttgttcccaaccaaggaaaggatatcgtgattttctcccctttgagcccaggctctgctctgtgggggggtggggggcgcgccgacccgaggagtcgtgccagccgagtcgtgcgggctgtggcagggaaggggccaccatgggatgtactctgagcgcagaggagagagccgccctcgagcggagcaaggcgattgagaaaaatctcaaagaagatggcatcagcgccgccaaagacgtgaaattactcctgctgggggctggagaatcaggaaaaagcaccattgtgaagcagatgaagatcatccatgaagatggcttctctggagaagacgtaaagcagtacaagcctgtcgtctacagcaacaccatccagtctctggcagccattgtgcgggccatggatactctgggcgtggagtatggtgacaaggagaggaaggcagactccaagatggtgtgtgacgtggtgagtcgcatggaggacactgaaccattctctgcagaactgctttctgccatgatgcgactctggggcgactcggggatccaggagtgcttcaaccgatctcgggagtatcagctcaacgactctgccaaatactacctggacagcttggwtcggattggagccgctgaytaccagcccaccgagcaggacatcctccgaaccagggtcaaaacaactggcatcgtagaaacccacttcaccttcaagaacctccacttcaggctgtttgacgttgggggccagcgatctgaacgtaagaagtggatccactgcttcgaggatgtcacggccatcatcttctgtgtcgcactcagcggctatgaccaggtgctccacgaggacgaaaccacgaaccgcatgcacgagtctctcatgctcttcgactccatctgtaacaacaagtttttcatsgatacctccatymkkcwcwksctcaacaagaaagacctctttggcgagaagattaagaagtcacccttgaccatctgctttcctgaatacccaggctccaacacctatgaagacgcagctgcctacatccaaacacagtttgaaagcaaaaaccgctcacccaacaaagaaatttactgtcacatgacttgtgccacagacacgaataatatccaggtggtattcgrcgccgtcaccgacatcatcattgccaacaatctccggggctgtggcttgtactgacctcttgtcctgtatagcaacctatttgactgcttcatggactctttgctgttgatgttgatctcctggtagcatgacctttggcctttgtaagacacacagcctttctgtaccaagcccctgtctaacctacgaccccagagtgactgacggctgtgtatttctgtagaatgctgtagaatacggttttagttgagtctttacatttagaacttgaaarrawwwaaaaaaaaaaraamawwwctcatgtgctttgtagctttaammaggaaaactcaccatttcatccatatttccttttattttgaagttaaaaaaaaaaaaaaaaaa

SEQ ID NO: 2423 - DNA, 1887 bp, Rattus norvegicus
atggccgcgtacctgttcctcctgggccttttcctgctgctgccacgacctgtccctgctccctgctacactgccactcggtcagaatgcaagcagaaccacaaattcgtgcctggtgtgtgggcggctggggaaggtgtggatgtgaccaccctccgccgctccagctccttcccagtgaacacagggaagttcctgaggcctgaccgcacctgcaccctctgtaaaaacgccctgatgaatgacggtatacagcgcctacccgtggcaatcgcccactggcggcctcacggctcacactgccagcgtaatgtggccacaaccaaggtcagctccacggagggtgtggcgcgggaggcggcyrckarkatcaataacgactggcgtgcggggctggatgtgaaccctaaaccggaagcaaacgtgcatgtgtccgtggctggctcccattccaagatagccaattttgcagccgagaaggcccatcaggaccaatacaactttaatacygacacagtggagtgtcgcatgtacagttttcgcctggcacaaaagcctccactccaccctgacttcagaaaggcactcaagaaccttccccacaactttaacagctccacagagcatgcttaccgtagactcatctcttcctatgggactcattttattacggctgyrgryctrggwkgcygcrtskckgksmtsaygrcyytgcgtacctgtcagctgaccctggatgggctcacagctgatgaggtaggagactgcttgagcgtggaagcccaggtcagcatcggtgcccaagccagtgtctcaagcgaatacaaagcttgcgaggagaagaagaaacaacacaaaatcgccacctctttccaccagacctaccgtgagcgtcatgtcgaagtgctcggtggcccccttgactcctcgaatgacctgctcttcgggaaccaagctacccctgagcacttctctacctggatagcctcattgcccaccaggcctgatgtggtggactacagcctggagcccctgcacatactactggaagactcggacccgaagcgagaggcactgagacaggctatcagccattatgtgatgagcagggctcgctggcgagactgtaacckgccctgcagggcaggccagcataagagtagtcgtgattcatgccagtgtgtgtgccaggattcgaakgtcaccaaccaggactgctgcccacgccagaggggcttggccaagttgatggtaaggaatttccaggccaagggtctktggggggaytacatcacatctacggatgcttatctgaaggtcttctttggtggccaggagatcaggaccggtgtagtgtggracaatarccatccctcgtggagtgacaagatggactttgggaatktgstcytgyccacagggggacccytcagggtgcaggtctgggatgctgacaatgsctgggatgatgaccttcttggwacttgtgacaagtctcccaagtctggtttccatgaggtgaattgtcccctgamccacggcagtataaaattcatctaccaggccaattgcttgcccsatctcactggagagacctgcctggagtatgccccccaggggcttctaggagatccacsaggaaaccgcagtggggctgtgtggtaaaaacaaacaaaaaagacwtaaaaaammaaaaaaaaaaaamaaaacaaataacaaaacaaaacaaaaaaacccaaaaaacaaacaaaaaccatgcctgagagttgggtgtagtagcacatgccttcaatcccagcttttgggaggcaaacacaggtggagctctaggagttcgaggccagcctggtctacatagtgagacctatctcaataaaagcaaacaac

SEQ ID NO: 2424 - DNA, 2025 bp, Rattus norvegicus
ccccgagcgaactgctgaggatccgctgtctggcattctctcagccttttgtccgagccagagctgcattcagaggagagaggcccgctaaggagcagctggactcctgctgcgagccgaaagccccctaaggcagttgaggacctgggaaggaggctccctgctggtggcgcttctcctggtgctyccaatccgtgcgagactgaaaacggcggagcggctacgggactctcacaggagcaagctgcaacatgcaatcgtccgcaagccggtgcggacgcgccttggtggcgctgctgctggcctgtggcttgttgggggtatggggagagaaaagaggattcccacctgcccaggccacaccatctcttctcgggactaaagaagttatgacgccacccactaagacctcctggactagaggttccaactccagtctgatgcgttcctccgcacctgcggaggtgaccaaaggagggagggtggctggagtcccgccaagatccttccctcctccgtgccaacgaaaaattgagatcaacaagacttttaaatacatcaacacgattgtatcatgcctcgtgttcgtgctaggcatcatcgggaactccacactgctaagaatcatctacaagaacaagtgcatgagaaatggtcccaatatcttgatcgccagcctggctctgggagatctgctacacatcatcatcgacattcccattaatgcctacaagctgctggcaggggactggccatttggagctgagatgtgcaagctggtgccsttcatacagaaggcttctgtggggatcacagtgttgagtctatgtgctctaagtattgacagatatcgagctgttgcttcttggagtcgaattaaaggaattggggttccaaaatggacagcagtagaaattgttttaatttgggtggtctctgtggttctggctgtccctgaagccataggttttgatgtgattacgtcggactacaaaggaaagcccctaagggtctgcatgcttaatccctttcagaaaacagccttcatgcagttttacaagacagccaaagactggtggctgttcagtttctacttctgcttgccgctagccatcactgcgatcttttacaccctaatgacctgtgagatgctcagaaagaaaagtggtatgcagattgccttgaatgaccacttaaagcagagacgagaagtggccaagacagtattctgcctggtcctcgtgtttgccctctgttggcttccccttcacctcagcaggattctgaagctcaccctttatgaccagagcaatcctcagaggtgtgaacttctgagttttttgctggttttggactacattggtatcaacatggcttctttgaattcctgcattaatccaatcgctctgtatttggtgagcaagagattcaaaaactgctttaagtcgtgtktgtgctgctggtgccaaacgtttgaggaaaaacagtccttagaggagaagcaatcctgcttgaagttcaaagckrmcgmtcacggatacgacawcttccgctccagcaataaatacagctcatcttgaaggaaggaacactcactgaatctcattgtcctcatcgtggacagatagcattaaaacaaaatgaaacctttgccaaacccaaacggaaaaccgtgcttgcggaaaggtgtgcacgcatgggagagggattgttttttaaccgttytaactttccacacctgatatttcacgggctgtttacaacytaagaaasccatgggaatgaatgaagcctcgggaaagcacttagattyttagtcagcacttcagcacggctyttaaaagccctcabtgcactcacagcccacttacatttaaaaacaagaactcaaactytattcaggggtttattatccagtcctwtgaatytggatacaggaatgcatgacattgcaaaacaattyttaaagcaaagtttcaattgctcgrtttgrgmcaaaaaamaaammaaaaaaaaaaaaaaaaa

SEQ ID NO: 2425 - DNA, 2730 bp, Rattus norvegicus
agtgtactggagatctggacagaagggccagctggagtggtggccggctgtagagatcaaaagggatctgagctataatggggttctaatcacagctctacccctgggtggtgttgtgcaagtctctgacccctgaaagcctgctctgtctgttgctttgtctgccgaagactgtgtgcaagtctctgacccctgaaagcctgctctgtctgttgctttgtctgccgaagacttggcaagctaggatctgctccctgttggctcagcccataactctgagagcagactgtcactttagatagaaatgtcatcgggagcttgggaagaaagggtctccctctccagtatggacagaaaggttacagtccatgaagatgggtgtcctgtggtctcttgggtccctgaggagggagagatgatggaccagaaagacaaggaccaggtgaaggatcgaggccaatggaccaacaagatggagttcgtactgtcagtggcgggagagatcattggcttaggcaacgtctggaggtttccctatctctgctacaagaacgggggaggagccttcttcatcccctacttcatcttcttcttcagctgtggtatcccagtgttcttcctggaggtggcactgggtcagtatagcagccaggggagtgttactgcttggaggaagatctgtccccttctccaaggcattggcatggcatctgtggtcatcgagtcttatttgaacatctactacatcatcatccttgcctgggctctcttctacctgttcagctccttcacctgggagcttccctggacaacctgcaccaactcctggaacacagaacattgcgtggactttctgaactactcatcgaccagagccgcaagctactctgagaacttcacctcaccagtcatggaattctgggagagacgggttttgggtattacatcaggcatccatgacctggggtccctgcgctgggagctggccctgtgcctcctgctcgcctggatcatctgctacttctgcatctggaagggagtcaagtccacgggcaaggttgtttacttcacagccacttttccctacctgatgctgattattcttctgatccggggtgttacccttcctggagcctaccagggcatcgtcttctacctgaagccagacttgctccgcctcaaggacccccaggtgtggatggatgcgggcacccagatcttcttttcctttgccatctgccaggggtgcctcacggccctgggcagctacaacaagtaccacaacaactgctacagggactccatcgccctctgcttcctgaacagtgccaccagcttcgtggctggttttgttgtcttctccatcctgggcttcatggctcaggagcagggcgtgcccatttctgaagtggctgagtcaggtcctggactggctttcattgccttccccaaagcagtgacgatgatgcctttgtcccagctgtggtcctgcctcttcttcctcatgctcctatttctagggctggacagccagttcgtctgtatggagtgcctggtcactgcttccatggatatgtttcctcagcagctccgaaagagaggccggcgcgagctgctgatcctcgcagttgctatcgtgtgctacttgatggggctccttctggtcactgagggtgggatgtacattttccagctctttgactactacgcctccagcggaatatgcctactcttcctctccttgtttgaggtcatctgcattggctgggtgtacggggcggatcgtttctatgacaacgtggaggacatgattggctatcggccatggcccttggtgaagatctcttggctcttcctgacccctggtctttgcctggccaccttcttcttctccttgagcaagtatacacctctcaaatacaacaatgtctacatatacccttcttggggatactccattggatggctcttggctttttcctccatggcctgtgtaccgctctttattatcatcaccctcctgaagacccagggctccttcaagaagcgccttcaaagactcatcacgccagatcccagtctgccccagccagggaggcgttcacctcaggatggctcctctgctcaaaactgttcgacctctccagtcaagcaagaactcattgcctgggagaaggagacgcatttgtagggagtgccagaggccaggtaactccagagccaggaacctggtcaaggctagctcctcccagggtgaacctctctyccaccctgttgagacctcscaggtctstggacacccctgctggtcttsgtttggstgrgacagcctgtcacmtaccagtcctttccagatgtgctccaggaatctgtttgccaagacttttgaactcaatgtcctgactttttggatttaaaaaaatgaagaatcagaaaggcaaagtgatattttcaaggtcatgcagccttgcagagcccaagaccttccttggacttgytgctctctgctgaggagaacctccagcctcacccctgcagcagttaacaagcctgtgtggatcacccgctastamamrarwrmmwmwwmmttgtctcactccacttcagctgttgtgtgggtgggaggtcacctcatgcaggggcttgggactgggaacataccttgttaagttcccatctagcctctacctaccaaacttctcttggatctctaaaaaaaaaaaaaaaaaa

SEQ ID NO: 2426 - DNA, 4955 bp, Rattus norvegicus
cggccgcctggagccgcccgggcgcccgaggtctaaggctgccagccgggactggtcattttaagcgccacggggacccgctggcgctgccatccctcccgggttcctggtcgcgccacgatggggcacctgcctagggaaaggcgcgggggccgccgcctgctacctctgctcgggctctttgtgctgctcaagattgtttcaacgttccacgtgactgtccgagacgacaacaacatcgttgtgtctttagaagcttctgatgtagtcagcccaacctccgtgtatgttgtgagggtagctggcgaatccaaaaactatttcttcgaatttgaggaatccaatggcacactgcctcctcctgtggtctttaaggccacgtatcatggtctttattacatcatcagtctggtggtagtcagtgggaatgtggtcaccaaaccatcccgatcaatcaccgtgctgacaaaacccttgcccgtaaccagtgtgtctatatatgactataagccttctcctgagacaggagtactgtttgaaattcactatccggaaaaatacaacgtgttcagcagagtgaacatcagctactgggaggggaaggatttcaggacgatgctgtacaaagacttcctgaaggggaaaaccgtgtttaatcactggctcccggggatctgctacagtaacatcactttccagctggtttctgaggcgacctttaacaaaagcaccctggtggagtgcagtggtgtgagtcacgaacccaaacaacacagaacagcgccgtatccccctcgaaacatctctgttcgctttgtcaacttgaacaagaacaactgggaagaaccaagcgggagcttccccgaggactcgttcatcaaaccgcaagacgcgataggaagagacagacccttccatttccccgaggaaacccctgagacgcccgccagcaatgcgtcttccggctggcctgacccgaacggcactgagtatgagagcacatctcagccctactggtgggacagtgcatccgcggcccctgaaaacgaggaggacttcgtcagcgtgctgccagcggactatgacactgaggccacgctcggcaggacagagaaacccacagctgaccctttctctgccttccccgtgcagatgactctgagctggttaccaccaaaaccgcctacagccttcgatggcttcaatatcctcatagagagggaagggaactttaccgactatttgacagtggatgaagaagcccacgagtttgttgccgaactgaaggagcctggaaagtacagactctcagtgacaaccttcagctcctcgggagcctgtgagactcggaaaagccagtcagcaaaatcgctcagcttctacatcagccccacaggagagtggattgaagaactgactgagaaaccgcagcacgtgagtgtccacgtcttaagctcaaccactgccttgttgtcgtggacatcttcccaggagaactacaacagcaccattgtgtctgtggtgtccctgacatgccagaaacagaaagagagccagcggctggagaagcagtattgtacccaggtgaactcaagcaaacctgtaattgagaacctggttcccggtgcccagtaccaggttgtgatgtacctaagaaaaggccctttgattgggccaccttctgatcctgtgacatttgccattgttcccacggggataaaggatttaawrcwctaycymktggswmmmamrrmarwarwrmtgagctggacccgaccttacttggraktgttcagaaaatacgtggttgaaatgttttatttcaaccccaccaccatgacctccgagtggacgacctactacgaaatagcagcgaccgtctccttaacatcgtccgtgagaatagcaaatctattgccggcgtggtactacaactttcgcgtaaccatggtgacgtggggagatccagaactgagctgctgtgacagttccaccatcagcttcataacggcccccgtcgctccagaaatcacgtctgtggagtacttcaacagcctgctgtacatcagctggacctacggggacgccaccactgacctgtcccattcgagaatgctacactggatggtcgtggcagaagggaggaggaaaattaaaaagagtgtgacacgcaatgtcatgacggccatccttagcctgcctccaggagatatctacaacctgtctgtcacagcctgcactgagagggggagtaacacctccatgctccgccttgtcaagctagaaccagctcctccaaaatcactcttcgcagtgaacaaaacgcagacatcggtcaccctgctttgggttgaggagggcgtagctgatttctttgaagtcctctgtcagaagctcgggtctggccacgatggcaaactccaggaaccggtagctgtttcctcccacgtggtgaccatctccagcctcctcccagccactgcctacaactgcagtgtcaccagcttcagccacgacagtcccagtgtccctacgttcatagctgtctccacaatggttacagaggtgaaccctaatgtggtggtgatctcggtgctggccatcctcagcatacttttaattggactgctgttagtgacccttgtcattctgagaaagaagcacctgcagatggccagggagtgtggggctggcacgtttgtcaattttgcatccttggagagggaagggaaactcccctacagttggcgtaggagtgtctttactttcttaaccctgctgccctcatgtctgtggactgactatctgttggcattttatattaacccttggagtaaaaatggcttaaagaagaggaaactgacgaaccctgttcagctggacgattttgattcttacatcaaggacatggccaaggactctgactataaattctctcttcagtttgaggagttgaagttgattggactggatattccacactttgctgcagatcttccgctgaaccgatgtaaaaaccgctatacaaacatcctgccgtacgacttcagcagagtgaggctggtctccatgaatgaagaagaaggagcagactacattaatgccaattatattcctggctacaactcacctcaggagtacattgccacccagggaccactgccggaaaccagaaatgatttctggaagatggtcctgcagcagaagtctcgcatcattgtcatgctcactcagtgcaatgagaaaagaagggtaaaatgcgmycamtaytggccattcacggaagaacccattgcttatggagacatcaccgtggagatggtctctgaggaagaacaggaggactgggccagcagacacttccggatcaattatgctgacgaggcccaggatgtgatgcactttaactacacggcctggccagaccatggcgtgcctccagcaaatgctgccgagagcatcctgcagttcgtgtacactgtccggcagcaagccaccaagagcaaaggacccatgatcatccactgcagygcrggcrtkggmcggacaggcaccttcatagcccttgacaggctcttgcaacacatccgagatcacgaatttgtggacatcttggggctggtgtcagaaatgcgctcataccgaatgtcgatggtacagacagaggagcagtacatcttcatccatcagtgcgtgcagctgatgtggctgaagaagaagcaacagttctgcatcagtgacgtcatctacgagaacgtcagcaagtcctagttcagactcgggagcggtgaggccatgatgtctacccatcctcccttgcttccagaggttttataggggcctttagtcactttgtcaaatcgcgtccccgctgcgcagtttgtggacaaggaggtgatttaacctcctagaaccgagaagacttagccttaaggagcctacaataccgtttggagtcttttcacttctagacgtttgatggwccaaattcactaggatttccagaaakgctsctcctcgaagggcgggaagtgcccttcctgatggttcagtcggctctttgctgcttgggctgggtttkkttttttyttttttttaagtgcaataatttctgtataatcgtgattttttttttacattcgcaattcagaatgttgaattgttatccgcccacatcactgatcagtgccacagccttgggaaggccttatcgcagagttttatctcaccactgaagagsyatggctacacacaggaagactcggtgacaaatcctcaaaggaaatgagcgcrygwgtscctccctccaacctctcgaagctatgggtcaggagtaggtgggcagagagagaagagaggggttytactcacacgtcagccggtttatctcttcctatttcgaatatgagaacctgtgtttcgaagtagagtaggaaaaacattacttgtctgacttgtcgtagtgggtttcttccttgttgacagttgggagtttcktccgtggctcttttgaactagtgtcactgtcayggtccttttcaaacagccagagctgactcaacagttttgagtctgactctgaactctgagaaatcttggtgcctagccttctttatttttctgtccacccgtgtmmacaagaacagtttcwccaagagctrtaggctgtaaaaatgcactttctttccccacccagaggarctgrgaattcagaagtcaggacaacgaactcagcatgctaggacagtmactggacaccgtcccttaagaataccgttgagcgtctccgtggattccgacaggatattctctgggttctttgcatttctgttgtcagactcattttaacccgtgtagctagtggcattttattctttggattttgtatgattaaagtacatgattatgtgttgtgmccakmrmmrhdrwmaaaawgrgaaaaaaaaaaaaaaaaa

SEQ ID NO: 2427 - DNA, 3426 bp, Rattus norvegicus
atggcagtgcggggcgaggccgcccaagactgggccaagcccggtctccgagggccgagtcctgccccggtggccagaggggaccaccgctgtcgtggcgggtccccttcatcccctcggggctcgggctgttgttggcgagccctggcgttgcagcctctccggcgctcgccgcaactctcctccgcgttgtgcgcgggctccctgtccgtgctgctggcgctgctggtgaggctggtcggcggggaggtcggaggcgagctggagtcgagtcaggaggcggcggccgaggaggaggaggaggaaggagcccgagggggcgtcttcccgggccctcggggaggtgctcccgggggcggcgcgcagctcagcccttggctgcagccggccgcgctgctcttcagtctcctgtgcgccttcttctggatgggcttgtgcctgctgcgcgccggggtgcgcctgcctctggccgtcgcgctgttggccgcctgctgcgccggggaagcgctggtgcagctctccttgggcgtgggggacggtcgcctgctgtcgctacccgccgcgggggtcctgctcagctgcctaggtggcgcgacatggctggtgctgaggctgaggctgggcgtcctcatggtcgctttgactagcgccctcaggacggtggccctggtttctctggagaggttcaaggtcgcctggagaccttacctggcatacttggcggccgtgcttgggctgctgctggccaggtacgccgagcagctcctgccgcagtgctccgggccggctccgcccagggagcggtttgggtcccagtcgagcgcgaggaccaaggaagagattccggggtggaagaggaggaggcggtccagctcggtggtggccggcgagatgtccggctgcggtggcaagtctcaccggaggacctccctgccctgcatacccagggagcagctcatgggccattcagaatgggaccacaagagagggtcacgaggatcccagtcaggaaccagcgtcaccgtggatattgccgtgatgggcgaggcgcatggcctcattaccgacctcctggccgacccttctttgcctccgaatgtgtgcacgtccttgagggccgtgagcaacctgctcagtacccagctcaccttccaggcaatccacaagcccagagtgaaccccactgtgaccttcagtgagaactatacctgctccgactctgaggaaggcttggagaaagacaagctggccattcccaagcgcctgagaagaagtttgcctccaggcttgctgaggagagtttcatcaacttggacaactaccacctctgccacaggactgcctaccttggagcctgcgccagtgcggagggaccgcagcgccagcataaagccacatgaagccccttcacccagtgctgtcaaccctgactcttggaatgccccagtgttgatgactctaaccaaaagcaggtccttcacttcgtcctatgctgtctctgcagctaaccacgtcaaagctaaaaagcaaaacaggccaggtggccttgataagatttcgcccgttccctcgccctcctcctcacctcctcaaggatcacccaccagcagtcctgtcagtggcattgcttccgtacagttcccggaatcccctgaagtcaccaccaaacgaggccctggatctcacagggccttaacttacacccagagtgcccctgacctgtccccccagatcccgccctcacctgtcatatgtagcagctgtggcagaccttactcacaagggaatcctgctgatggaccttcagagagaagtggcccagccatgcagaaaccaaacagaacagatgatacttctcaagttacctctgattatgagaccaacaacaacagtgacagcagcgacatcctgcagaatgatgaggaagccgagtgccagagagagccactgaggaaagcatcggcttgtggcacctatactccccagaccatgatcttcctggacaaaccaattcttgctccagaacccctggtcatggataacctggattcaattatggatcagttgaacacctggaattttccaatttttgatttagtggaaaacataggaagaaaatgtggccgtattctgagccaggtgtcatacagactctttgaagacatggggctctttgaagcctttaaaatcccggttagggagtttatgaattactttcatgctttggagatcggctacagggacattccttatcataacagaatccacgccactgatgttttgcacgccgtgtggtatctcacaacacagccgattcctggcctcccgagtgtgattggtgatcacggctcggcaagtgactctgattctgacagtgggtttacacacggacacatgggatatgtgttttccaaagcgtatcatgtgccagatgacaaatatggatgcctgtctggaaatattccagccctggagttgatggccctgtatgttgctgcagccatgcatgactacgatcacccaggaaggacaaatgctttcctggttgccactagcgcccctcaggccgtgctgtacaatgaccgttccgttctggagaaccatcacgcagctgcagcctggaatctcttcatgtcccggccggagtataacttcttagttaacctggaccatgtggaatttaagcacttccgattcctagtcattgaagcaattctggctactgacctgaagaaacactttgactttgtagccaagtttaatgccaaggtgaatgatgatgttgggatagattggaccaatgaaaacgaccgtctcctggtgtgtcagatgtgtataaagttggctgacatcaacgggcctgctaaatgtaaggacctccacctgcggtggacggagggcatcgccagcgagttttatgagcagggcgatgaagaagccagccttggtttgcccataagcccatttatggaccgctctgccccgcagctggccaatcttcaggagtcctttatctcacacatcgtgggtcctctttgccactcctacgactctgcgggtctcatgccgggaaaatgggtagatgacagtgatgattcaggagacactgatgacccggaagaagaggaggaagaggctgaaacaccacacgaggaagaaacctgtgaaaacagtgaagctcccagaaagaaaagtttcaaaagaaggagaatctactgtcaaataactcagcaccttctgcagaaccacatgatgtggaagaaagtgattgaagaggagcagtgtttatcaggcacagagaaccaggccccagaccaggcaccgctgcagcattcctcagaacaaatccaggctatcaaggaggaggaggaagagaaggggaagccaagagcagaggaaaccctcgctccacaaccagacctgtga

SEQ ID NO: 2428 - DNA, 809 bp, Rattus norvegicus
accaaccgcctggctccatcaggaccccgcagtctcagctccaagtcatcgctcaccagggaggcatcatgggctttctgaagttctcccctttcctggttgtcagcatcttgctcctgtaccaggcatgcggcctccaggcagttcctttgaggtcaaccttagaaagcagcccaggcatggccactctcagtgaagaagaagctcgcctactggctgcactggtgcagaactatatgcagatgaaagtcagggagctggagcaggaggaggaacmgsagkctkwkssctsyagcttggacagccccagatctaagcggtgtgggaatctgagtacctgcatgctgggcacgtacacacaagacctcaacaagtttcacaccttcccccaaacttcaattggggttggagcacctggcaagaaaagggatatggccaaggacttggagacaaaccaccacccctattttggcaactaggtccctcctctcctttccagtttccatcttgctttcttcctataacttgatgcatgtagttcctctctggctgttctctgggctattatgggttactttcatgaggcaaaggatggtatctggaatctccaatgggtgaggagaaagggcctacaggctaaaagagaatcacccaggaagatggcagagagccagggcagtcatctggattcctagtagagcttctcagtctagtcttgcttcataaagtgttggttgtttgggaaataaasctatttttctaaaaggamwwrarmmawrrwrrwcattgatgtagcccacatctcaggc

SEQ ID NO: 2429 - DNA, 1300 bp, Rattus norvegicus
cacgaggagccgcgcgagtccgccgccgctgcgcctcagctccgccaactccgccggcttaaatcggactcctagatccgcgagggcgcggcgcagccgggcagcgctttcccccagccttggcaaccccaggggccactatttgccacctagccacagcaccagcatcctctctgtgggctgttcaccaattgtccaaccaccatttcactgtggacattactccctcttacagatatgggagacatgggcgatccaccaaaaaaaaaacgtctgatttccctatgtgttggttgcggtaatcaaattcacgatcagtatattctgagggtttctccggatttggaatggcatgcggcatgtttgaaatgtgcggagtgtaatcagtatttggacgaaagctgtacctgctttgttagggacgggaaaacctactgtaaaagagattatatcaggttgtacgggatcaaatgcgccaagtgcagcataggcttcagcaagaacgacttcgtgatgcgcgcccgctctaaggtgtaccacatcgaatgtttccgctgtgtagcatgcagccgacagctcatcccgggagacgaattcgcgctgcgggaggatgggcttttctgccgcgcggaccacgatgtagtggagagggccagcctaggagctggagaccctctcagtcccttgcatccagcgcggcctctgcaaatggcagccgagcccatctccgctaggcagccagctctgcggccgcacgtccacaaacagcccgagaagaccacccgagtgcggactgtgctcaacgaaaagcagctgcacaccttgcggacctgctacgcagccaaccctcggycagatgcgctcatgaaggagcaactagtggagatgaccggcctcagtccccgagtcatccgggtctggtttcaaaacaagaggtgcaaggacaagaaacgcagcatcatgatgaagcagctccagcagcagcaacccaacgacaaaactaatatccaggggatgacaggaactcccatggtggctgctagtccggagagacatgatggtggtttacaggctaacccagttgaggtgcaaagttaccagccgccctggaaagtactgagtgacttcgccttgcaaagtgacatagatcagcctgcttttcagcaactggtcwrttwtwmakwaggaggaccaggctctaattccactggcagtgaagtagcatcgatgtcctctcagctcccagatacacccaacagcatggtagccagtcctatagaggcatgaggaacattcattc

SEQ ID NO: 2430 - DNA, 2167 bp, Rattus norvegicus
  misc_feature (2017)..(2017): n is a, c, g, or t
gggcacgccggagcccgaacggcgcagcctggaagaggccggagcccaagggaggcggcggtagaggcagcggcgggggcagcccaggcagcccgagccccgcggcctgggcctgcgctcggcgccatgagcggcggcgggccttcgggaggtggccctgggggctcgggccgggcgcggaccagctcgttcgcggagccaggcggcggaggcggaggcggtggcggcggccccgggggctcggcctccggcccaggaggcactggcggcgggaaggcgtcagtcggggctatgggtgggggcgtgggagcctcgagctctgggggtggccccagcggcagcggcggaggaggcagcggtggccccggcgcgggcactagcttcccgccgcccggagtgaagctgggccgtgacagcgggaaggtgaccacagtggtagccactctaggccaaggcccagagcgttcccaagaggtggcttacaccgacatcaaagtgattggcaatggctcattcggagtagtgtaccaggcacggctggcagaaacgagggaactggtggccatcaagaaggttcttcaggacaaaaggttcaagaaccgagagctgcagattatgcgtaagctggaccactgcaatatcgtgaggctgcggtactttttctactccagtggggagaagaaagatgagctgtatttaaatctggtgctggaatatgtgcccgagaccgtgtaccgagtggcccgtcactttaccaaggccaagttgatcatccctatcatctatgtcaaggtgtacatgtaccagctcttccggagcttggcctacatccactcccaaggtgtgtgtcaccgtgacatcaagccccagaatttgcttgtggaccctgacactgctgtcctcaagctctgcgactttggcagtgcaaagcagttggttcggggggagcccaacgtgtcctacatctgttctcggtactaccgtgctccggagctcatctttggagccacagattacacctcgtccatcgatgtgtggtcagctggctgtgtactggctgagctgcttcttggccagcccatcttccctggggacagtggggtagaccagcttgtggagatcatcaaggtactagggacgccaaccagggagcaaatccgagagatgaaccctaactacacagaattcaagttcccccagatcaaagctcacccctggacaaaggtgttcaaatctcggacaccacctgaggccatcgcactctgctctagcctgctggagtacactccatcctcaaggctctccccactagaggcctgtgcccacagtttctttgatgaactgcggagtctcggaacccagctccccaacaaccgcccgcttccccccctcttcaacttcagtcctggtgaactttccatccaaccgtctctcaatgccattctcatccctcctcacttgaggtccccatcaggccctgctaccctcacctcgtcctcacaagctttaactgagactcagactggccaagactggcaggcacctgatgccacacctaccctcactaactcttcctgagggccctaccgactacccctcacgctcactcggaaggctcaagtgggctggaaagggccatagcccatccagctcctgcctgctggccctagactgagggcagaggtaaatgaactacccagcatctaggcctccctcaccagcctcaccttgtggtggcttttaaagaggatttaactgtttgtgggggagggaagggaagagaaggacggacggggtttggggtatgaggaccttctacccccgtggtcccctcccctcccccaggstaccamtmcycccccccctcccatgtcccttgtaaatagaaccagcccagccgtatcctsttyytggcccktgggtktaaatagattsttataatttttttcttaaagaaaacgtbgattcacaccakccaacytgccytccccctcaghtgwwcccccytyttstcctntgbtcccaaggvytmctccctbtccccatcccaaggaggggwgtagggaragccchtgskgtbttagtttccacagtaaggtktgcctgtgtacagacckccgttcaataaattwktggcwtgdaammmwwmaaaaaaaaaaaaaaaaaa

SEQ ID NO: 2431 - DNA, 5093 bp, Rattus norvegicus
cccacccccgtcagcaggtaccgctggaaccaaccaccagtgagagggtgagtggaatctggccagttgtgctgcactgatctgctgagctgacaggaagatggtcatgatgctgtggtacgtgttgcctcttctcctctgcagcccctgcctgctcatacagattcctgatgaatataaaggacaccatgtactggagccacctgtcatcacagaacagtctccacggcgcctggttgtcttcccaacagatgacataagcctcaaatgtgaagccagaggcagaccccaagtggagttccgctggacgaaagatggcatccacttcaaacctaaggaagaattgggtgtagtggtacacgaggcaccctattctggctccttcaccatcgaaggcaacaacagctttgcccagaggtttcagggcatctatcgctgctatgccagcaataatctaggaactgccatgtcgcatgagatccagctcgtggctgagggtgcccccaaatggccgaaggagactgtaaaacccgtggaagtggaggaaggagaatcagtagttctaccttgcaatcctccacccagtgcagccccacttaggatctactggatgaacagcaagattttgcacatcaaacaagatgagcgggtgtccatgggccagaacggagacctatattttgccaatgtgcttacctcagacaatcattcagactacatctgcaatgcccacttccctggcacccggaccatcattcaaaaggaacctattgacctccgggtcaagcccaccaacagcatgattgaccggaagccacgcctgctcttccccacaaactccagcagtcacctcgtggccttgcagggccagtcattaatcctggagtgcattgctgagggattccctacacccaccatcaagtggctgcaccccagtgaccctatgccaacagaccgtgttatctaccagaaccataacaagacactgcagctcctcaatgtgggcgaggaagatgatggcgagtatacctgccttgctgagaactcactgggcagtgctcggcatgcctactatgtcactgtggaagctgccccatactggctgcagaagccccagagtcatttgtatgggccaggagagactgcccgcctagactgccaagtccagggcaggccccaaccagaggtcacctggagaatcaacggaatgtctatagagaaggtgaacaaggaccagaagtaccggattgagcaggggtctttgatcctgagtaatgtgcaaccaagtgacacaatggtgacccagtgtgaagctcgcaaccagcatgggctcctactagccaatgcctatatctatgttgtccagctgccagccaggatcctaacaaaagacaatcagacatacatggcagtagagggcagtactgcttacttgctgtgcaaagcctttggagctcctgttcccagtgtccagtggctggatgaggaaggaaccacagtgcttcaggatgaaagatttttcccctatgccaatggacacctgggcatcagagatctccaggccaatgacactggacgctatttctgccaggctgccaatgaccagaacaatgtgaccattttggctaacctacaggttaaagaagcaacccagatcacacaaggaccccggagcacaattgagaagaaaggtgcaagggtgacattcacgtgccaggcctcctttgacccctctttacaagccagcatcacttggcgtggagatgggagagacctccaggaacgtggagacagtgacaagtatttcatagaagatgggcaacttgtcatcaagagcctggactacagtgaccagggagactacagttgtgtggccagcactgaactggatgaggtggagagcagggcacaactcttagtggtgggaagccctgggccagtgcctcacctggagctgtccgaccgccacttgctgaagcagagccaggtgcacttgtcttggagccctgctgaagaccacaactctcccattgagaaatatgacattgaatttgaggacaaggaaatggctcctgagaaatggttcagtctaggcaaggtgccaggaaatcagacctctactaccctcaagctgtccccctatgtccactacacctttcgggtcactgccattaacaaatatggtcctggagaacccagccctgtctctgagactgtagtcacacctgaggcagccccagagaagaaccctgtggatgtgagaggggaaggaaatgagaccaacaatatggtcatcacatggaagccccttcggtggatggattggaatgccccccagattcagtaccgtgtacagtggcgaccactgggcaaacaagagacctggaaggaacagaccgtgagcgaccccttcctggtggtgtctaacacttccacatttgtgccttatgagatcaaagtccaggcagtgaacaaccaggggaagggccctgagccccaggtcaccattggctattcaggggaagactacccccaggtgagccctgagcttgaagacatcacaatcttcaactcaagcactgtgctggtcaggtggaggcctgtggacttggcccaggttaagggccacctcaggggatacaatgtaacgtactggtggaagggcagtcagagaaagcacagcaagaggcatgtccacaaaagtcacatggtggtacctgcgaacaccaccagtgccatcctcagtggtttgcgtccttacagctcttatcatgtagaggtacaggcctttaatgggcggggcttagggcctgcaagtgaatggaccttcagcaccccagagggagtgcctggccaccctgaggcattacatctggagtgccagtcggacactagcctgctactgcactggcagccaccactcagccacaatggagtgctcactggctacctgctctcttaccatcccttggatggggaaagcaaagagcagttgttcttcaacctttcggacccagagctccggactcataatctcaccaacctcaaccctgatctacagtaccgcttccagcttcaggccaccacccatcagggtcctggtgaggccattgtgcgtgaaggaggcactatggccctatttggcaagccagattttggcaacatttcagtcacagcaggtgaaaactacagtgtggtctcctgggtccctcgggagggccagtgcaatttcaggttccacatcctgttcaaagccttgccagaagggaaagtgagccctgatcaccagcctcagcctcaatatgtgagctacaatcagagctcctacacacagtgggacctacagcctgacaccaaatatgagatccacctgatgagggagaaggtcctcttgcaccatctggctgtgaagactaatggcactggccccgtgcgagtttctactacaggtagctttgcctccgagggctggttcatcgcctttgtcagtgctatcattctcttgctcctcatcctgctcatcctctgcttcatcaaacgcagcaagggcggcaaatattcagtgaaggacaaggaggacactcaggtagattccgaggcccggcccatgaaagacgagaccttcggcgagtacagtgwcmmtgaagagaaggccttcggcagcagccagccatctctcaatggagacatcaaacccctaggcagtgatgacagtctggctgattatgggggcagtgtggatgtccagttcaatgaggatggctctttcatcggccaatacagtggcaaaaaagagaaggaggcagcgggaggcaatgacagctcaggggctacctctcctatcaatcctgcagtagccctagaatagcaaggtccagtcatgtgaggcaggaccaagctgggcccagggccagaggtgcagaagagccaggggccaagacacctggccaatgcaccatgccattggcctgctgactttgggatcgagggtccttccttctttccacagaggcatggaagacttgactggaggcagagaggaactgtgacttcgagtctctttcttaccacctgctaccctctttattgccaaaacccagctgcaccctttcctggcgatacgctgctttgcccgctcagggcagttcactcccatatcagggatcttcaggtgctgccttgccgacccatttagacagagaggccatagtttgtgggagaagacaaaggagagtcctctgagccatctctgagaagctgtcctcactttctgactggaaacaggcatggtggggtctgttcaggactagcttggcacctcttctttctccctggctagcctgactggagacagaactctgtccccaccatctgctccctttgccatttttgatccaatcaggatggggacctgagcaagctggccgcctgtgtagaagaggccatctggaaagcccagagtcgtcccccacccccttagcacactagtttacaccctcctcccattgctattccactttcaggacacacacacacacacacacacacacacacacacttactcatattgccttcgatacccaccagagaacatcgaagtggcttctctcactgctggagataggcagacctcttcctactggaattggctagacttttccctgctgccaccataccccaggaccccttagcagccctgcctgcccccagttcttgtcctcagccccttcccctgttcctcacgttgggaatgtaaatacaccgtgactttgaaagtttgtgctgttgccctttccccatatgccactagcttgtaggcagatgtctgagtctctaggtggtttccccattttatagcagttagctttgatgatctcactccaagaaaaataaaagcagacacacacacaaaaaagcaaagattgcgtgtcccagcactgctgtggttcgctcagcagctgtgctcttcctgtatgcctttgcttggtctgttgatgagccctctacaaaaaacaaatatatatatatgtacataatatcagaatataacaggcaaataaaaacctggaaatgaaaaaaaaaaaaaaaaaaaa

SEQ ID NO: 2432 - DNA, 1277 bp, Rattus norvegicus
tgcggymrcgaagaacccatgggcctcctgaggcggcggctgctgctgctggtggtggtrgtgacgacctgtgtcccagcctcccagggcctgcggtgcatacagtgcgaaagtaaccaggactgcctggtggaggagtgtgccctgggccaggacctctgcagaaccacggtgcttcgggaatgggaagacgccgaggagctggaggtggtgaccagaggcctgtgccacaaggagaagaccaacaggaccatgagctaccgcatgggctcggtgatcgtcagcctcaccgagaccgtgwgtgccacaaacctctgcaacaggcccagacccggagcccgagggcgaccttttccccggggccgttaccttgagtgtgcakmskgcacctctctggaccagagctgtgagaggggccgggagcaaagcctgcagtgccggtatcctacagaacactgtattgaagtggtgacgctccaaagcacagaacggagcgtgaaggacgaaccctacaccaaaggctgtggcagtcttcccggatgcccgggcacagcaggtttccatagcaaccagacctttcacttcctgaagtgctgcaacttcacccaatgcaatggtggcccagttctggatcttcagagcttaccaccgaatggcttccaatgttacagctgtgaggggaacagcacctttggatgttcctacgaagagasstccytcattgactgccggggaccaatgaatcagtgcttggaggctacaggcttagatgtgctgggaaaccggagttacaccgtaagaggstgcsccacggcttcctggtgccaaggttcccacgtgkccgactccttccagacccabgtcaacctbtmtatctcctgytgtaatggcagtggctgtaaccgccytacagggggcgcccccgggccaggccmtgmtcatsttatcytcattgcctccbtgmtcctgaccctcagactgtggggcatccctytbtggacctgaatcmtgagccgtstgcmctggctggacccaggracttttgactcvtccgcctytgctccatmtttgaggacaggcgtgctgtattgtmttcktgggcctcaagaactggaagagaattgagaaaagggctgcgggccagcaggggggcctcttggttgagttaatattgttgctgttattattattatcattgttattaccctaatttattatgtaaatatatatataagatwtttgtaccagwraaaaaaaaarmrrmmrmaraakcgryc

SEQ ID NO: 2433 - DNA, 4275 bp, Rattus norvegicus
cacaggtttacaaatcaacctatgtatatcttgggggatcaatggcctcctctccaaattaattaacaagttatttccttcctttccccttggccttccctatggctaaggagacaactccaattgtttttgggagagtgtcgtcgttgttgttgctgttgttgttgttgtttaggagttaaactaatttaaaaatgggcttatgagagaaagactctatatcaaagtttaatgaacagagcaagggagagaagatgggtgtagccaccccagggagtccattttattgccggtggggcccctttgtcagtcagggtctcagctgtcttctcagggaggaagaaaggaggctaggggcattacgccttcgccagcaggtgggagaggatgccactctgtttcctgattctggagagcagtggatccactgtggtgaccgatggagtgtcaactggcttctgagcccctttctctgtccctgtagatatgccctgcgtgcaagcccaatatagcccttcgcctcaggggtccacttatcccacgcagacttatggctcggaatacaccacagaaatcatgaaccccgactatgccaagctgaccatggacctcggtagcacggggatcatggccacggccacgacgtccctgcccagcttcagtaccttcatggagggctaccccagcagctgcgaactcaagccctcctgcctgtaccaaatgccgccttctgggcctcggcctttgatcaagatggaagagggtcgcgagcatggctaccaccaccaccaccaccatcaccatcatcatcaccaccaccaccagcagcagcagccgtccattcctcctccctctggccccgaggacgaggtactgcccagcacctccatgtacttcaagcagtctccgccgtctacgccgaccactccaggcttccccccgcaggcgggggcgctgtgggacgacgagctgccctctgcgcctggctgcatcgctccgggaccgctgctggacccgcagatgaaggcagtgcccccaatggccgctgctgcgcgcttcccgatcttcttcaagccctcaccgccacaccctcccgcgcccagcccagccggcggccaccacctgggctatgaccccacggccgcagctgcgctcagtctacccctgggagccgcggccgccgcgggcagccaagctgctgcgctcgagggccatccgtacgggctcccgctggccaagaggacggccacgttgaccttccctccgctgggcctcacagcgtcccctaccgcgtccagcctgctgggagagagccccagcctaccatcgccacccaataggagctcatcatccggcgagggcacgtgtgctgtgtgcggggacaatgctgcctgccagcactacggagtccgcacctgcgagggctgcaagggcttcttcaagagaacggtgcagaaaaacgcaaaatatgtttgcttggcaaataaaaactgcccggtagacaagagacgtcgaaatcgatgtcagtactgcaggtttcagaagtgtctcagtgtcgggatggtgaaggaagttgtgcgtacagatagtctgaaagggaggagaggtcgtctgccttccaaaccaaagagcccactacaacaggagccctcgcagccctccccaccatctcctccgatctgtatgatgaacgcccttgtccgagctttaacagacgcaacgcccagagaccttgattactccagagtaagttccgtgaaccgtttcgaatggttctgattttccattcatgatcgtcgtacgaagggttggctgaatgactgcgcccggctctgtgctagtcctactactagttttttttacctttcctatagttctcatttcatttagcaaaaagtccattcactctaccaaataatttttgctttattggatctctgagtggctttaataaatgacgcctgacagggctacacctgccacccctatggtggcaggattctctgtggtgccaatgaaaagccccacaggtgaactgcaatttgtagggttcctcttcttcttcttttgttttgatgccttagacattgtggagtattggatttcttacattgtgagtagactctgttgctgagcccccaagttaacctgaagtagtctacccggttgcatcctcgctgattaacttgctgcttgtatgggggtggggtggaggtcagactctgaggaggaagaagccctgggcttggtgtcagaggcatcaggaggactgggatggagcactacagtttctgttccctgcctatgttacctggctcctcttcttggctctgtctccctgcagtggaaatcattacaatatttaacaccagaggaggggttttgagcatcagtcacacaaggatgacaaaaaccgtgtttttaaaaaaacgtaaacgattaccaatgttgttatctcagtcaaccaaaacatatcaacatttcagtttcacataggacatcataaaaaaaaaaataatcgccagtctgaagtctattaactgccctaaatctgaatgctattgagaagggtgatcaaaggtttttgagaaaacgtacaaacattatgatgagcccatgtcttattgaattttgaaaagcggagctctagtaaaatacagtcttattacaaatgaaagaggagaaaaaaatgatcctagttactgaataattcttccctgttaaacattgtgtcacactgtctcactgcacccttgaaagggcctgcgctgctctaagggccacctacttcacttaggaacacaaaggaagagaggctggtgtggggtctccactggttgatctgatttccttcccatggctaattcagcatttcggcatctgggtgaatgcctgcaaaaagacaggagtgtgcctttgctactgggccctcctcctggggttgtagtgttgacaaaaatgctgagtgtgcccgctgagatcctcttgcccctcctccctgccttcgttctaggccctccctacacctgatcacaagaccccttgtgagtagcttggtagatccttagcaccaaaggttgaggactcttactctgattgtaagtaccatctcttgatgaaaagtcggtctcaaacagcctaacagagtagttcaccgactaagggttcaggctctgaaagcaggcaagtctagataaaaatcctaatgccagcatttaccagctgggtgaccttgagaaactgatatgttcagtgcctggatttcttcatctttgttattagatgatattacctgcttcctgggattctttgtgaagattaaataggatggcatttgtcaaaacttcagcatgggacccagtatattgtttccttgatcaaacccttcactctgggcatatatccaatgtgctaataagtataggcaccacacagtgaggtaccgtgtagcaacgccattaatataagtattatgattcctatggcccaataagaaaatcaaaacagagagaggtgaaagaactgagtagcccaaggtcacacataaaacgactatcagaggtcaaattaggagtcagggttcactgactctctggttgcagtgagggtgggagacacaagggtttggggcatgaagattctcctcccccaaagcacccccacctctccctctgcacttcatctgcagtaatgaaaccatagtaactgccttggctaagatcacagcacacaatctgcgatcatcccggagtatttggcattacttctgatggtcagtcaagaaaagttgctccccccaaaatgatattgtgtccccaaactatctaaattgtcagtgtctatggcctaattttcatgcggcagaatgtctcccctagtatgttgagttgtcccagctgggaaatgtctctacattgaaaaaaatccaatccagtgtgtttgcttgtctctgcaccattcagtctgttagtctggagtcatcaccctcatcaacaaacatttatccaatttaattgttagctttgccccaaatagcagattgcccatgccagagtctgggtcgtgctgatgctaccttcgaggcctagctcaattttgcaaagcatatttatttcagttgcattgttttggaatcaggttgaacttcgttcgcttgggttctcctgcatttagatagctctacaaaattatcaaaaattggacccaaatcaactaaattaaaaagacttttaaaaaaaatacagcaagctttcatcaaaaaaaaaaaaaaaaaaa

SEQ ID NO: 2434 - DNA, 1390 bp, Rattus norvegicus
ggcaccggcgccgccaccgtcggggcttcctcgacgaggccgttcggaagatctcccgctccgtctcgagagctgctttctctcccgcacacgcttccccgctgctgaggccccagaacgcccgggtgaggagttggccgtagtgagcagcaccgatcccttggggctaccggcggcgagcgcccgagccgctcctcccaatggcgaagaagacgtacgacctgcttttcaagctgctcctgatcggggactcgggagtgggcaagacctgcgtcctttttcgtttttcggatgatgccttcaataccacctttatttccaccatagraatagactttaagatcaaaacagtggaactacaaggaaagaagatcaagctacagatatgggacacagcaggccaggaacgatttcacaccatcacaacmtcmtamtacagrggagcaatgggcatcatgctagtgtatgacatcaccaacggtaaaagttttgaaaacatcagcaagtggcttagaaacatagatsagcatgccaatgaaratgtggaaaggatgttactasggaacaagtgtsacakggacsacaarmgagttgtaccgaaaggcaaaggrgagcagattgcaagggrscatsktattaggytwtttgagactagtgcaaaagcawwtatmaacatcgaaaaggcgttcctcmcrttasctgaagacatcctccgaawgacccctgtaaaagaacccamcagtgaaaacgtrgatmtcascagtggaggaggtgtgacgggctggaarmgcaawtgctgytgagcgctctcccgwccatctgttsccatccmccayccgtttytyttcttgctgsraartaaaacmctctgtccatttttmmctctaaamarawawwwwwrwwcctcatcttaactattcagkscacswrktttatttgtctttcatctgtgactgcttgcgactattataattttcttcaacaaaaaaaatgtatagagaaatcatgtccgacttcattttcagatgttcttgctcagctcaccactgcacttctgttgtattatagtccagctcttatcaacattaactacagcaatcatttcaactctattctgcaaattgtataagaataaaagttagaattaacaattwwawwwwrwamaamarwrrrawwwwmtgtcatgaataatgtgcttgagtcctataacctatagatgtgatagcaaagaaacacaagccaggaaaacattcatttcccctgaatcagtacgtggggttaattttgtcctgtgccttatgtggaaaggaacttctttggtttctcttttttgttcggtggaagcatgtgcaggagacatttcatcccaacataaacccgttcagatgct

SEQ ID NO: 2435 - DNA, 2733 bp, Rattus norvegicus
taggcaagcactctactgttgaataaatcccaaccccacaattgaatttttatactcaagtaccaatacttgttcattaggcagaagaattttgcaatgataaaattatatacatgtattgctatactgttatccaatgcattgatgtgtgcatatatatttttagagtgctatatccaaatttattctgccttctaccttatacttaactatttcaacactatcaatagttttgataataaattaagtaattttctaagtgggagaaaaaagacttaacaagtcggcattttgctctgcatacatttcataattctgttagcaatgatgagccctgaatatgagtggaactgacccatttatgtttcttccaggggattccgaaagaaaggaaatgcttaacctctgcagacaggagactgaaggacggaaagttgataagggaaaagccaagggaagcagaaggtgttaaagaatacccacgcttctggaacacacaacagtgttacagcagcgtgatctggagatgctggagactctaaattacaggtgagcagaacttttcagaggctgaaacatctacaagagcaatcaggatttctcactgctgagataaccaatgaatttttaataagttctgagctctgtggtcagatcaatggctgttatccgataaagacaaattttaccctttgatttccataatcctgtccgaatggaatcttcaccttgctgctacctgtgctaactaatgccacgggattaccgtgcctcagagatgctgcaaaaaataagacacatgggtgaaagagatcaccacagcaaagtcgatgaggcatttccagtgagagtttacccttcctcgctgagcttctaccaactcctgccagatattggccaagaagaggggaggccaaacatagagcagctccaaaccttggtctaaatctgaagtgtaatttcctgagccaggatggaaggggagtcttacaatgaaagcactgtcaacggcaccccggtaaatcaccaggctttggaacgccatggactgtgggaagtcattactattgcagttgtgactgcggtggtcagcctgatgaccattgtcggcaatgtcttggtcatgatctccttcaaagtcaacagtcagctcaagacagttaacaactactacctgctcagcttggcctgtgcagacctcatcattggcatcttctccatgaacctctacacgacctacatcctcatgggacgctgggttctcgggagtctggcttgtgacctttggctggcactcgactatgtagccagcaatgcttctgtcatgaaccttctggtgattagttttgatcgttacttttccatcacaagaccactgacgtaccgggccaagcgtaccccaaagagggctggcatcatgattggcttagcatggctggtctccttcatcctctgggcgccagccatcctctgctggcagtacttggtcgggaagcggacagtaccacctgatgagtgccagatccagttcctctctgaacccaccatcacttttgggactgccattgctgccttctacatccctgtctccgtcatgaccatactctactgccggatctaccgggagacagagaagcgaaccaaggacctggctgacctccaaggttctgattctgtggcagaagccaagaagagagagccagctcaaaggaccctgctcagatctttctttagctgccctagacccagcctggcccagagagaaaggaatcaggcctcctggtcatcctcccgtagaagcacctcaacaacaggaaagacaacccaggccactgacctaagtgctgactgggaaaaggctgagcaggttactacctgtagcagctacccctcttcagaggatgaagccaagcccaccactgaccctgtctttcaaatggtctacaagagtgaggccaaggaaagcccggggaaggaatccaatacccaagagaccaaggaaacagttgtgaacacccggactgaaaacagtgactatgacactcccaaatactttctgtctccagctgctgctcacagactcaagagtcagaagtgtgttgcctataagttccgattggtggtaaaagccgatgggacccaggagactaacaatggctgtcgaaaggtgaaaatcatgccctgttccttcccagtgtccaaagacccttcaacaaaaggtccggatcccaacctcagtcatcaaatgaccaaacgaaagagaatggttctggtcaaagagaggaaagcggctcagaccttgagtgccattctcctggccttcatcatcacatggaccccttataacatcatggtcctggtttccaccttctgtgacaagtgtgtccccgtcaccctgtggcacttgggttactggctgtgctatgtcaacagcaccatcaaccccatctgctatgctctctgcaacagaactttcaggaaaacctttaagctgcttcttctctgccggtggaaaaagaaaaaagtagaagagaaattgtattggcaaggaaacagcaagctaccctgaaaccttagcacctcccctggaaagaataatgatcaccgtctggtttgcttgtttaaagaacgtcatctgctgttctgagtccttgaaggcttgtcaaggtgcaaaatcttctgtcaaatgaagagtcgtcacacatgcacctgccatgtgcggtgagtcttgac

SEQ ID NO: 2436 - DNA, 1578 bp, Rattus norvegicus
cgaaaacctagaaacaaagtatttcctgtgggcacagacattggttctgcaagagtccctcctatatataggctccagatgaaaagaaagtgaactgtgatttccccacattcctcatttctgaacatgagagaactgtaaggaagaaccattaacacaaagacagttctgtctttcagtcccttgtaaccacatctccggtcactcacataaaaatctctcatatatctggcttgactggacacttacgaattaatattgaaaagaaattgtacgtattcagtgaatgtggcaaagcgttcatccaacttcagtagatgctaggcgagaatccttgtgcgaaacagaatgttggaaagccttcagcccgagtcagagcttctgcatgatgaacctgatcctggagagaaagtttatgaatgtgatgaatgtaggaaaacctttagcctagaacaacactttgtggaacataagaaaacgcacggtggggagaagtcacccgagtgtaccggatgtggtgaagagttctcgaaagcctcttcacttactcgacatctgagaagtcgctcacggagggaatcatataagtgtggtaactgtgggagaaccttcagccagagaggaaacttcctttctcaccagaaacaacatgctgaagagagacccagtgagtctaagaaaactcccgtccccatgacaaccatcgtcagaaatcagagaaacgccgggaataaaccatatgcgtgtaaggagtgtgggaaagcctttaatggcaaatcatatctcaaagaacatgagaaaattcataccggagagaaaccatttgaatgtaatcagtgtggtagagccttcagccagaagcagtacctcattaaacaccagaacgtccacagtgggaagaagccttttaagtgtaatgagtgtggtaaggcttttagccagaaagaaaacctcattatacaccagagaatccataccggagagaagccttatgaatgtaaagggtgtgggaaggccttcattcagaaatcaagcctcatcagacaccagaggagccatactggagagaaaccgtacacatgtaaggaatgtgggaaagccttcagcggcaaatcaaacctgactgagcatgagaaaattcatattggagagaaaccctataaatgtaacgagtgtggaacaattttcaggcagaagcagtacctcatcaaacatcacaacattcacacgggcgagaagccatatgagtgcaataagtgcggaaaggccttttctcgaatcacgtcgcttattgtgcatgtgagaattcacacaggcgataagccctatgagtgtaaagtctgtgggaaagccttctgtcagagttcgtctctaaccgtgcatatgaggagccacacgggtgagaaaccgtatggctgcaatgagtgtgggaaggctttttctcagttctccactcttgctttacacatgagaatccacactggcgagaagccttatcagtgcagtgagtgtgggaaggccttcagccagaagtcccatcacatcagacaccagagaatccatattcactaaaactct

SEQ ID NO: 2437 - DNA, 2128 bp, Rattus norvegicus
gctcgtccaccctgcaacccccatgggctaccgccccccgcctcctcggctgccacccaagacaaggcagggataagcacagtgtaggatcacgtggccactatgtctggggactacgaagatgacctctgtcggcgggccctcatcctggtttcagacctctgtgcacggatccgagatgctgataccaatgacaggtgtcaagagttcaacgaactgcgaatcagaggatatccccggggtccggatgcagacatttccgtgagcctgctgtcagtcatcgtgacgttctgtggcatcgtcctcttgggtgtctctctcttcgtgtcctggaagttgtgctgggtgccctggagggacaaagggggctcagcagtgggtggtggccccctgcgcaaagacttagcccctggggttgggctggcaggcctggtaggaggtggtgggcaccatctgggagccagcctaggtggccatcccctgctgggtggtccgcaccatcatgcacacccagcccaccatccaccatttgctgaactgctggaaccaggtggccttgggggctctgagcctccagaaccttcctacctggacatggactcatatccagaggctgctgtggcctctgtggtagctgctggggtcaaaccaagccagacatcccctgagctgccttctgagggtggaacaggctctgggctgctcctgctgcctcctagtggtgggggcttgcccagtgcccagtctcatcagcaggtcacaagtctagcacccaccaccaggtacccagccctgcctcggcccctcacccagcagaccctgaccacccaagcagacccaagcagtgaggagcgaccacctgcactgcccttacccctgccaggcggagaggagaaagccaagctcatcggtcagatcaagccagagctataccagggcactggacctggtggccggcgaassggcgggggctctggggaggcaggggcaccctgtggccgcatcagttttgcccttcggtacctctatggctctgaccagctcgtggtgcggatccttcaggccctggatctcccagcaaaggactccaatgggttctcagacccctacgtcaagatctacctgttgcctgatcgcaaaaagaagttccagaccaaggtgcacaggaagacgctgaaccctatcttcaacgagacgtttcagttttcggtacccttggccgagctggcgcagcgcaagctgcacttcagtgtctatgacttcgacagattctcgaggcacgatctcatcggccaggtggttttggacaacctgctggagcttgctgaacagccccctgaccgtccactctggaggsacaksctggagggtggctcggaaaaggcagatcttggggagctcaacttctcactctgctacctccccacggccgggckcctcaccgtgaccatcatcaaagcctctaacctcaaagcaatggacctcactggtttctcagacccctacgtgaaggcctctctgatcagcgaggggcggcgtctgaagaaacggaagacctccattaagaagaacacgctgaaccccacatacaacgaggccctggtgttcgacgtggctccggagagcgtggagaacgtgggtctcagtatcgcagtggtagactatgactgcatcggccacaatgaagtgatcggggtgtgccgcgtgggcccagmggccgctgacccacatggcagagaacactgggcagagatgctggctaaccctcgcaagcctgtggagcactggcaccagctagtggaggagaagactctaagcagctttaccaagggcggcaaaggattgtcagagaaagagaattcagagtgagggtctggtctaggcctgggattggaccaggcgccctcaggacccatcccttcctgcccggactgtgaactcatctcgaagccataatgtccgagctgctggtgcggggcggcctggacctgttcctccttatcctggaggcgtgaggctaggaggcagcaggcccagctccctgtttcagggtgggaggktctcggcctccattgtctgtcttcttatccccagagttccccctagaggcaggggggcatgcatgtct

SEQ ID NO: 2438 - DNA, 3644 bp, Rattus norvegicus
gaggaggcggaggtcggcgctccggtccgtctctgcccgaggctgtggcggcgccagcggctccagccttagcggttcctccctgggcggcggyggccgcggctcggtcgacgcgttctccgccagctgagtccgccgcagcccgggacgctgcttccccgcccatccccgttctccaggccgcccactggccrtggcgcagccgggcccggctccccagsctgacgtttctcttcaksarcgggtagcagaattggaaaaaattaatgcagaatttttaygtgcacagcagcagcttgagcaagaatttaatcaaaagagakcaaaatttaaggagctgtatttggctaaagaggaggatctgragcggcaaaatgcagtattgcaagctgcgcasgatgacttgggtcaccttcggacacagctgtsggaggcgcaggcagamatkgwgaatatcaaggcgatcgccacagtctctgagaacactaagyawgaagctatagatgaagttwaaaggcagtggagagaagaagttgcttcacttcaggctgtaatgaaagagactgtgcgtgactatgagcatcagtttcacctgaggctggagcaggaacgagcgcagtgggcacagtatcgagagtctgcagaccgggagatagctgacctrwgaagaargttgtctgaargtcaagaggaagaaaatttagaaaatgaaatgaaaaaggcccaagaggatgccgagaagcttcgctctgtcgtgatgcccatggaraaggaaattgcagccctgaaagataaactgacagaagctgaagacaagattaaagagctggaggcctcaaaggttaaggaactgaatcattatctggaggccgagaagtcttgcaggactgatctggagatgtatgtagctgttttgaacacccagaaatctgttctacaggaagatgctgagaaattgaggaaagaactgcatgaagtttgccatctcttggagcaagagcgacaacaacacaaccagttaaaacacacgtggcagaaggccaacgaccagtttttggaatctcagcgcttgctgatgagagacatgcagcgaatggagatcgtgttaacttcagaacagctacgacaagttgaagaactgaagaagaaagatcaggaggaggatgaacaacaaaggatcaataagggaaaagataacaagaaaatagacactgaagaagaagtaaaaataccagtagtatgtgctttaactcaagaagaatcttcaaccccactatcaaatgaagaggagcatttagacagcacccatgggtcagtccattccttagatgcagacttgctgttaccatctggagatccattcagtaaatcggacaatgacatgtttaaagagggactccggagagctcagtctacagacagcttgggaacctcaagctcattgcaatccaaagctttaggctataactacaaagcaaaatctgctggaaatttggatgagtcggattttggaccactggttggagcagattctgtgtctgagaactttgatactgtgtcccttgrgtcactgcagatgccragwggrtttatgttaaccaaagatcaagaaagagcwattwargcaatgacacctgaacaggaggwgacagcatccctcctctcaagtgtcacwcwgggtatggwgwgwgcatatgtctctcctagtggttwccgcttagtgwgtgaaacggaatggaatctcctgcagaaagaggyacataatgctggwaataagcttggtagacgttgtgatatgtgttccaattatgawaaacagttwcawggaattyagattcaggawgctgagacawgagaccaggygaaaaaactgcagttwatgctcargcaagctaatgaccagctwgagaagacawtgwaagakaaacaggagctagakgacttcctcaggcagagtgccgaggactcaagccaccagatatctgcactygttttaagagcccaagcctctgargkmttacttgaagagttacaacagagkttktcccaagcaaagakggatgttcaggagcagatggcagtgctgatgcagtcacgtgaacaggtctcagaagagctggtgaggttacagaaagacaatgacagcctccagggaaagcatagcttgcatgtgtcattacaactagcagaagacttcattcttccagatactgtgcaggtgctccgggaactggttttaaaatatcgtgagaacattgttcatgtgcggacagcagcagaccacatggaagagaagctgaaggctgaaatactttttctaaaagagcaaattcaggcggaacagtgtttaaaagaaaaccttgaagagacattacagctggaaattgaaaactgcaaggaggaaatagcttccatttctagtctaaaagctgaattagaaagaataaaagttgaaaagggacagttggaatctacattaagagagaagtcgcaacaacttgagagcctccaagaaataaaagttaatttagaggaacagttaaagaaggaaactgctgctaaggccactgttgaacagctcatgtttgaagagaagaacaaagctcagaggttgcagacagaattagatgtcagtgaacaagtccagagagattttgtaaaactttctcagactcttcaggtgcagttagagaggatccggcaagcagactccctggagaggatccgggcaattctgaatgataccaaactgacagacattaaccagctccctgagacatgacaccctgatggcaggattctgacctgcattttgggtttttaactcatctttagaataacattaattattatttaactcttaatggaagaagtcacagcaaaaggaggactggagaaatgcagywckrgrgggagaaggctgctgtgtgcagggacagccaacagacgtttcaaagggaacactaatgagacactggactcgattccaacasrcrwgggatcagattgggtgccagaaaagtgctgtttcmttgcmtgcttcctccagcgtggactctggaacataattcctgccatgaaagcaacttcccaatagtgtttggaattacgttttctgttcryacarrctgggagagaaaagtttctttctcctgtggtctggggctcatcmgtagcagtgttcagmtagcarrraggtgtagtgcgctgtgtgagtattttatattaaaatgtggagtgrgrgcarvmmawwrvmwawwrattgtgtttcccttgytcaatgcattttgtttcctytttamccattcctthtattggaagaccttaaatgctattgtaacttgcttgagaactwtaggaccatggcaaacaaaagcaattaaaattaggagratctgaawmwwwrrmwrarrmmaatatatattatatatataycaatttatggaaaaaaagcacaaatamccttggaagcrsywygwstgcacaccatgwtgaacttcytgggcccaaaggtaccagggcaaataactggcaccatctaccctttsgaagtgttttagttactggatcagtggaaaataatactaataaaacaagctatctctkamawhwrrwmaaaaaaammmaaaaaaaaaaaaaaaaaa

SEQ ID NO: 2439 - DNA, 1825 bp, Rattus norvegicus
gcggcgcttttgggtcggggcggcgggcccgggccgaggcaataagagcggcggcggcggcgcggcagcagcagctcccgcggctcctgctctgctccgcctcggccccggagcgaggggcggagagccgcgcgcttgccttagtccgagccgccaccctccccgcgttccccgctttcccggcccgcccgaggccgcccgccccgtccccgccgccccgcagcccggccgcgccccgmcgccgccatgggctrcctcggcaacagtaagaccgaggaccagmgcaacgaggagaaggcgcagcgcgaggccaacaaaaagatcgagaagcagctgcagaaggacaagcaggtctaccgggccacgcaccgcctgctgctgctgggtgctggagagtctggcaaaagcaccattrtgaagcagatgaggatcctacatgttaatgggtttaacggagagggcggmgaagaggacccgcagrctgcaaggagcaacagcgatggtgagaaggccaccaaagtgcaggacatcaaaaacaacctgaaggaggccattgaaaccattgtggccgccatgagcaacctggtgccccccgtggagctggccaaccctgagaaccagttcagagtggactacattctgagcgtgatgaacgtgccaaactttgacttcccacctgaattctatgagcatgccaaggctctgtgggaggatgagggagttcgtgcctgctacgagcgctccaacgagtaccagctgatcgactgtgcccagtacttcctggacaagattgatgtgatcaagcaggccgactacgtgccaagtgaccaggacctgcttcgctgccgcgtcctgacctctggaatctttgagaccaagttccaggtggacaaagtcaacttccacatgttcgatgtgggcggccagcgcgatgaacgccgcaagtggatccagtgcttcaatgatgtgactgccatcatcttcgtggtggccagcagcagctacaacatggtcatccgggaggacaaccagaccaaccgtctgcaggaggctctgaacctcttcaagagcatctggaacaacagatggctgcgtaccatctctgtgatcctcttcctcaacaagcaagatctgcttgctgagaaggtcctcgctgggaaatcgaagattgaggactactttccagagttcgctcgctacaccactcctgaggatgcgactcccgagcccggagaggacccacgcgtgacccgggccaagtacttcatccgggatgagtttctgagaatcagcactgctagtggagatggacgtcactactgctaccctcactttacctgcgccgtggacaytgagaacatccgccgtgtyttcaacgacwgccgtgacatcatccagcgcatgcatcttcgccaawacgagctgcthtaagaagggaacgcccaaatttaattcagccttaagcacaattaattaagagtgaaacgcawtcgtacaagcagttratcacccaccwtmggrcakgatcaacacsgcarcctttccmttttmtccccagtgattvtgaaaaccccsthttccvttcagmttrmttagatgtkcsaaatttagtaagcttaaggcggchymcwgmdgaaawrgaaaamgaaaaagvccacaaaagttccctvtmacwdkcagtaaataaaatraamgcagcaacamrmaraavwaamraartaartgaaataaatgaarcycaaawtgaaahaaawawwrwrwwrwrmadcattaararrtcaaaataaaaattaaarwtgrgmaaaawaaaaaaaaaaaaaaaaaa

SEQ ID NO: 2440 - DNA, 2400 bp, Rattus norvegicus
gtcgtcctgagccccttgcgctccgcccccgcggcccaccgacccactgccccttggatcccctgccccaagctgccaccatgaactacctgcggcgccgcctgtcggacagcaacttcatggccaatctgcctaatgggtatatgacagacctgcagcgcccgcaaccacctccgccgccgccctcagccgccagcccaggggccactcccggatccgctgctgcctctgctgagagggcctccacagctgctccagtggcctctccagcagcccctagtcccgggtcctcggggggcggtggcttcttctcctcgctgtctaacgcggtcaaacagaccacagcagctgcagccgccaccttcagtgagcaggtgggcggtggctctgggggcgcaggccgcgggggcgccgccgccagggtgctgctggtcatcgacgagccgcacaccgactgggcaaaatactycaaagggaagaagatccatggagaaattgacattaaagwagagcaagctgaattctccgatctcaatcttgtggctcatgccaatggtggattctccgtggacatggaagttcttcggaatggggtcaaagttgtgaggtctctgaagccagactttgtgctgatccgccagcatgccttcagcatggcacgtaatggagactaccgcagtttggtcattgggctgcagtatgctgggatccccagtgttaactctttgcattctgtctacaacttttgtgacaaaccctgggtgtttgcccagatggttcgactacacaagaagcttggaacagaggaattccctctgattgatcagactttctatcccaatcataaagagatgctcagcagcacaacataccctgtagttgtgaagatgggccacgcacactctgggatgggcaaggtcaaggtagacaaccaacatgacttccaggatattgcaagtgttgtggcactsactaagacatatgccactgctgagcccttcattgatgctaaatacgatgtgcgtgtccagaagattgggcagaactacaaggcctacatgaggacatcagtgtcagggaactggaagaccaatacaggctctgctatgcttgagcagattgctatgtctgacaggtacaagttgtgggtagacacgtgctcagagatttttgggggacttgacatctgcgcagtggaagcactgcatggcaaggacggaagggatcacattattgaggtggtgggctcctccatgccactcattggggatcaccaggatgaagacaagcagctcatcgtggaacttgtggtcaacaagatgactcaggctctgcctcggcagcgggatgcttcccctggcaggggttcccacagccagactccatccccaggagccctgcccttgggccgccagacctcccagcagcctgcaggacctcctgctcaacaasracccccaccccagggaggccctccacaaccaggcccaggacctcagcgccagggacccccgctgcaacagcgsccacccccacaaggccagcaacatctttctggccttggacccccagctggcagccctctgccccagcgcctaccaagtcccacagcagcacctcagcagtccgcctctcaggccacaccaatgacccagggtcaaggccgccagtcacggccagtggcaggaggccccggagcacctccagcagcccgcccgccggcctccccatctccacagcgtcaggcagggcccccacaggctacccgtcaggcatctatctctggtccagctccaccgaaggtctcaggagcctcacccggagggcagcagcgccaaggccctccccagaaacccccaggccctgctggtcccattcgtcaggccagccaggcaggtcccggacctcgcactgggccacccaccacacagcagccccggcccagcggcccaggtcctgctggacgtcccaccaaaccacagctggctcagaaacccagccaggatgtgccaccacccatcattgctgctgccgggggacccccgcacccccagctcaacaaatcccagtctctgaccaatgccttcaaccttccagagccagccccgcccaggcccagccttagccaggatgaggtgaaagctgagaccatccgcagcctgaggaagtctttcgccagcctcttctccgactgacacctactctgagaaccctaaacccctagacaacccgtctctgggtcctgagtccatttctcacctttggaatctccaaatcccttgagaacccctctctcctggttctacatcccacttctcattcctcaagatgtcccttgagaaacgtggtcctaaatccagttctcacattgggaatccccaagtccatttagaatcctgg

SEQ ID NO: 2441 - DNA, 4612 bp, Rattus norvegicus
cagaaggcggctgaatgggaggcagctttgggaatcattctgaagattacatgggagaccacatatcaacattacagcaggaatccagctatcgggtcgtctagatccaaaaccaagtgctcggtattgtaaccctacgattctctattttgaagcagaagtaggttaaaacaccaaccactgtaaaataggtagttcaaagtagattttggaagatgtcagtcaacatcccttccaactcagtgcccagtggtgccagtcgtttccaagtccatgttataaatgagggccatggcagtggtgcagccatgagtgacagcacggaccccccacattatgaagagacctctttcggggatgaagcccaaaacagactgaaaatcagctttaggcctgggaatcaggagtgctatgaaaattttctccaaactggagagactgctaaaacagacaccacgtttcacgcctatgactctcacacaaacacatattacctacaaacctttggccacaacaccatggacgccgtccccaagattgagtactaccgcaacaccggcagtgtgagcgggcccaaggtcaaccggccgagcctgcaggagatccacgagcagctagctaagaatgtggctgtggcycctggttcagctgacagggttgctaatggagatgggatgcctggagatgagcaarcagaaaacaaggaagaagacgtgactggtgttgtgaagtttggatgggtgaaaggtgtgctggtgaggtgcatgctgaacatctggggagtcatgctcttcattcgcctctcctggattgtaggagaagcgggaattggtctkggagtcmtyatmattskyctkwscrysrtrgtracmwcwmtcacwggkwtstcwatktctgcwatwtgcacaaacggrktksykmgmgsaggtggagcctactacctgatttcccggagcttagggcctgagttcggtgggtcaataggcttsatyyyycsyyycsccaatgcagtgsstgtcgctatgtatgtggyrsggttcgcggagactgtggtagaccttcttaaggagagtgattcaatgatggtggatccaaccaatgacatccgaataatcggttccatcacggtggtgattcttctagggatctcagtagctgggatggagtgggaagctaaggctcaagtgattctcctggtcattctactcattggtatcgcaaacttcttcattggaactgtcatcccatccaacaacgagaagaaatccagaggcttcttcaactaccaagcatctatatttgcggaaaactttgggccaagcttcacagagggagaaggcttcttctcggtctttgctatctttttcccagctgctactgggattcttgctggtgccaacatctctggagacctggaggatccccaggacgccatccccagagggaccatgctggccattttcatcaccaccgtcgcctacataggtgttgctatttgcgtacgtgcctgtgtggtccgagacgccactgggagcatgaacgacactgtcgtttctgggatgaattgcaatgggtccgcagcctgcggactgggctacgacttctcaagatgtcagcatgagccatgccagtatgggttgatgaacaattttcaggtcatgagcatggtgtccgggttcggccccctcatcaccgcagggattttttcggcaacactgtcttcggccctagcctccctcgtcagtgcacccaaagtattccaggctctgtgcaaggacaacatcttcaaaggacttcagttcttcgcaaagggctatgggaaaaacaacgagcccctgagagggtacttcctcacttttgtgatagccatggcattcattctcatcgccgagctgaacgtcattgcacctatcatatccaacttcttcctggcctcatatgcgcttattaatttctcctgcttccatgcctcgtatgccaaatcgccaggatggaggccggcatatgggatttacaacatgtgggtatctctcttcggagccattttgtgctgtgcagtcatgtttgtcatcaactggtgggcggctgtcatcacctatgtcattgagctcttcctctatatctatgtgacttataagaagccagatgtgaactggggctcctccacacaggctctgtcctacgtgagcgctttagacaatgctctggaattaaccacagtggaagaccatgtgaaaaacttcagaccccagtgcattgtcttaacaggaggacccatgacaagacctgctctcctggacataacccatgcctttacgaagaatagtggcctctgtatctgctgcgaagtcttcgtgggacctcgcaagctgtgtgttaaagagatgaacagtggcatggctaaaaagcaggcctggctgatgaagaacaaaatcaaggctttttatgctgcggtggcggcagactgcttcagggacggtgtgcggagtctccttcaggcctcaggcctggggagaatgaagccaaacactctagtgattggatacaaaaagaactggaggaaagctcccttgtctgagcttgagaattacgtgggaatcatacatgacgcctttgactttgagattggtgtagtcatagtcagaatcagccaagggtttgacatctctccagttctccaggtacaagatgaactggagaaactggaacaggagagactggctctggaggccgcaatcaaagacaacgactgtgaggagggcaaggggggcatccgaggcttgtttaagaaggccggcaaactgaacattaccaagccggcccctaaaaaagacagcaacatcagcaccatccagtcgatgcacgtcggggagttcaatcagaagctggtagaagccagcgctcagtttaaaaagaaacagggaaaaggcacgatcgatgtttggtggttatttgatgatggagggttgacactgcttatcccatatatcttgactctcagaaagaaatggaaagactgtaagttaagaatctatgttggaggaaaaatcaaccgcattgaagaggaaaaaatttcaatggcttctcttctcagcaaatttaggataaaatttgcagacattcatataattggagacatcaacattaagccaaacaaagagagctggaaagtctttgaagagatgattgaaccttataggctccacgaaagccacaaagatttgaccactgctgagaaattaaaaagagaaagtccatggaaaattacagatgcagaacwsgargcartcwrksmamagagttaccgccaagttcgactgaacgagctgttacaggagcattccagagccgccaacctcatcgtattgagccttccagtggcgagaaaaggatctatttcggatttgttgtacatggcgtggttagaaatcctgaccaagaacctccctcctgtgctactggttagaggaaatcacaagaatgtcctgacattttactcttaaagcgcgagggatgagaaatgttgtaccttggtgtccgaataattacaaaacgtgtctggtactttgtgttttaaaacctcatctatgaatatacaaacctckggagactatcccacctgattctacataaatttcatcttttttaaaaaagttattattaatgagagttttttcccaccagttttaaaaacatcgaaaacatttttcccttgtcgctggtgaataagaaattaataagagctggctgacatgcttgcaggatgtgctaatgtagatgagctccaggcaaacgcaatctcttgtttccgtggattctkctgcatggccccgtgcaggccacargcccayagcgggctctctttaagttgttattgacagactggtgtggwgaaagmaggcggctatcatagggaaagacacactgggtcagtggcctgattctgcttggcctcctgagaagtttgwggagatttaaaaatcaatatccgsaamctgtaagaaggactagagtctacaaagtgtycaaagcagttacctaaattaaggtttatttaatgcagccgataataagcttaacctctgatcacacgtagcttssattygctgctagccagaggtacrytaggtaggtgagcaaagacacatgttccacttagacgaaatagagtcccaacatmcaaatrtcaattgkcttcckggttaaatgtkkwgaaatttctaccttaatactactttatcttttttctctgattaagtggtttgcatagrcgaaataaaaatasacgatctcattgaaaaataatctcacaggwttccaatccrctactaaaaatatatccagatcctacatttatttacttctctatatacaggtatatgggttttatagaataacaaggatataagtggagaacttgtaaaaatttttaaaaaccacaggtgttgatttttcttcttgttcrtgtgtgtataatatttaatcacagaaaaaatgcttatatgataaatggcttggttttggttttgttggcatattttgactgttctggggaagcttgtggggggcaaatcaacctgaaataaaattctmctaaaaaaaaaaaaaaaaa

SEQ ID NO: 2442 - DNA, 3398 bp, Rattus norvegicus
ggcccacacattagaagtgatttcaccacggagagtcagggtgccggcagtggccaggcgctggagacccgggaagccaagatgagcatcctactcaaggcagccgggttgctgttcctggggatgcttcaagccttcccaaaggatcgaccactggacactacctgtaccggagacctcagctactaccccggggaggctgccaggaactgctgttaccagtgcccctcagggttgtctcctacacagccatgcccacagggccctgccactgccagaaacagtgtgatcctgactactacatcaaacgaagacgggaagtgcacagcctgcgtgacctgtttgccaggcctcgtggagaaggctccatgttctgggaactctcctcgaatctgtgagtgtcagcccggcatgtactgctccacaccagctgtcaattcctgtgcccgatgttctgaaaagacggttgtcaagttcccagacacagcagaaaagaacactatctgtgagctgccctccccaggatctggccccaatggctccaatccagacgactgcaaaacacttactagccataccactcctcaggccatacctactctagaatctccagccaatgacagtgtgaggagcttgctgccaaaacaggtcactgactttgtgaacgaaggtgctactaagctggtgaaggttcctgagtcttcctcttccaaggcaagcatgcctagtccagatccaggtaatgcagagatgaatatgaccttgaagcttccacctccagggacagtccctgacatcagtacttcagaaaacagcatggagcctgccagtaccgcctccaccctaagcctcttggtagatgcccggaccagcagcaggatgcagcctacatctcccttgtccacaggaacaccgtttctggatccagggaccatgctcttctgggtggccatggtggtgctgctggttggctctgcctccttcctcctgtgttactggaaggcctgctggaggcggttccagcggaagtttcacctgaactatctacagcagaccttccagcccaagatggagcaggtagattcctgtcctactgaaaagctaactcagctgcagagaagtgggtcagtgacagattccagcgctggacacacgttgagcccactgagccctccagctgtagagactggtgccagtgttggaaccgcctgcctggagaccctgccgctgctggatgacagcataactgggaactcttttgctcccagagaacctccagagccacgggtatccaccgaacacaccaacaacaggattgagaaaatctacatcatgaaggctgacacagcgattgtgggctcagtaaaaactgaagtccctgagggccgggctccagtagggtctacagagtctgagttggaagctgaactagaagtggaccataccccccattacccggagcaggagacagaaccacctctgggcagctgcactgaggtcatgttctccgtggaggaaggaggaaaagaagaccatgagcccacaactgtctctgagaagtaacacccaatgttagcgggggctagagtacagctgagtgttcagtttgagatcaggttaatacctgggaagctaccacggcttgaactgaagcccggcatccagggtagcacagaatgaagcttcagctgctaccaagaacactggcccctggaccccagcagtgcgcactcaccatcaggctgttgtctactgggggagaagctacaggttgggtccaagcctccttgcccacacccctgtgccctgccttctctccttgggtctcaagtgatggctttactgacatgctaccagccttcagctatacacatggctccctggaacagaaccaacacctaattgcttctactcctgaggaagagggaagttaaaggatgaatgctcatcatcactggcacaatgatagcctgtgcccatcacacagggagggcgaaatgagacccttctggcatggcctccctgttctgtggactccctcagcagctgcaggtgatcccacccactaaatgatgctggagactctactttgccacaggagttcctgtcatgtggtgatgggagtactgtagtcctggccgtccttaacacattgtgcctctatctgttctgccctggaaatgaagaaccattgtccctaagccaccaggatcaggcctgacacctaggaggtttggagcctatctttgaaggcaccctgctgctcacgctgcttgccttaccctgcggcccactctgaggaggcagtgctgctgaacttacctgaagttccgcttttaatgttttgttttgtttttttcctttcgaggtagtgagaattgaacccatggccttgtgcatgccaggaaaaggttgcagggctgatcaaccccagcctagcatttcatactaagcactaaaagctgctgtcactcccagcctggctcactccctggcatttgcgtactcttgtaacaaacgagcagccaactggatgacacatctgctctgtggcagccaggggactctggacttacccttgggccaggcagggagaattctgtttactcactagctgtttgctgtgtggaggaagttgggaccctgtcaagaatcacgaggggagtttctgaaactgcttgaatctatggggaaaagttggagtggctgagtaccaccagaggcgttaaatcacagtctagatactagccagaagggatgtgtgggggctggatagttgcccatttttcttgtacaaggacacagtagatatgtgggcatgcatagtgttcccaaagccatgtcacaatgaccacatggattccacacttttggaagatatttcccaactttttcttcttcttcttttttttttctaagatcttgttctgtatcctaggatagattcgaacttgatatggctgaccctgaacctgtgaccctcctatcttaacttcccaaggaaggacaggcttcagccactatgccagactgccacacatttcaacaaagggacatattcccttgcarargrtgctcttcacacaattttttgaccctctaaaaatccctacgtggcctgtaaaaattaatggatttgtgaggccgaaaactgatcagagagatgagtagtgggaggccctgaacacaaagactgtcaggggtctggtctattctctctagacagggctgttctctttgtgcaaagcacccacagccaagggcaggagcccatgaccagctgtgtgccctttaaatctctccttgtccatctgggcagtcccttcttcccctgttcaaggcctgccctccaaggatgctgggaataaaggatctctgctcacaaaaaaaaaaaaaaa

SEQ ID NO: 2443 - DNA, 2146 bp, Rattus norvegicus
agcccggttgcactttggagaaaccaggagccgccgcccgaggcaggtgcgggcgagccagggcgccgcggccccccaaccctcgtccccgagccaagcgccgggagcctggagctggggcgcccggattccctgccagccrcgcgcgccccagcccagcgaggccccgggcgccccgccgccaccacgccatgctccacctgagcgacttctccggccccgacgcgctcctctccaagcccaccgaaggctgcgcccacaccagccccgagctgccccggctgcctgctagggacgctccctcggccgccgcgtatcctggaggcgacttcttgagctgggctctgagcacctgcggcgccgggggggacttaacagactcctgcttcctggagggccctgcacccacgcccccttcgggcctcagctacagcggcagcttcttcatccaggcggttcccgaacacccgcacgacccggaggccctcttcaacctcatgtctggcatcttgggcttggcacccttccctagccccgaggcggcagcgtctcggtcccccctggatgtccctttccccgcgggtcccgatgccttgytgccggacctttactccccggatctgagttcggccgccttcccggaggcgttttgggaggccgcgccttcggcgggcgctccctcgcagtgcctgttcgagccccagctctccccgcccgacgtcaagcccgggctgagggcgcctcccgcttcgccagcgctggacgctgctgcttcggccttcaaagggccctacgccccctgggagctgctgtcggccggggctccggggaactgtgggtcgcagggaagcttccagaccaccccggaggcacgcttttccgccgtggggaccaaggtcgaggacctgctgtccatcagctgccccgccgagctgcccggtccggctagcagactctacccgccaggggcctacgatgccttctcgctggccccaggtgacttaggggaggggaccgagggcctcccggcgctgctgacccctccgggcggggagggagggagcggcggcgaaggcggagagttcctggccgtccctcargcgcagctgtccccgctgggcctgcgcggcgccgccacggcagacttctccaaagccctggtggccgacctcccggggggcagcggagtggcggcgccttcatcccccgccacctccttccccgcggccaaagcccggcgcaagggacgccggggcggcaagtgcagcgcgcgctgcttctgcccgcggccgcacgtcaaggccttcgcctgccccgtggagagctgcgtgcggacgttcgcgcgctccgacgagctcaaccgccacctgcgcatccacacgggccacaagcccttccagtgccgcatctgcctgcgcaacttcagccgcagcgaccacctcaccacgcacgtgcgcacccacaccggcgagaagcccttcgcctgcgacgtgtgcggccgccgcttcgcgcgcagcgacgagaagaagcgacacagcaaggtgcacctcaagcagaaggcgcgcgccgaggagcgcctcaagggcctgggcttctactcgctgggcctctctttcgccgcgctgtakccggagctggctccgtargtckgcgccgccggcsstcggcgcacgckacacggtcctgccgctccctcgtcccygctgccttccctgcctcttccacgcacgtccggggccasccgcagsmcagctccagttcycccgaagcgmccgccgctcacgcccttcagcacgggctccgcggacagcgcccgctgttttcggagscgccttcctctagccamccgctctggggactgtcctctcggtccacccacagagcaggcgataccttaggactgaagagagtttttgtaactggcgtacgccccacgccttcctctttatcccttcccagagtcaagctggggatgtaccgagccggtctctcaagaactttgtacagcaagtccagcaagcctttggatgtgatgtctttgctttggggttatttcctttttgttgtcgttcattttttgtaaagcagacgctactctcaagcatttgacaaaactgtttatttttgcaattaaaattattgtgct

SEQ ID NO: 2444 - DNA, 2561 bp, Rattus norvegicus
cgccgccctcagtgacgcccgcggggaatgcgggagccggccgcccggctcagccgccgcgcctgcctgccgcccgcgtcacgcgagacccgcaggcccgggacgccgccgcgggccctcgaagcggatgagccgcgcctctgcctgcgcagccaactaaagcggcgtggatgattcgcgacctgagcaagatgtaccgcagacgcgcgcacccggcaccgcatcagcctgctcaacccttcaaatttacaatttcagaatcctgtgatcggattaaggaagagtttcagtttttacaggctcaataccacagtctgaagctggaatgtgagaagctggccagtgagaagacagagatgcagcggcattatgtcatgtattatgaaatgtcctatgggttgaacatagagatgcacaagcaggcagagattgttaaacgactaaatgctatctgtgcacaggtcattccttgcctgtcccaagagcagcaacaactccaagctcagcatttactcacatggacatggtctgcctgtgcctctgacaccacacccttgggcttcagccagccattccacccatctggcagcagtgcaggactgctggccctctccagtgcactaggaggtcagtctcacctcccaattaaggatgagaaaaagcaccatgacaatgatcaccaaagagacagagactccatcaagagctcttccgtatccccatcagctagtttccgaggttctgagaaacacaggaactctacagactattcctcagagagcaagaagcagaaaacagaagagaaggaaattgcagctcgctatgacagtgatggtgagaagagtgatgacaacttggtagttgatgtgtccaatgaggatccatcttcccctcgaggaagcccagcacattccccaagggagaatggcctggacaagacacgcctcctcaagaaagatgctcccatcagccctgcttctgttgcatcttccagcagtactccttcctccaaatccaaagagcttagccttaatgaaaagtctactactcctgtttcaaagtccaatacccctactccacggactgatgcacctacccctggcagtaactctactcccggactgaggcctgtacctggaaagccaccaggtgtggaccccttagcatccagcctgaggaccccaatggctgtaccttgtccatatccaaccccttttgggattgtgccccatgctgggatgaatggagagctgaccagccctggagccgcctatgctgggcttcacaacatctccccacagatgagtgcagctgcggcagcggcagcggcagcggcagcctatggaagatcacctgtggtgggatttgatccacaccatcacatgcgtgtgccagcaatacctccaaacttgacaggcattccaggaggaaaaccagcatactcctttcacgttagtgccgatggtcagatgcagccggtcccctttccccctgatgcgctcattggaccgggaatcccccgacatgcccgacagatcaacacccttaaccatggggaagtagtgtgtgcagtgaccatcagcaaccccacaagacacgtgtacacaggtggcaagggctgtgtaaaggtctgggacatcascsatcctggcaacaaaagcccagtctctcagctggactgtctgaacagggataactacatccgctcctgcagattgctccctgatggccgcaccttaattgttggaggggaagccagtacactgtccatctgggacctggcagctccaaccccacgcatcaaggcagagctgacgtcctcagcccctgcctgctatgctctggccatcagccccgactccaaggtctgcttctcatgctgcagtgatggcaacatcgcagtgtgggatctgcacaaccagactctggtgaggcaattccaggggcacacagatggagccagttgtattgacatttctaacgatggcaccaagctctggacaggtggtttggacaacactgtgaggtcctgggacctgcgtgaagggcggcaactgcagcaacacgacttcacctctcagatcttttctttgggctattgcccaactggagagtggcttgcagtggggatggagaatagcaatgtggaagtgttgcatgtcaccaagccagacaaataccagttgcatcttcatgagagctgtgttctgtcactcaagtttgcccactgtggcaaatggtttgtaagacctggaaaggacaaccttttgaatgcttggaggacaccttatggggccagcatcttccagtccaaagaatcctcatcggtgcttagctgtgacatctctgcggatgacaagtacattgtcactggctctggggacaagaaagctacggtttatgaagttatttattaaggacaaatcttcgtgcaaactggactcctcctcatagcactttgcgctgttgtacttttctgttcacccctcacccattctaaaaccaaggatttcaataccattgcagttgtggagtttaaggccttccatagcccacgtctc

SEQ ID NO: 2445 - DNA, 1647 bp, Rattus norvegicus
atggccgagaagcagaagcacgacgggcgggtgaagatcggccactacatcctgggggacacgctgggcgtcggcaccttcgggaaagtgaaggtgggcaagcacgagttgactggacataaagttgctgtgaagatactcaaccggcagaagattcgaagcctggacgtggtcgggaaaatccgcagagagatccagaacctgaagcttttcaggcaccctcatataatcaaactgtaccaggtcatcagtacaccgtctgatattttcatggtcatggaatatgtctcaggaggagagctatttgattatatctgtaaaaatggaaggttggacgaaaaggagagtcgacgtctgttccagcagatcctttctggtgtggactattgtcacaggcatatggtggtccacagagatttgaaacctgaaaacgtcctgcttgatgcacacatgaatgcaaagatagccgacttcggtctttcaaacatgatgtcagatggtgaatttttaagaacgagctgtggctcgcccaattatgctgcaccagaagtaatttcaggaagattgtacgcaggccctgaagtagacatctggagcagcggggtcattctctatgctttgctgtgtggaactctcccttttgatgatgaccacgtgccaactctttttaagaagatatgtgacgggatattttatacccctcagtatttgaatccctctgtaataagccttttgaagcatatgctgcaggtagatcctatgaagagggccacaataaaagatatcagggaacatgaatggtttaagcaggaccttccaaaatatctctttcctgaagacccgtcttatagttcaaccatgattgatgatgaagccttaaaagaagtgtgtgagaagttcgagtgctcagaggaggaggtcctcagctgcctgtacaacagaaaccaccaggacccactggcagttgcctaccacctcataatagacaacaggagaataatgaacgaagccaaagatttctacttggcaacaagcccacccgattctttcctcgatgatcaccatttaactcggcctcaccctgagagagtaccattcttggttgccgaaacaccaagggcccgacacaccctagatgaattaaacccacasrarkccaaacaccaaggcgtacggaaggcaaagtggcatttggggattcgaagtcaaagccgacccaatgacatcatggcagaagtgtgtagagcaatcaagcagttggactatgaatggaaggttgtaaacccctattatttgcgtgtgcgaaggaagaaccctgtgacaagcacattttccaaaatgagtctacagctataccaagtggatagtaggacttacttattggatttccgaagtattgatgatgagattacagaagccaaatcagggactgctactccacagagatcgggatccatcagcaactatcgatcttgccaaaggagcgactccgacgccsaggctcaaggaaagccctcagaagtctctcttacctcatccgtgacctccctcgactcctctcctgttgacgtagctccaagaccaggaagtcacacgatagaattttttgaaatgtgtgcaaatctaattaaaattcttgcacagtaa

SEQ ID NO: 2446 - DNA, 8404 bp, Rattus norvegicus
  misc_feature (8401)..(8401): n is a, c, g, or t
ctcgcacccgctgcactgcacaggggaagaaaaggagcccagggtgtgagccggccagcggccacaacttctggtcctctcccgtgtcctccttccatcttcttacaggcgtccccacctcaggacttttcctgcaggctgcgaggggaaccaacttcgtggccactagcctcctggagagggcgactctcctcccatccactcaagatgctcaggggtccgggacccgggcggctgctgctgctagcagtcctgtgcctggggacatcggtgcgctgcaccgaaaccgggaagagcaagaggcaggctcagcaaatcgtgcagcctccgtccccggtggctgtcagtcagagcaagcctggctgttttgacaacgggaagcattatcagataaatcagcagtgggaacggacctacctaggcaacgccctggtttgtacctgctatggaggaagcagaggttttaactgcgagagcaagcctgaacctgaagagacctgttttgacaaatacactggaaacacttacaaagtgggtgacacttatgagcgccctaaagattccatgatctgggactgtacctgcattggggctgggcgaggcaggatcagctgtaccattgcaaatcgctgccatgaagggggtcagtcctacaagattggtgacaagtggaggaggccacatgagactggtggctatatgttggagtgtttgtgtctggggaatggaaaaggggaatggacckgcaagccmrtagctgagaaatgttttgatcacgctgctgggacttcctacgtcgtgggggagacctgggaaaagccctaccaaggctggatgatggtggactgtacttgtctgggcgaaggcaatgggcgtatcacctgcacctcccggaacagatgcaatgatcaggacaccaggacgtcctacagaattggagacacatggagcaagaaggacaacagagggaacctgctccagtgtgtctgcacaggcaacggcagaggggagtggaagtgtgagcgacatgttctacagagtgcttcagctggatctggctccttcacagatgtccgaacagctatttaccaaccccagacccacccccagcccgcaccgtacggccactgtgtcacagacagcggygtggtctactctgtgggaatgcagtggctgaagtctcaaggagacaagcagatgctgtgcacttgcctgggcaatggcgtcagctgccaggagacagctgtgacccagacttacggtggcaactcaaacggggagccctgtgttctcccgtttcactacaacggtaggaccttctactcctgcaccaccgaagggcggcaagacggacatctgtggtgtagcacaacttcaaattatgaacaagaccagaagtattctttctgcacagaccacgcggttttggttcagactcgaggtgggaattccaatggtgccttgtgccacttccccttcctgtacagcaaccggaattacagcgactgtacttctgagggtaggcgggacaacatgaaatggtgcggcaccacccagaactacgatgccgatcagaagtttggattctgcccaatggctgcccatgaggagatctgcacgaccaacgaaggggtcatgtatcgcattggggaccagtgggataagcagcatgacctgggccacatgatgaggtgcacgtgtgttgggaacggccgtggacaatgggcctgcatcccctactcccagctccgagatcagtgcatcgttgatgacattacttacaacgtcaacgacacgttccacaagcgtcacgaggagggacatatgctgaactgtacctgcttcggtcagggccggggcagatggaaatgtgaccccatcgaccgatgccaagattcagagacccggacattttaccagattggtgactcctgggagaagtttgtgcatggtgtcagataccagtgttactgttacggccgtggcattggggagtggcactgccagcctctgcagacctacccaggcacaactggacctgttcaagtaattatcacggagacccccagccagcccaattcccaccccatccagtggaatgccccggagccttcacacatcaccaagtacattctcaggtggagacctaaaacctctacgggtcgctggaaggaagctaccattccaggccaccttaactcctataccatcaaaggcctgaccccaggtgtgatctacgagggacagctcatcagcatccagcagtacgggcaccaagaagtgactcgctttgacttcaccaccagcgccagcacacctgtgaccagcaacacagtgactggagagactgcgcccttttctcctgttgtggccacttccgaatctgtcactgaaatcacagccagcagcttcgtggtctcctgggtctcagcttccgacacggtgtcaggattccgagtggagtacgaactgagcgaggaaggagatgagcctcagtaccttgatcttccaagcacagccacttctgtgaacattcctgacctgctcccgggcagaaagtacatcgtcaacgtctatcagatatctgaagagggaaagcagagcttgatcctgtctacatcacagactacagcacctgatgcgcctccagaccctactgtggaccaggttgatgacacttccattgttgttcgatgraryaracmcywkkcwcctaycrcagggtacaggattgtctattcaccttcagtagaaggcagtagcacagaactcaaccttcctgaaacggccaactccgtcaccctcagcgacctgcagcccggtgttcagtacaacatcactatctatgctgtggaggagaaccaggagagcacacccgttttcatccagcaggagactactggcgtcccacgatccgrtrayktwmmmscwccaaaggacctacagtttgtggaagtgaccgacgtgaaagtcaccatcatgtggacacctcctaatagcgcagtgactggataccgtgtggatgtcctgcctgtcaacctgccaggggaacatgggcagaggctgcctgtcaacaggaacacctttgctgaagtcaccggactgtccccaggggtcacgtacctcttmaaagtctttgctgtgcatcagggcagggaaagcaagcctctgacagcacaacagaccaccaaactcgatgctcccactaacctccagtttgtcaatgaaacggacagaacagttctggtaacttggactccacctcgagcccggatagcaggctaccgactgacagtgggcctcacccgaggaggccagcccaagcagtacaatgtgggacccatggcttccaagtatcccctgagaaatctgcagcctgggtctgagtacactgtgaccttgatggctgtgaaaggcaaccagcagagtcccaaagccaccggagtctttactaccctgcagcctctgcgctccattccaccttataacaccgaggtgacagagaccacaatcgtgatcacctggacccccgctccaaggattggcttcaagctgggtgtacgaccaagccagggaggtgaagcaccccgagaagtgacttcagactcaggaagcatcgttgtgtctggcttgactccaggcgtgkratacacgtacaccatccaagtcctgagggacggccaggagagagatgcaccaattgtcaaccgagtagtgacaccgctgtctcccccaaccaacttgcacctggaggccaatcctgacactggagtgcttaccgtctcctgggagaggagcaccaccccagatattactggctacagaataacyaccmcccccmsaaamrrrmarmagggaaccgctttggaagaagtggttcatgccgatcagagttcctgcacttttgaaaaccgtaatcctggcctggagtacaatgtcagtgtttacactgtcaaagatgacaaggaaagtgcccctatctctgataccgtcatcccagaggtgccccagctcactgacctaagctttgttgatataactgactcaagcatcggcctgaggtggaccccgctaaactcttccaccattatcgggtaccgaatcacagtagttgcggcaggagaagggatccccatttttgaagattttgtggactcctcagtaggatactacacagttacagggctggaacccggcattgactatgacatcagcgttatcactctcattaatggcggagagagtgcccctactacactgacacagcaaacggccgtccctcctcccacggatctgcgattcaccaatatcggtccggacactatgcgggtcacttgggccccgcctccgtccattgagctaaccaacctcttggtgcgctactcacctgtgaagaacgaggaggatgtggcagagctgtccatttcaccctcagacaacgccgtggtcctaacaaatctcctgcctgggactgagtacytagtcagtgtctccagcgtgtacgaacagcatgagagcatmcctctcagaggaagacagaaaacaggtctggactccccaactggttttgattcttctgatgtcaccgccaactcattcaccgtccactgggtggctcctcgggcccccatcaccggctacatcatccgccatcacgccgagcattctgccggaagacccaggcaagaccgagtgccgccctcaaggaattctatcaccctcaccaaccttaatccgggmacggagtacattgtcaccatcattgctgttaatggcagagaggagagccccccactgattggccagcaatccacggtttccgatgtcccgagagatctggaggtcatcgcttccacccccaccagcctgctcatcagttgggaaccccccgccgtctctgtgcgctattacagaatcacctatggagagacaggaggaaatagccctgtccaggaattcactgtgcccggaagcaagtccaccgccaccatcaacaacattaaaccaggagcagactacaccatcaccctgtatgctgtcactggccgtggggacagtccagccagcagcaagccagtttccatcaattatcaaacagaaattgacaagccatcccagatgcaggtgacggatgtccaggacaacagcatcagtgtcaggtggctgccttcaacttctcctgtgacaggttacagagtgaccaccgctcccaaaaatggcctaggaccaacaaaatctcaaactgtcagtccagatcaaacrgaaatgaccattgaaggtttgcaacccaccgtggagtatgtggttagtgtctatgctcagaaccggaacgragaaagccagcccctggttcagactgcagtgaccaacattgaccgccctaaaggactggcattcactgatgtggatgtcgattccatcaaaattgcctgggaaagcccacaggggcaagtttccaggtacagggtgacctactcaagccctgaggatggaatccatgagcttttccctgcgcctgatggtgacgaggacacggcagagctgcacggcctcaggccgggttctgagtacacagtcagtgtggttgccttgcacggtggcatggagagccagcccctgattggagtccagtccacagccattcctgcgccaaccaatctgaagttcactcaggtgtcacccaccaccttgactgcccagtggacagcgcccagtgttaagctcactggctaccgagtgcgggtgaccccgaaggagaagacaggaccaatgaaagaaatcaacctttctccagacagcacctccgtgattgtgtcagggctcatggtggccaccaagtatgaagtcagcgtctatgctctcaaggacacattgacaagcagaccagctcagggagtcgtcacgactctggagaatgtcagccctccaagaagggcccgtgtgaccgacgctacagaaactaccatcactattagctggagaacgaagacagagacgatcactggcttccaagtcgatgccattccagccaatggccagaccccggttcagaggaccatcagcccggmtgtcagaagctatactattacaggtttacagccaggcactgactacaagatycacctgtacacgctcaacgacaatgcccggagctctcctgtggtcattgatgcctccacggccattgatgccccatccaamctgcggttcctgaccaccacacccaactccttgctggtatcatggcaggcaccccgtgccaggattactggctacattatcaagtatgagaagcctggatcccctcccagagaagtggtccctcggccccgccctggtgtcacggaggccaccatcactggtctggagccaggaaccgagtacaccatctatgtcatcgcactgaagaacaatcagaagagtgagcccctgattgggaggaaaaagacagrwsagcttccccaactggttacccttccacaccccaatcttcatggaccagagatcttggatgttccctccacagttcaaaagacccccttcgtcamcaaccctgggtatgacaccgaaaatggtattcagcttcctggcacatcccaccaacaacccagtgttgggmaacaaatgatctttgaggaacatggctttaggcgaaccacgccacccactgcggccacccccgtcaggcttaggccaagaccatacctgccgaatgtagatgaggaggtccaaatcggtcatgttcccaggggmgacgtagactaccacctctatcctcatgttccggggctcaatccaaatgcctctacaggacaagaagctctctctcagacaaccatctcttggacgccattccaggagagttctgagtacatcatttcatgccaacctgttggcactgacgaagagcccttacagttccaagttcctggaacttctaccagtgcgactctgactggccttaccagaggggtcacctacaacatcatagtggaggccctgcacaaccagaggaggcacaaggtccgagaaraggttgttactgtaggcaacactgtcaacgaaggsctgaaccagcctacggatgactcatgctttgacccttacacggtttcccattacgccgttggagaggaatgggagcggttatmtgamtctgsctttaagctcacttgccagtgcttgggctttggcagtggtcatttcagatgcgattcatctaaatggtgcmatgacaacggtgtcaactacaagatcggagagaagtgggatcgtcagggagaaaatggccagcggatgagctgcacatgtctcgggaatggaaagggagaattcaaatgcgatccccatgaagcaacgtgttatgacgacgggaagacctaccacgtaggagaacagtggcagaaagagtatctcggagccatttgctcctgcacgtgtttcgggggccagcggggctggcgctgtgacaactgccgcagacctggggctgctgaacccagtcccgatggtaccactggccacacctacaaccagtatacacagagataccatcagagaacgaacactaatgtaaattgcccaattgaatgcttcatgccgttggacgtgcaggctgacagagatgattccagagagtaatctttccatccagcccaagccaacaagtgtctctctaccaaggtcaatccacaccccagtgatgttagcagaccctccatttctgagtggtcatttcacccttaagccttctgctctggagtcaagttctcagcttcagctcaacttacagcttctccaagcatcgccccgcgggatgttttgagacttccctcttaaatggtgacagttggtgccctgttctgcttcagggtattcagtactgctcagtattattgtctaagagaatcaaaagttcttgtgatttggtctgggatcaaagggaamcrsrggtasccaaccacgatscawtgaattgaatggtagtacccragagcgggagcaggaagttaaaccagacagttctgctttcyyttsccgyctgatctscagcactgtcaggaggcctgtcctgtggctgtgtccaaacaccccacaggactcactgtcccaacaatcctaattgcctagaaatatctttctcttacctgttatttatcaatttttcccagtatttttatacggraraaattgtattgaagacactttgtatgcagttgataagaggaattcagtataattatggttggtgactatttttataatgtacatgccaacactttactactgtggaaagacaagtgttttaataaaaagatttacattccawaaaaaaaaaaaaaaaactcgagggggggcccggtacccaactcgccctatagtgagtcgtataacaaatccngaa

SEQ ID NO: 2447 - DNA, 12507 bp, Rattus norvegicus
  misc_feature (12245)..(12245): n is a, c, g, or t
agatggcggcagctgcggtggagcggagagtgtgagcgccgcccgggagccgccggcccgggcgcagtgcgaccccgaccgcgcccgcccgcctgcccaccatgggcaacgaggccagcctggagggcggcgcgggcgaagggccgctgccgccgggaggctctggtctgggtccgggccccggagcagggaagccgccttcagcactagctggcggcggacagctccccgtggctggtgctgcgcgagcggcgggtcccccgacccctggtctcggtctggtccccggccctggtcccggccccggcccgggcagtgtttcccggagactggaccccaaggagcccctgggcagccagagagcaacttctccaaccccaaagcaagcttctgctactgctcctggccgagagagcccccgagagacaagggcccaaggcctgtcaggccaggaggccgaaggtccccgcaggacactgcaggtagacagcaggacacagagatcaggacggtccccctccgtgtcaccagacagaggcagcactcccacatcaccctattccgtcccccagattgcccctcttcccagcagcaccctgtgtccaatatgcaagacatcggacctcacatcaacctccagccagccaaacttcaacacctgcacccagtgtcacaacaaggtctgcaaccaatgtgggttcaaccccaaccctcacctcacccaggtgaaggagtggctctgtttgaactgtcagatgcagagggccctgggaatggacatgaccactgcacctcggtccaagagccagcagcagctacactccccggccctgtctcctgcccactccccagccaaacagcctctggggaagccagagcaagagagatctcggagcccaggggccacacagtctggtccccgccaggctgaagcagccagggccacctcagtgcctgggcctacccaggcaactgcccctccagaggtggggagggtgtctcctcagccccctctctctaccaagccttccacagctgagcccaggccacctgcaggagaggcccagggcaaaagtgccaccacagtgccctccgggcttggtgctgctgaacagacccagggagggctcaccgggaagctctttggccttggagcatcactgctgacccaggcaagcacccttatgtctgtgcagccagaggctgacacccagggccagccttcccccagcaaggggccacccaagattgtcttcagtgatgccagcaaggaggcgggtccaagacccccaggctcagggcccgggcctgggccaacccctggagccaaaacggagcctgggcctagaacaggtcctggatcagggcctggggccctggcaaaaactggaggaacccccagtccaaagcatggcagagcagaccatcaggcagcatccaaagctgctgccaagccaaagaccatgccgaaggaaagggctgcctgcccactgtgccaagccgagctcaacgtgggtagcaggggcccagccaactacaatacctgcactgcctgcaagctccgggtgtgcaccctgtgtggctttaacccgacaccacacctggtggagaaaacagagtggctctgtctgaactgccaaaccaagaggctgctggagggcagcttgggggagccggcccccctgcctctgcccaccccacaggagcctccagcaggggtccctcagcgagcagctggagcaagtcctctgaagcagaaagggccacaggggccgggccagccctcaggctccctgcctcccaaggccagtcctcaagccgccaaggccagccctcaggccgccaaggccagccctcaggccaagcctctcagggcttctgaacccagcaagacctctagcagcgccccggaaaagaagacagggatccctgtgaaagctgagcctgtgccgaagccacctccagagactgctgtgcctcctgggactcctaaagcaaaaagcggggtgaagaggaccgaccctgccaccccagtcgtcaagcctgttccagaagctcccaagagcggggaggctgaggaacctgtccccaagccttactctcaggatctgtctcgaagcccacaaagcctcagtgatacaggctactcctccgatggcgtctccagctcccagagtgagatcacaggtgttgtacagcaagaagtggagcaacttgacagtgcgggggtgacaggcccacgtccacccagcccctcagagctccacaaagtgggcagtagtatgcgcccttccctggaggcccaggctgtggctcccagtggtgagtggagcaagccacccagcggcagtgctgttgaagaccagaaacggcgtccccactccctgtccatcatgcccgaggccttcgactctgacgaggagctgggggatattctagaagaggatgactccttggctatggggcgtcagagggagcagcaagacacagctgagtcttcagatgactttggcagccagctgaggcatgactacgtggaagacagcagtgaaggcggcttgtctccccttccacctcagcccccagccagggcagatatgactgatgaagagttcatgcggcggcagatcctagaaatgagcgccgaggaagacaacttggaggaagacgacaccgctgtctccgggcgaggcctggccaaacacggtgcccagaaggcaagtgccagacccaggcccgaatctagccaagaatcagtagcactgcccaagaggcgcctgccccataatgccaccacaggttacgaggaacttctgtctgaggaaggcccagcagagcccactgacggagcccttcagggaggtctccgacgctttaaaactattggactcaacagcacaggtaggttatggtcaacgagcttagacctgggccaaggctctgatcccaacctagaccgggagcctgagctggagatggagagccttacaggctcgcctgaagaccgctctcgtggggagcactcctctacactgccggcttccacgcctagctatacatctggcacctcacccacctccctgtcttccctggaggaggacagtgacagcagccccagccgcaggcagcggctagaagaagcgaagcagcagcgcaaggcccggcaccggtcccacgggcccctgctgcccaccattgaggactcttccgaggaggaggagctgcgggaagaagaggagctgctgcgtgagcaagagaagatgcgggaggtggaacagcagcgaattcgaagcacagcccgcaagacccggcgtgacaaggaagaacttcgggctcagcggcggcgtgagcgctccaagacaccgcctagtaacctgtcacccattgaagatgcgtcccctacagaggagctgaggcaggcagcggagatggaggagctacaccgctcttcctgctctgagtactccccctccccctccctggactcagaggctgagaccctcgatggcggccccactcggctctacaagtcgggcagcgagtacaacctgcctgcctttatgtccctctgctcaccaaccgagaccccttcaggcagttccaccacgcccagttctggacggccccttaagagtgcggaggaggcctacgaggacatgatgagaaaagctgagctgctccagagacagcagggccaggcggcaggggcccggggaccccatggcggcccctctcagcccacaggcccccgcagccagggctcctttgaataccaagacaccctagaccatgactatggcggcagggcttctcagcctgcggcagatggcacgcccgcaggcctcggagcaacagtgtatgaggagatccttcagacatcccagagcatagcccggatgcggcaggcctcctcgcgggatctggccttcactgaggacaaaaagaaggagaagcagtttctgaatgcggagagtgcatacatggacccaatgaagcaaaatggtggcccacttacccctgggactagccccacccaacttgctgctcctgtgtcatttcccacttccacctcctcagacagcagcgggggccgagttattcccgatgtcagagtcactcagcattttgcaaaagagcctcaggagcctctcaagctacatagctctcctgcctctcccagtctggcctctaaggaggtaggcatgaccttctcccagggtcctggaactccagccaccacagccatggcgccttgtccagccagccttccacgggggtatatgactccagccggccctgagcgcagcccatcaacgtcttccacaatacacagctatggacagcccccaaccactgctaactatgggtctcagacggaggagctgcctcacgctcccagtggccctgctggaagtgggcgggcctccagagagaagcctctgagtgggggtgatggtgaggttggtcccccccagccttctcggggatattcttattttacgggctctagcccacctctctctccatccaccccctccgagagccccaccttctctccaagcaagctgggtccaagggccacagcagagttctctacacagacgccaagcctaacgccttcctctgacattccacggagcgttggcaccccttcccccatggtagcccaaggcacgcagacgccacaccgacctagcactcctcgcttggtgtggcagcagtcttcccaggaggctcctgttatggtcatcacgctagcttcagatgcttctagccagacccgaatggtacacgccagtgcctctacttcccctctgtgctcgcctacggactctcagcctgcctcccatagctacagccagaccacacccccaagtgcatctcaaatgccctcagaaccagctgggccacctggtttcccacgagcacccagtgctggtgtagacgggccattggcgctgtatggctggggtgccctccctgctgaaaacatctccttatgccggatctcctctgtccctggaacatctagagttgagccgggccccaggcccccgggcaccgcagtggtcgaccttcgcacggctgtcaagcccacacccattatccttaccgaccagggcatggatctgacctctcttgctgtggaagcaaggaagtatggccttgccctggatccagttccaggccgccagtcaaccgccgtgcagcctctagttattaacctcaatgcccaagagcagacccataccttcctggccactgccaccacagtgagcatcaccatggcctcatctgtgctcatggcgcagcaaaagcaaccagtggtatatggagatcctttccagagccgcctcgactttggccagggttcaggtagccctgtgtgcctggcccaggtcaagcaagtagagcaggctgtccagacagccccataccgaggtgggcccaggggaagacccagggaggctaagttcgccaggtataaccttcccaaccaggtaacacctctggccagaagggacattctgatcactcagatgggcactgcccagagtgttagcctgaagccaggaccagtgccagagcctggtgctgaaccccaccgggctactcctgcagagctccgggcacatgctctaccaggtaccaggaagccacacacagtggtggtgcagatgggagagggcgcagccggcacggtgactaccctgctcccagaagagccagcaggagccctggacctcactgggatgaggcccgagagccgactggcatgctgtgacatggcctataagtttccctttggcagtagctgcactggtaccttccatcctgcccctagtgcacctgacaagagtgtgacagatgctgccctgcctggccaaagcagtggccccttctacagtcccagagaccctgagcctcctgagcccctcaccttccgggcacaaggggtcgtaggacctgggccccatgaagaacagaggccctacccacagggcttgcccggtaggctctactcctccatgtctgacaccaatttggctgaagctggtctcaattaccacgcccagaggattgggcagctcttccagggccctgggagggactcagctgtggatctcagctcgctgaagcattcttacagcttaggcttcgctgatggacgctacttggggcagggcttacagtatggctcgttcacggacctgcgccaccccacagaccttttgtctcacccactgcccatgaggccatacagctctgtgtcaaacatctattcggatcaccggtacggcccacggggagatgccgtcggctttcaggaggccagcctggcccagtacagtgccaccacagcccgcgagatcagccgcatgtgtgccgccctcaactccatggaccagtacggtgggcggcatggcggtggaagtggtgggcccgaccttgtgccgtatcagccccagcacgggcctggactcaatgctccacagggtctggcttcccttagatctggcctcctcggcaaccccacctacccagaagggcaaccaagtcctgggaaccttgctcagtacgggcctgcagcaagccaaggaacagcagtcagacagttgctcccatccacagcaacagtgcgtgcagccgatggcatgatctactcgactatcaataccccaatcgctgcaacactgcccatcaccacccagcctgcctcagtactgcggcccatggtgcgtggtggcatgtacaggccttacggatctggcggagtcacagctgtgccccttaccagcctgacccgggtgcccatgattgcccctcgggtacctcttggaccagcagggttataccgctatcctgcaccaagtcgattccccatcgcttccaccattccacccgctgaaggacctgtctatttgggaaagccagcagccgccaaggcttcgggggcaggaggcccgccaaggcctgagctaccagcagggggtgctcgagaagaacctctctccacaactgcccctcctgctgtcatcaaggaagccccggtggcccaggccccggccccaccaccaggccaaaagccagcaggagatgctgctgctgggagtggcagtggagtcctcggccggcctgtgatggagaaggaggaggcatctcaggaggaccggcagcgaaagcaacaggagcagctgctgcagctggagcgggaacgggtagagttggaaaagctccggcagttgcggctacaggaggagctggagcgagagagggtggagctgcagaggcatcgtgaggaggagcagctgcttgtgcagagagagttgcaggagctccagaccatcaagcaccatgttctgcagcagcagcaagaagagcgccaagctcagttcgcactgcagcgcgagcagctggcacagcagcggctgcagctagagcagatccagcaactgcagcagcagctgcagcagcagctagaggagcagaaacagaggcaaaaggccccctttcctgcaacctgtgaggcgcctagccgagggcctccccccgctgctaccgagctggcccagaacggccagtattggccaccattgacccacacagccttcatcgccgtggcaggaaccgaagggcctgggcaagctcgtgagcccgtgctgcacaggggcctccccagctctgcctcagacatgtccctgcaaactgaggagcagtgggaggcaggccgtagtggcatcaagaaacgtcactctatgccacgcctgagagacgcctgtgaaccagagtcaggccctgatcccagcacggtcaggaggattgcagacagcagtgttcagacagatgatgaggagggcgagggccgctacctcctgacccgtaggcgcaggacacggcgcagtgccgactgcagtgtgcagacagatgacgaggacaatgccgaatgggagcagcctgtccgccgccgcaggtctcgtctttcccgtcactcagactcaggctctgacagcaagcacgaggcctcggcctcatcgtccgctgctgccgctgcggcgagggccatgagcagtgtgggtatccagaccatcagtgactgctctgtacagacagagcctgagcagctgcccagggtctcaccagccatccacatcacagccgccactgacccaaaggtggagatcgtcagatacatatcagcaccagaaaagactgggcgaggggagagcctggcctgccagacagaacccgatgggcaggctcagggtgtggctgggccacagctcataggaccaactgccatcagcccctacctacctggcatccagatagtcaccccaggagccctaggcagatttgaaaagaagaagccagatcctctggagattgggtaccaggcccacctgcccccggagtccctgtcgcagcttgtgagccgccagcctcccaagtctccacaagtgctctactcaccagtgtcgccactgtccccacaccggctcctggacacctcgtttgcttccagtgagaggctgaacaaggctcatgtgagtccccagaagcagttcatagctgacagcactcttcgccagcagactctgccgcgccccatgaagaccctgcagcggtccctgtccgaccctaagcccctgagccccaccgccgaggagtctgccaaagagagattctccctctaccagcaccaggggggactaggtagccaggtgtcggcgctgccacccaacggcctggtccgcaaggtgaagcggacactgcccagcccccctccagaggaagctcaccttcccctggctggccaggtgccctcacagctgtatgcagccagtctgctgcagcgagggttggcggggcccaccaccgtccctgctaccaaggccagcctgctccgggagctggaccgggacctgcggctggtggagcatgaatccaccaagctgcgcaagaagcaggcggagttggacgaggaggagaaggagattgatgccaagctcaagtacctggagctgggcatcacccagcgcaaagagtctttggccaaagaccgggttggccgtgactacccacctttacgtggccttggtgagcatcgtgactacctgtctgacagcgagctcaaccagctgcggctccagggttgtaccacgcccgctggccagtatgtggactaccctgcctcagctgctgtgcctgccaccccctctggccccactgccttccaacagccccggttcccacctgcagccacacagtacactgcaggcagtagtggaccaactcagaatggatttctagcccaccaggcacctacctacactggccctagcacgtacccagcacctacctaccctcctggaacgagttatccagctgagcctggcctgccaagccaaccggctttccaccccacaggccattacgcagccccaacgcccatgccaaccacgcagagcgccccttttccagtccaagctgacagtcacgctgcccaccagaagccgcgccagacctcactggctgatttggagcagaaggttcccaccaattatgaagtgatcagcagccctgctgtaaccgtgtcctcaaccccctctgagaccggctacagtggtccagctgtgagcagcagctacgagcacggtaaagcccctgagcatccccggggtggtgatcgaagcagtgtgagccagagcccagcccctacatatccctctgactcccattacaccagtctggagcagaacgttccccgaaactatgtgatgatcgatgacatcagtgagctaaccaaggacagcacccccactgcctcggatagccaacggccagagcccttgggcccaggtggagtcagtgggcgtcccgggaaggatcccggagaaccagctgtcctagagggacccactctgccctgctgctatggcagaggtgaggaagaatctgaggaggactcatatgacccccgtggcaaatctggtcatcaccggagcatggagagcaacggccgaccagccagcacccactattacagtgacagtgactatagacatggggctcgagcagacaagtatggcccaggacccatggggccaaagcatccctctaagaacctggccccggctgccatctcctccaagcgcagcaagcaccggaagcaaggcatggagcaaaagatctccaagttctcacctatcgaggaggccaaggacgtggaatcagacctggcctcctatcccccacccaccgtcagcagcagcctgacctctcggagcagaaagttccaagacgaaatcacctatgggctcaagaagaatgtgtatgaacagcagaggtactacggggtgtccagccgggacacagccgaggaggatgaccgcatgtatggtggtagcagccggtcccgagtggcatcggcatacagtggggagaagctgtccagccatgatttcagcagccgaagcaaagggtatgaacgggaacgggagactgcacagcgacttcaaaaggcggggcccaagccctcatccctgagcatggctcatggacgggcacggccccccatgaggagccaggcctctgaagaggagagccctgtcagccccttagggcggccccgtcccgcagggggcgctcttcctcctggggatacctgcccacagttctgctccagccactccatgccggacgtccaggagcacgtcaaggacggaccgcgcgcccacgcatataagcgtgaggagggctacatcttggatgattcccactgcgtggtttcggacagtgaagcgtatcacctgggccaggaggagacagactggtttgataagccccgagatgcccgctccgaccggttcaggcaccatggggggcatacagtctcctcctcccagaagcgaggccctgccaggcacagctaccatgactacgatgagccccctgaggagggcctgtggcctcatgatgagggtggtccaggccggcatacctcagccaaggagcaccggcaccacggtgaccacgggaggcactcaggccgccatgctggtgaggagccagggcgccgtgctgccagaccacatgctcgggacatgggtcgccacgagacccggcctcaccctcaggccagccctgcccctgccatgcaaaagaagggtcagcctgggtaccccagctctgctgattactcacagccatcccgggctccgtcagcataccaccatgcctctgacagcaaaaagggctcccggcaggcccactctgggcctactgtactgcagccaaagccagaagcccaggcacagccacagatgcaaggtcggcaggcggttccgggaccgcagcaatcacagccaccatcgtccaggcagacgccctcaggcacagcatcacgccagccacagacacagcagcagcagcagcagcagcagcagcagcagcagcagcagcaacagcaacagcaacagcagcaacagcaaggtcttgggcaacaagctccccagcaggctccatcacaggctcggctacagcaacagagccagccaaccacccggagcacagcccctgctgccagccacccagcagggaaacctcaaccaggccccaccacagccccagggccccagccagcaggactgccacgtgcagagcaggcaggcagctccaaaccggcagccaaagcgccccagcaggggcgcgctcctcaggcccagtcagctccaggacctgcaggggcgaagactggagccaggcctggggggaccccaggggctcctgctggtcagccagcggcagaaggagagagtgtattttctaagatcctccctggtggggcagcagagcaagccggaaagctgacagaagctgtctctgcttttggcaaaaaattttcctcattctggtgattgtgtccagaagggctcctgaagacctgaagaaagacaatctcattgctgtggaaaaatctctggagtcagaggcctgggtgcagctctggactctgcgtataacgtttgcacgaataccaactcctctgtgccttgatggaatggaatcctctgggtgaagcagaaccaagccattgcacatggcaatgcccaggagcaatcatccacaacctggcaaacctttggcccaaagattcacaccatgtgggccccacccagcaggcaggcctcggccgagcatgagaatgcaatgttttctaacagcagcgacctaggtgaagcatntgcttgctggaccaatgggaccattggcttgggggaacctttcatgtctttcaagagaccctgccttactcaggccagccgtccttgggagagaggagccctcgccagaatgcggttgctgcagcctcctgtggcctgggcagccaggcttccaacgcgttatacacagagtttgggtgcacactaccctccctctaagacaccagaagttttttccacagccttggagaggggctttgactgagggctggagccctaggct

SEQ ID NO: 2448 - DNA, 5605 bp, Rattus norvegicus
gtttttttttttttttttcctcccctccctcccccgcgtttcatgcagctgatccgaaagggaataaaaggctgcgcataatcataatataaaagaaggggagcgcgagagaaggaaagaaagccgagaggtggaagaggggggagcgcctcaaagaagcgatcagaataataaaaggaggccgggctctttgccttctggaacgcgcggctcttgaaagggcttttgaaaagtagtgttgttttccagtcgtgcatgctccaatccacggagtatattagagccgggacgcggcsgtcgcgggggcagcgacgacggcagtcctcggagggagcaccagcgctagcagcggcggcggcgtccggagtgccccccgcgcggcagcgatgcggtccccacggacgcgcggccggccggggcgccccttgagccttctgctcgccctgctctgtgccctgcgagccaaggtgtgcggggcctcgggtcaatttgagctggagatcctgtccatgcagaacgtgaacggagagttacagaatgggaactgttgcggcggagcccggaaccctggcgaccgcaagtgcacccgcgacgagtgtgacacgtacttcaaagtgtgcctcaaggagtatcagtcccgcgtcacggccgggggaccctgcagcttcggctcagggtctacgcctgtcatcgggggcaataccttcaatctcaaggccagccgcggcaacgaccgtaatcgcatcgtactgcctttcagtttcgcctggccgaggtcctacactttgctggtggaggcatgggattccagtaatgacactattcaacctgatagcataattgaaaaggcttctcactcaggcatgataaaccccagccggcagtggcagacactgaaacagaacacagggattgcccactttgagtatcagatccgagtgacctgtgatgaccactactatggctttggctgcaacaagttctgtcggcccagagatgacttctttggacattatgcctgcgaccagaatggcaacaaaacctgcatggaaggctggatgggtcctgagtgtaacaaagcaatatgccgacagggctgcagtcccaagcatggctcctgcaaactcccaggtgactgcaggtgccagtatggttggcagggcctgtactgtgataagtgcatcccgcacccaggatgtgtccacggcacctgcaatgaaccctggcagtgcctctgtgaaaccaactggggtggacagctctgtgacaaagatctgaattactgtgggactcatcagccctgtctcaaccggggaacatgtagcaacactggccctgacaaataccagtgttcctgccccgagggctactcaggaccgaactgtgaaattgctgagcatgcctgcctctctgatccctgccacaacagaggcagctgcaaggagacctcctcgggctttgagtgtgagtgttctccaggctggactggacccacgtgttccacaaacatcgatgactgttctccaaataactgttcccatggaggcacctgccaggatctagtgaatggattcaagtgcgtgtgcccaccccagtggactggcaagacttgtcagttagatgcaaatgagtgcgaggccaagccttgtgtaaatgccagatcctgtaagaatctgattgccagctactactgtgattgtcttcctggctggatgggtcagaattgtgacataaatatcaatgactgccttggccagtgtcagaatgatgcctcctgtcgggatttggttaatggttatcgctgtatctgtccacctggctatgcgggcgatcactgtgaaagagacatcgatgaatgtgctagcaacccctgcttgaatgggggtcactgtcagaatgaaattaacagattccagtgtctgtgtcccactggtttctctggaaacctctgtcagctggacatcgattactgcgagcccaacccttgccagaatggcgcccaatgctacaatcgtgccagtgactatttctgcaagtgccctgaggactacgagggcaagaactgctcacacctgaaagaccactgccgcaccactccctgtgaagtgattgacagctgcaccgtggccatggcctccaacgatactcctgaaggggtgcggtatatctcttccaacgtctgtggtccccatgggaagtgcaagagcgagtcaggaggcaaattcacctgtgactgtaacaaaggcttcaccggcacctactgccatgaaaatatcaacgactgtgagggcaacccctgtacgaacggtggcacgtgcatcgacggcgttaactcctacaagtgtatctgtagtgacggctgggagggcgcgcactgtgagaacaacataaatgactgtagccagaacccttgccactatgggggtacatgtcgagacctggtcaatgacttttactgtgactgcaaaaatgggtggaaagggaaaacctgccactcgcgtgacagccagtgtgacgaagccacgtgtaataacggtggtacctgctatgatgaagtggatacgtttaagtgcatgtgtcctggtggctgggaaggaacaacctgtaatatagctagaaacagtagctgcctgccgaacccctgtcataatggaggcacctgcgtggtcaatggagactccttcacctgtgtctgcaaagaaggctgggaggggccgatttgtactcaaaataccaacgactgcagtcctcacccttgttacaacagcggaacctgtgtggatggagataactggtaccggtgcgaatgtgcccctggttttgctgggccagactgcaggataaacatcaatgagtgtcagtcttccccttgtgcctttggggccacctgtgtggatgagatcaatggctaccagtgtatctgccctccaggacatagtggtgccaagtgccatgaagtttcagggagatcttgcatcaccatggggagagtgatacttgatggggccaagtgggatgacgactgtaacacctgccagtgcctgaatggacgggtggcctgctccaaggtctggtgtggcccgagaccttgccggctccacaaagggcacggcgagtgtcccaatgggcagagctgcatcccagtcctggatgaccagtgtttcgtgcgcccctgcactggtgctggcgagtgtcggtcctccagcctccagccagtgaagaccaagtgtacatcggactcttattaccaggacaattgtgcgaacatcactttcacctttaacaaggagatgatgtctccaggtctcaccactgagcacatttgcagcgaattgaggaatctgaatattctgaagaatgtttctgctgagtattcaatctacatagcctgtgagccttccttatcagcaaacaatgaaatacacgtggccatttctgccgaagacatccgggatgatggaaaccctgtcaaggaaattactgataaaataatagatctcgttagtaaacgggatgggaacagctcacttatcgctgctgttgcagaagtcagagttcagaggcgccctctgaaaaacagaacagatttcctggttcctctgctgagctctgtcttaacagtggcttgggtctgttgcttggtgacagccttctactggtgtgtgcggaagcggcggcggaagcccagcagccacacccactctgcccctgaggacaacaccaccaacaatgtgcgcgaacagctgaaccaaatcaaaaaccccatcgagaaacacggagccaacacagtccccatcaaggattatgagaacaaaaactccaaaatgtcaaaaatcaggacacacaactcggaagtggaagaggatgatatggataagcaccagcagaaagtccggtttgccaaacagcccgtgtacacgctggtagacagagaggagaaggtcccccagcgcacgccgacaaaacacccgaactggacaaacaaacaggacaacagagacttggaaagtgcccagagcttgaaccggatggagtacatcgtatagcagacagtgcgtgccgccataggtagagtttgagggcaccccggggcttgtagtttctttaaactgttgtcgtatcccagtctgaggctgttgttgacttagagtcctgtgttaatttaagtttcgacaagctggcttccactggcactggtagtttctgtggttggctgggaaatcgagtgcagcgctcacagctatgcaaaaaccagtgaatgtgcccgggtgtacattcccctgcagccgactcgtcggctcccaggagctgcccaggcctaggcctcggagcttccacatctgccagcggtcctaatggtgatggcagccttaggatcatagttttatttatatttattgactcttgagttgtttttgtatattggttttatgatgacgtacaagtagttctgtatttgaaagtgcctttgcagctcagaaccacagcaactatcacaaatgactttattatttattttttttattgtatttttgttgttgggggaggggggatttgatgtcagcagttgctggtaaaatgaagaatttaaagaggaaaaatgtgtcaaagtagaatttttgtatagttatgtaaataattcttttttattaatcactctgtatatttgatttattaacttaataatcaagagccttaaaacatcattcctttttatttatatgtatgtgtttagaattgaaggtttttgatagtgttggaaacatatggctttttttttttttttttgtgaactttttctcattacgtgttgcctgtaagccaaaagtaaggtgtttggaaatagtttctcttggaaggatgggataggcttcttcccctgggaatactgatggattttttttttttttttttttttttgtacgacgtcaggtgttcaaacacttccttgatagcatcactttaagacacattctaaggactgactgaggcagattgagaattcgtctagaacaggtttttgtttttttctcttttctttttttattttttcctgctttagacttgaaaagagacaggcaggcgatctgtgacagagcagtttaagggaacaaactgagctatgtagtcagaatgtgactggttggatctcaytaaaagtatcagattgtgtgaagttggaagcttaccaatcttactttgtaaattctgakttcttttcaccattcgtatgtaatgctgaaccacttgtagatttgatttcattgttgttgtctactgcatttagggagtattctaataagctagatgaatacttgaaccataaaatgtccagttagagcactgtttagattggccatagagtacactgcctgccttaagtgaggacatgaaagtgctattaccaagttcaagatcaaaaaaggcttataaaacagtcatcctggctcmccacggagcccaggaagatactttgtattgtcctattagtgttatatgaacataaaatacatctttgatgtgttgttcctggcaataaattttgaaaagtgatatttattaaattttttgtatgaaaaaaaacctsgwraaaaaaaaaaaaaaa

SEQ ID NO: 2449 - DNA, 3635 bp, Rattus norvegicus
  misc_feature (450)..(450): n is a, c, g, or t
  misc_feature (3610)..(3610): n is a, c, g, or t
atctacttaagcttggttaacttggaattctaccagttgaagagtatttgaattccagaaagccaatagcatggagaagtcccaagataacatgtcttgggtaagggtaaggaaaccccgaacttcctcctccctctagggcaaaaccttgccgtaatgggccggcctgtgcgctctccgacgttgcccgggatgaagcaagcatcgcttgcggataaacaggcgacaggtccgaagaggactcccgagttcgggagtatctttccctcggggcagccacgattcctcaagccccagcggcacctctctattagcggctcctttgcctgcgtcgccgaccgctgtcccggcgggccaccagcaaccacccggccacgctgaggccgcagaccgcaagtgactcccggagcctgctgagtctgcagggtcaggtcctcgggccccattcgnacccggatgatgctacccggtcactcttactgaatctccctatatttgtctacctcccagagtctttctcctagcattcagccctgtgcaccgagatccactcatcctcaagattctctttagggagagaagccgcagacattcggggctcgctcaccgtgctgggcgcctaggcagagctacccacggggtttcgtgcggccgccatggacgagcaggcggggcccggcgtcttcttcagcaacaaccatccgggagctggcggtgctaaggggctcgggcctctggcggaggctgcagcggcgggagacggagcggctgcggcgggggcggcccgagctcagtacagcctcccggggatcttgcacttcctgcagcacgaatgggcccgcttcgaggtggagagagcccagtgggaggtggagcgggcggagttgcaggctcagattgctttccttcagggggagaggaaaggccaagaaaacttgaagaaagatcttgtgaggaggatcaaaatgttggaatatgctctgaagcaggaaagagccaaataccacaagttgaaatatgggacagaactgaatcagggagacatgaagcctccaagctatgattctgatgaaggcaatgaaacggaggtgcagccacagcagaacagccagttcatgtggaagcaaggccggcagctcctcagacagtatctccaggaggtcggctacacagatactattctagatgtgaagtccaagcgtgtgcgggcattgttgggcttttcaagtgatgtcactgacagggaggatgacaaaaaccaggactcggtgataaatggcacagaggctgaagttaaagagacagcaatgattggaaaatctgagttaacggattctgcctccgtgctggacaatttcaaattccttgaaaatgcagctgcagatttcagtgatgaagacgaggatgaggacattgatggaagagagaaaagtgtcattgatacttcaaccattgttaggaaaaaaccattacctgataccagtgaagatcgagacacaaaagaagctctgaaggagtttgacttccttgtcgcctcagaggaaggagacaacgagtccagaagtgcaggcgacggaacggactgggaaaaggaagatcagtgtctgacgccggagcgctggaatgtggaccagggagtgatcaccagactgaaggagcagtacaaaaaggagaggaaggggaagaaaggggtgaagaggcccaataggtcaaaactacaagatatgcttgctaatttgagagacgttgatgaacttccctccttgcagccatctgttggctccccttccagacccagcagctccaggcttcctgagcaggacatcagtagggcagatgaagtggaagcattgacgttcccgccttcttcagggaagtcatttatcatgggagcagatgaagcccttgaaagcgagctggggcttggagaattagcaggccttacagtggccaatgaagcagactcattagcttatgatatagcgaataacaaagacgccttgaggaagacgtggaaccctaagtttacattaaggagtcactttgatggcatccgagcccttgctttccaccccatcgagcctgtgttaataaccgcgtcagaggaccacwcgctgaaaatgtggaatctgcagaaaacagccccagctaaaaagagtacttctttagatgtggagcctatytacaccttcagggctcacaaaggtccggtgctgtgtgtggtcatgagtagcaatggtgagcagtgstacagcggcggcactgatggcctcatccagagctggagcaccaccaatcccaacgtcgacccctacratksttwyrakccttcrkwwcyawkarkcyytctrwtrrrmmamamrrawrcggtgtgggggctggcctacagcgcggcccaccagcgcttgttgtcctgttcagcagacggcactcttcgtctatggaccaccactgaggttgctccagcgctgactgtatttaatgataaccaagaactgggaatccctgcttctgtggatctggtgagcagtgacccgagccatatggtagcatcgttcagcaagggatatacaagcatcttcaacatggaaacacagcagcgaattctcacgttagaatccaatgtcgattcaacggccagttcttcctgccaaataaacagagtcatcagtcaccccaccctcccgatcagcatcactgctcacgaggacaggcacatcaagttctacgataacaacacaggcaaactgatccactcgatggtggcccacctggaagccgttacaagtttggcggttgatcccaacggcctgtacctgatgtctggcagtcatgactgttcaatacgcttgtggaatttagaaagtaagacgtgtatccaggagttcacagctcatcggaaaaagtttgaagagtcgatccatgatgtagcattccacccttctaaatgctatatagccagcgctggagccgacgccctggctaaggtctttgtatgatggggtacttcagcttcaccctgcagctcttacaagtcaaccgcacacaggaaacggaagaccagggcgggagccagctcgccctgcccttttgtttggctgagggagcacagagacctctgttaaagtacagttttgcagttcctatacagttttctaaaattaaggtttgttcaggttgctgcaagctcagctgaacctgtgagcccgaaactttcagatccccccaaagaggcacttttatttctgaggttgttctcactcgctaggcgggcccgagcgttcgttctcccttttgagtaagcagggcatgctgtaatggataattagaggtgaatgccgggaatgagtagaatggaaatttaactatccttccaccccgagacatctgctaccacactaggtagtcagctctgcggctgtgtgtgctctactaaccccactgtgtagaaggagacagtgtgtgtcagtgttcacatgaggtcctcccgctgctgtcctctcagaccgttctcatgaagcacagggaagagtgttccttccacctgtaggaggaagagatgcaataatatgattaattatatgatattcagaatgctaacaatacttantgcagcaattctatatgtatacatt

SEQ ID NO: 2450 - DNA, 1131 bp, Rattus norvegicus
atgattcaaaaaccgcaaatgtatgtttatatttacctgtttgtgctgattgctgctggcccagtggatctaaatgaggacagtgagagagaggcgaatgtggaaaaagaggggctgtgtaatgcgtgtgcgtggagacaaaacacaaggtactccagaatagaagccataaaaattcaaatcctcagtaaactccgcctggaaacagcgcctaacatcagcaaagatgctataagacaacttctgcccagagcgcctccactccgggaactgatcgatcagtacgacgtccagagggatgacagcagtgacggctctttggaagatgacgattatcacgctaccacggaaacaatcattaccatgcctaccgagtctgactttctaatgcaagcggatggaaagcccaaatgttgcttttttaaatttagctctaaaatacagtacaacaaagtggtaaaggcccagctgtggatatatctgagagccgtcaagactcctacaacagtgtttgtgcaaatcctgagactcatcaaacccatgaaagacggtacaaggtataccggaatccgatctctgaaacttgacatgagcccaggcactggtatttggcagagtattgatgtgaagacagtgttgcaaaattggctcaaacagcctgaatccaacttaggcattgaaatcaaagctttggatgagaatgggcatgatcttgctgtaaccttcccaggaccaggagaagatgggctgaatccctttttagaagtcaaagtaacagacacacccaagaggtcccggagagactttgggcttgactgtgatgaacactccacggaatcgcggtgctgtcgctaccccctcacggtcgatttcgaagcctttggatgggactggattattgcacccaaaagatataaggctaattactgctctggagagtgtgaatttgtgttcttacaaaaatatccgcatactcatcttgtgcaccaagcaaaccccagaggctcggcaggcccttgctgcacgccaacaaaaatgtctcccattaatatgctatattttaatggcaaagaacaaataatatatgggaaaattccagccatggtagtagaccggtgtgggtgctcgtga

SEQ ID NO: 2451 - DNA, 2526 bp, Rattus norvegicus
gattccatcctaatacgactcactatagggctcgagcggccgcccgggcaggtgcgctgtaatctgaaccagctgtgtccagaccgaggccccatttgcattgtttaacatacttagaaaatgaagtgttcacttttaacattcctcctccaattggcttaatgctgaattactgaagggggttaagcgaaaccaggkgcmsgmggcgagggctctgcagtggctcccagcacccggcactgtccccggccctccgcgcagccccgttcggcccctcggaaaccaagctgcccggtcccgcgcagagcctgccttcctcaaatcacctctcctcccgcgcatcttggatatgccaggattaaaaaggatactcactgtcaccatcctggcactgtggcttccacatcctgggaatgcacagcaacagtgcaccaacggctttgacctggaccgccagacaggacagtgtttagatattgatgaatgtcggaccatccctgaggcttgccgtggggacatgatgtgtgtcaaccagaatggcgggtatctgtgcatccctcgaaccaacccagtgtatcgagggccctactccaatccctactctacatcctactcaggcccatacccagcagccgcaccaccagtgccagcttccaactaccccacgatttccaggcctcttgtctgtcgctttgggtatcagatggatgaaggcaaccagtgtgtggatgtggacgagtgtgcgacagattcacaccagtgcaaccctacccagatctgtatcaacacggaaggagggtacacctgctcctgcactgatgggtactggcttctggaagggcagtgcctagatattgatgaatgtcgctatggttactgccagcagctctgtgcgaatgttcctggatcctattcctgtacgtgtaaccctggcttcaccctcaacgatgatggaaggtcttgccaagatgtgaacgagtgtgaaactgagaacccctgtgttcagacctgcgtcaacacctatggttctttcatctgccgctgtgacccaggatatgaacyggaggaagatggcattcactgcagtgatatggatgagtgcagcttctccgagttcctctgtcaacatgagtgtgtgaaccagccgggctcatacttctgctcatgccctccaggctacgtcttgttggaagataaccgaagctgccaggatatcaatgaatgtgagcaccggaaccacacatgcactcccctgcagacttgctacaatctgcaagggggcttcaaatgtatcgaccccatcgtctgcgaggagccttatctgctgattggggataaccgctgtatgtgccctgctgagaatactggctgcagggaccagccattcaccatcttgtttcgggacatggatgtggtatcaggacgctctgttcctgctgacatcttccagatgcaagcaacgacccgataccctggcgcctattacattttccagatcaaatctgggaacgagggtcgagagttctacatgcggcaaacagggcctatcagtgccaccctggtgatgacacgccccatcaaakggcctcgggacatccagctggacttggagatgatyascgtcaacactgtcatcaacttcagaggcagctccgtgatccgactgcggatatacgtgtcccagtatccgttctgagcctcgggttaaggcctctgacactgccttttaccagcgccgagggacaggaggagagaagaaaccagcaagaatgagagcgagacagacattgcacctttcctgctgaacatctccctggggcatcagcctagcatcctgacccctacctgtactatcgcagactgtcactctgaaggacaccatgcccccagttcctatgatgyagttatccaaaagtattctccttgacccctgatgtgaggttgcaagtgactctccaaggccttccatttatttctattttttttttttaaaaaggaaaatagattaggywwgmtksggyargagkctgtgttcaaagactgagcagcttkttywtgcctytgcccytccttcctmtatmtcttgvtgcawtgstgctytgcaaaagtcmtcatgagctcayggsamrwgbksvgyawagstwttttkyttyttgcatgtgmtgagaaggytwtgrgaacacgtcacagcaggatcaaagrtttktaaagrrtytattktaaaatcacgthtgrtaktttcagcataagagaagytttasttgttbttacaatktstatgrgtgtttaacctttthtcgttcattytgagttytkaaagtgatagaattccttccagaaggcctcagatacatgttatgttcagtcttthtaacctcarccttccctgbgtbttagcccagttyttwtgaagaccccwttaatcatgmtttyktaagagtttttacccaamtggrttggaagamakaggtatccggaytgrttaaatwtttgrrgraaaaaaawaaaaaaaaacctttgcgtccg

SEQ ID NO: 2452 - DNA, 1601 bp, Rattus norvegicus
ccaggcaagacagtgagactccagaagctccgagcccagtttgccaaggccctctgctagaggcctgccatggcatctctgaggccctttttcatactagccctgctggcattggtttctctggctgaccaagagtcatgcaagggccgctgcactcagggtttcatggccagcaagaagtgtcaatgtgatgagctttgcacctactatcagagctgctgtgttgactacatggagcagtgcaagccccaagtgacccggggggatgtgtttaccatgccagaagatgagtattggagctatgactacccggaggaaaccaagaacagtaccaatgctggcgtgcaatccgagaacacctctctacactttaacctaaagcctcgagccgaagagactataaagccaacaactcctgatcctcaggaacagtcaaacacccaagaacctgaagtggggcaacagggagtggccccaaggcctgacaccactgatgaaggaacctctgagtttccagaagaagagctgtgtagtggaaagccctttgatgccttcacagacctcaagaatggttccctttttgccttccgaggtgagtattgctatgagctagatgaaacagcagtgaggcctgggtaccccaaactcatccaagatgtctggggcatcgagggccccatcgacgctgccttcactcgcatcaactgtcagggaaagacctacttgttcaagggtagtcagtactggcgctttgaggatggtgtcctggaccctgattatccccgaaacatctctgaaggcttcagtggcataccagacaacgttgacgcagccttagcccttcctgcccacagttacagtggccgggaaagggtctacttcttcaagggaaaacagtactgggagtatgaatttcagcagcagcccagccaggaggaatgtgaaggaagctctctgtcagccgtgtttgagcactttgccttgcttcagcgggacagctgggagaacatttttgaactcctcttctggggcagatcctctgatggcgccaaaggaccccaattcatcagcagggattggcatggtgtaccagggaaagtggacgctgctatggccggccgcatctacatcactggctccacattccgctctgtccaggccaaaaaacagaagtctgggcgtcgaagtcgaaaacgctaccgttcacsccgaggrcgtggccatagccgcagccgcagycgcagcatgagctytcgtcgcccatsgsgttcagtctggttctctwtgctctccagcgaagagagtgggctakgaacctacaattacgattatgatatgaactggcksatacctgccacctgcgagcccattcagagcgtctatttcttctctggagacaagtactaccgagttaaccttagaacacggcgagtggactctgtgaatcctccctacccacgctccattgctcagtattggmtgggctgcccaacctctgagaagtaggaatcagcacccacacagctgagcttcagaaacctcgtcctccagctttttctcccagcccaataaagtgttggccccaaaaaaaaaaaaaaaaa

SEQ ID NO: 2453 - DNA, 1754 bp, Rattus norvegicus
gctggggagacccagagcgccgcgctgtctgctgggctcacggagacgcggaccacctttggtcgccccgcgccgtcctctccgcgccgcctggcccgccgcctcgagcgccctcagtccctcaagccagatgatgaacttcctgaggcgccggctgtcggacagcagcttcattgccaacctgcccaatggctacatgactgaccttcagcgcccggagccgcagcagcccccacccgcccctggccccggtaccgctaccgcgtcggcggccacctcagctgcctcgcctggccccgagcgcaggccgccacccgcccaggcacccgcgccgcagccggcgccgcagcccgcgccgacgccgtcggtgggcagcagcttcttcagctcgctgtcgcaagccgtgaagcagacggccgcctccgccggcctggtggacgcgcccgcgccttcggccgcttccaggaaggccaaggtgctgctggtggtcgacgagccgcacaccgactgggccaagtgctttcggggcaaaaaaatccttggagattatgacatcaaagtagaacaggcagaattttcagagcttaacctggtggcccatgcggatggaacctacgccgtggacatgcaggtactccggaatggcacaaaggttgtcaggtccttcaggccagacttcgtgctcatccgacagcatgcatttggcatggcggagaatgaagacttccgccacctggtcattggcatgcagtatgcaggcctccccagcatcaactcactggagtccatttacaacttctgtgacaagccatgggtgtttgctcagatggtggccatcttcaagacactgggaggggagaaatywcsaskcattgagcagacctactaccccaatcaccgagagatgcttacacttcctacgtttcctgtcgtggtgaagattggccatgctcactcgggcatgggcaaggtcaaagtggaaaatcactacgacttccaggacattgccagtgtggtggccctcacccaaacctatgccacagcagaacccttcattgacgccaagtatgacatccgggttcagaagattggcaacaactacaaggcttacatgaggacatccatctcagggaactggaagacaaacaytggctccgcgatgctggagcagatcgccatgtcagaccggtacaagctctgggtcgacgcytgctctgagatgtttgggggcttggrcatctgtgcagtcaaagctgtgcatggcaaagatggcaaagactacatttttgaggtcatggactgtagcatsccactgattggggaacaccaagtggaggacagacaactcatcactgatctagtcatcagcaagatgaaccagctattstscaggactcctgccctgtstccacagagacctttaaccacccaacagccacagagtggaacacttaaggaacsggactccagcaagacccctcctcwgcggccagccccccaaggktgtttacagtatattctsractgtaatggcawtgcagtaggtccaaaacaagtccaagcttcttaaagcgatcagtagttaacttttcaaaacagaaaacttaagccaaaammaaaaaraararaaaaraaaggaaggaggggaggggagcagcagatgctctgcagttcactgctgtgtcctctcagtgctgacggcatgtttctcctatcgagtgtcagccccctggtctcggttgtttacccctccc

SEQ ID NO: 2454 - DNA, 1407 bp, Rattus norvegicus
atgacagagatacctgcacctttgtcctacttccagaatgcacagatgtctgaggacagccactccagcagcgtccgtagccagaatgacaatcaagaacggcagcagcatcatgacagacagagacttgacaaccctgagtcgatatctaatggccgaccccagagtaactttaccaggcaggtgatagagcaagatgaggaggaagacgaagagctgacattgaaatatggagccaagcacgtcatcatgctctttgttcctgtgaccctctgcatggtcgttgtggtggccacyatcaagtcagtcagcttctacacccggaaggatgggcagctaatctataccccattcacagaagacaccgagactgtaggccagagagccctgcactcgatcttgaatgccgccatcatgatcagtgtcatcgtcgttatgaccatcctcctggtggtcctgtataagtacaggtgctacaaggtcatccatgcctggcttattgtttcatctctgttgttgctgttctttttttcattcatttacttaggggaagtattcaagacctacaatgtcgccgtggactatattacggttgcactcctgatctggaattttggtgtggtcgggatgattgccattcactggaaaggcccactccgactgcagcaggcgtatctcattatgatcagtgccctcatgkccctggtatttatcaagtacctccctgaatggaccgcatggctcatcttggctgtgatttcagtatatgatttggtggctgttctgtgccccaaaggtccacttcgtatgctggtcgaaacagctcaggaaagaaatgagactctctttccagctcttatctattcctcaaccatggtgtggttggtgaatatggctgaaggagacccagaagcccaaaggagggtacccaaaaaccccaagtatagcacacaaggaacagagagggaagagacacaggacactggcactgggagcgatgatggtggcttcagtgaggagtgggaggcccaaagagacagtcacctggggcctcatcgctccactcctgagtcaagagctgctgtccaggaactttctgggagcatcctcactagtgaagacccggaggaaagaggagtaargcttgggctgggagatttcattttctacagtgttctggttggtaaggcctcagcgaccgccagtggggactggaacacaaccatagcctgctttgtagccatattgatcggcctgtgccttacgttactcctgctcgccattttcaagaaagcgttgccggcccttcccatctccatcaccttcgggctcattttctactttgccacggattatctcgtgcagcccttcatggaccaacttgcattccatcaattttatatctag

SEQ ID NO: 2455 - DNA, 728 bp, Rattus norvegicus
atggctgcmatrycagaagaaggctcttgtgtcaacttcaaagaaatgatgtttattgacaacacactttaccttatacctgaagataatggagacttggaatsagacmacttyggymgacttcactgtacaaccgcagtaatrcggagcataaatgaccaagttctcttcgttgacaaaagaaacccgcctgtgttcgaggayatgcctgatatcgaccgaacagccaacgaatcccagaccagactgataatatatatgtacaaagatagtgaagtaagaggactggctgtgaccctaksyrygarggatggaaggatgtctaccctctcctgtaaaaacaaaatcatttcctttgaggaaatgaatccmcctgaaaatattgatgatataaaaagtgatytcawattctttcaraaacgtgtgccaggacmcaacaaaatggaatttgaatcttccctgtatgaaggacmctttytagcttgccaaaaggaaratgatgctttcaaactcgttttkaaraggaaggatgaaaatggggataaatctgtaatgttcactctkactaacttacatmrawsttaggtattaaggtttctgtattccagaaagaygattagyayacaygagccttatgataacctactctgtatttytatgacaaaawacctgaggccgcatgatttatagagtaaacaagyttrattgycmaaaaaaaaaaaaaaaaa

SEQ ID NO: 2456 - DNA, 1079 bp, Rattus norvegicus
  misc_feature (1062)..(1062): n is a, c, g, or t
cggcgcgcggtgcagccacgatggaagggggtgcgtacggagcgggcaaagccgggggcgccttcgacccctacaccctggtgcgacagccacataccatcctgcgcgtcgtgtcttgggtcttctccattgtggtcttcggctccattgtgaatgagggctacctgaacaacccggaggaggaggaggagttctgcatctacaaccgcaaccccaatgcctgcagctacggcgtgaccgtgggcgtgttggccttcctcacctgcctggtctacctggcgcttgatgtgtacttcccgcagatcagcagtgtcaaggaccgcaagaaagccgtgctgtctgacatcggtgtctcggccttctgggccttcttctggttcgtgggtttctgcttcctggccaaccagtggcaagtctccaagcccaaggacaaccctctgaacgaagggacagacgcagcccgggctgccatcgccttttcgttcttctccattttcacgtgggcgggtcaggccgtgctagccttccagcggtatcagattggcgccgactcggccctcttctcccaggactacatggatcccagccaggactccagcatgccttatgcayyckrcrygrrgcccagtgctgggtcggaccctactggcatgggtggcacctaccagcatccagccaacgccttcgatgytgagccccagggctaccagtcgcagggctactgagccccccctgatggtggtgacagtgaccgcctaccctgcccctgcccttacatcctagctcccctcccaagcaccctgctccctcccaggtgaccctgcctcgcacatgctcagcctccaagtgattccactgaggcccagtgcagctggggtggggaatgatggggtgtgtccacatatgtgtgcaagtgttgccctcccccacctggttaagcctctccagtggacccagtggccctgaggcatcctcctctatgacatccatccatctgttgtgaccaagtgaaggtggtgacttctggtgacatagtaataaagtgaagactcaactcccccnaaaaaaaaaaaaaaaaa

SEQ ID NO: 2457 - DNA, 1290 bp, Rattus norvegicus
cggcccgcagctgtccgggtcttggtgagcacgctgctccctcgctgcagcgccccagcgagactgccgagctccaggagccagggcaggggtgcgcgggggacgggaggaggagggagcggcgtccactttggtgataccatgaatggctccggcagccagggcgcggagaacacgagccaggaaggcggtagcggcggctggcagcctgaggcggtccttgtacccctatttttcgcgctcatcttcctcgtgggcaccgtgggcaacgcgctggtgctggcggtgctgctgcgcggcggccaggcggtcagcaccaccaacctgttcatcctcaacctgggcgtggccgacctgtgtttcatcctgtgctgcgtgcctttccaggccaccatctacaccctggacgactgggtgttcggctcgctgctctgcaaggctgttcatttcctcatctttctcactatgcacgccagcagcttcacgctggccgccgtctccctggacaggtatctggccatccgctacccgctgcactcccgagagttgcgcacacctcgaaacgcgctggccgccatcgggctcatctgggggctagcactgctcttctccgggccctacctgagctactaccgtcagtcgcagctggccaacctgacagtatgccacccagcatggagcgcacctcgacgtcgagccatggacctctgcaccttcgtctttagctacctgctgccagtgctagtcctcagtctgacctatgcgcgtaccctgcgctacctctggcgcacagtcgacccggtgactgcaggytcaggttcccagcgcgccaaacgcaaggtgacacggatgatcatcatcgtggcggtgcttttctgcctctgttggatgccccaccacgcgcttatcctctgcgtgtggtttggtcgcttcccgctcacgcgtgccacttacgcgttgcgcatcctttcacacctagtttcctatgccaactcctgtgtcaaccccatcgtttacgctctggtctccaagcatttccgtaaaggtttccgcaaaatctgcgcgggcctgctgcgccctgccccgaggcgagcttcgggccgagtgagcatcctggcgcctgggaaccatagtggcagcatgctggaacaggaatccacagacctgacacaggtgagcgaggcagccgggccccttgtcccaccacccgcacttcccaactgcacagcctcgagtagaaccctggatccggcttgttaaaggaccaaagggcatctaacagcttctaga

SEQ ID NO: 2458 - DNA, 1163 bp, Rattus norvegicus
ggcccagtacctaggactgaggaagatggctgacatccagaacatttcgctggacagcccagggagcgtaggggctgtggcagtgcctgtgatctttgccctcatcttcctgttgggcatggtgggcaatgggctggtgttggctgtgctactgcagcctggcccaagtgcctggcaggagccaagsagtaccacagatctcttcatcctcaacttggccgtggccgacctttgcttcatcctgtgctgcgtgcccttccaggcagccatctacacactggatgcctggctctttggggctttcgtgtgcaagacggtacatctgctcatctacctcaccatgtatgccagcagcttcaccctggcggccgtctccctggacaggtacctggctgtgcggcaccmactgcgctccagagccctgcgcaccccgcgcaacgcgcgcgccgccgtggggctcgtgtggctgctggcggctctcttttccgcgccctacctaagctaytacggcacggtgcgctacggcgcgctcgagctctgcgtgcccgcttgggaggacgcgcggcggcgcgcgctggacgtggccaccttcgccgcgggctacctgctgccggtggccgtggtgagcctggcctacggacgcacgctatgtttcctatgggccgccgtgggtcccgcgggcgcggcggcagcagaggcgcgcagacgggcgaccggccgggcgggacgsgccatgctggcagtggccgcgctctacgcgctttgctggggcccgcaccacgcgctcatcctctgcttctggtacggycgcttcgccttcagcccggccacctacgcctgtcgcctggcctcgcactgcctcgcctacgccaactcctgccttaacccgctcgtctactcgctcgcctcgcgccacttccgcgcgcgcttccgccgcctgtggccctgcggccgtygccgccaccgccaccaccaccgcgctcatcgagccctccgtcgtgtccagccggcgtcttcgggccccgccggttatcccggcgacgccaggcctcgtggttggagtatggagcccagaggggatgctctgcgtggtggtggagagactagactaaccctgtcccccaggggacctcaataaccctgcccgcttggactctgacgtc

SEQ ID NO: 2459 - DNA, 1266 bp, Rattus norvegicus
cacgaggaaagcctcaaccggcatgatcccgaagcctcgggtggcttcgttggtgctggaccccaggctgggcagcgtctatgccctcaagcaccatgcagctccttcttgctctactggcgctggcttacgtggccccctctactgaagattcacactggtgctatgagattcaagccaaggagcccaacagccattgctcagggcctgaacaatggactggagactgtaagaagaaccagcagtctcctatcaatattgtcactagtaagacaaagttgaaccccagtctgacacccttcactttcgttggctatgaccaaaagaagaagtgggaagttaagaacaaccaacactcagtggaaatgtcgctgggggaggacatctatatttttggaggagatctgcccacccagtacaaggccatacagttacacctgcactggtcagaggagtcgaacaagggttcagagcacagtattgatgggaaacattttgccatggagatgcatgtcgtgcataagaagatgacaacaggcgataaggtgcaggactcggactccaaggacaagattgcggtgctggcattcatggttgaggtgggaaacgaggtaaacgagggcttccagcccctggtggaggcactgtccaggctctccaaaccctttacaaactccacagtgagtgagagctgcctgcaggatatgcttcctgaaaagaagaaactgtctgcctacttccgttaccagggctcactgactacaccaggctgtgatgagactgtcatctggactgtgttcgaggaaccyaykargatccataaagaccagttcctggaattctcaaaaaagctctactatgaccaagaacagargttgaacatgaaggacaatgtgaggcycctgcagccactgggaaaccgccaggtgttcaggtctcatgcctcasgacgactgctgtctttgcccctgcccactstawtggtccccacactcacctgcctggtggycagcttcytccamtgatggtcaaattctggatatctggcctctgacctcaacctttagaggatatggcttctctttctcaatctttccaggttgaactttggggactattaaggtgtgctgtggtggtgcacacctttaatcccagccctggatggagagagcagagacctatggatctctgaccttcccctaacccctgattaaattaaataaaatatggatatgtttttamwmwwwrmaaaaaaaaaaaaaaaaa

SEQ ID NO: 2460 - DNA, 1214 bp, Rattus norvegicus
cacgagggggagactctgaggacagagcccgcttctatctgggaggctacagagccaggcgggtttctggagacagtctgctacttgggacccagacacsgaggtcytcagcacccacwgakkkacwtrcaggtcggatcataaggcaaccttctgtcagtctgctctgccccttctcttgtggagcaccctgccttgctgactttctctgcctgtgataggtggtgtcgtttcccccccacctaagttctggcaggtacactgctggccagcagcagatgcccacgaagatgctgacagtgaagacgctggccctgtgcttgattcttgctaagtcagcctggtcggaagatcaggataaggtggtacatggaggcccctgtttgaagaactctcaccctttccaagctgccctctacacctcgggtcacttgctgtgtggtggggtcctcgtcggcccacagtgggtgctgacagctgcccactgcaaaaaaccgaatctggaggtgtacttggggaaacacaatctacggcaaactgagactttccaaaggcaaatctctgtggacaggactattgtccatccccgttacaatccccaaacccatgacaatgatatcatgatggtgcatctgaaacgtccagtcaaattctctcaaaggatccagcccctgcctttgaagaaagactgctctgagaagaatcccgactgtcagatcctcggctggggcaagatggaaaacggtgaattcccagataccatccagtgtgctgatgtccagctggtgtcccgggaagagtgtgagcgcgcctaccctggcaagatcacccgaagcatggtgtgcgcaggcgacaagagagaagggaacgattcctgccagggtgattctggaggtcccctggtatgcggtggtcacctccgagggattgtgtcatggggtgacatgccctgtggatcaaaggaaaagccgggagtttacacagatgtctgcactcatatcagatggatccaaaacatcatcagaaacaagtgactctggcatgagacatgcagttcttgacctgtctctcccctgaccctagctggmwacatattytctytccctgaaaccctgccccactytcagagccttcagatgtccagctctgccccctcatgcttaataaatgcagtgamamaraamamaraamamwrmmamaaaaaaaaaaaaaaa

SEQ ID NO: 2461 - DNA, 1580 bp, Rattus norvegicus
acattcttcctgagtgcagcacaccctccttgtgcaagagcacagcgccccaggtgcagaagactgaggcccgcagaaggacttacagaagagacccagcaagccatggtgtttccatggagatgtcagagtgctcagcggggctcctggagcttcctgaagctgtggatcwggacactgctgtgttgtgatctcctgccacaccatggaactcactgttggacttaccattattctgaaagatccatgaactgggaaaatgctagaaagttctgcaagcacaattacacagatttagttgctatacaaaataagagagaaattgagtatttggaaaagacattacccaaaaaccctacctactactggataggaatcaggaaaatcgggaaaacgtggacatgggtgggaaccaacaaaaccctcaccaaagaagcagagaactggggtactggggagcccaacaacaagaagtctaaggaagactgcgtggagatctatatcaagagggaacgagactctgggaagtggaatgacgatgcctgycacaaacgaaaggcagctctctgctacacagcctcctgccaaccagaatcttgcaaccgccatggagaatgtgtggaaactatcaacaataacacctgcatctgtgacccagggtattatgggccccagtgtcagtatgtgatccaatgtgagcctttgaaggcccctgagctgggtaccatgaactgtattcaccccttgggagacttcagcttccagtcacagtgtgctttcaactgttctgagggaagcgagctacttgggaatgcaaaaacagagtgtggagcatctggaaactggacatatctagagccaatctgtcaagtgattcagtgcatgcctctagcagcaccggatctgggcactatggaatgcagtcaccccctcgccaacttcagttttacttctgcttgtaccttcacctgctcagaagaaactgacttaattggggagagaaaaactgtctgcagatcatctggctcctggtctagtcctagtccaatatgtcaaaagacaaagagaagtttctcaaagatcaaggaaggcgactataaccccctcttcattccagtagctgtcatggtcactgcattctcagggctggcatttatcatttggctggcaaggcggctaaaaaaaggcaagaaatcgcaggaaaggatggatgatccttactgattgatcctttgtgagaggaaagtcataaggtactaacaaccgccaccaaaaaccattggaagacaacttcaacacctcctgttaagattttgcacacgggcatctcccacgttagagatgcagtgtttgctcagtgtaactgagtacggatttcaacacgaccaacagctcctcctaatttcctctcactcactcatcctataaatctattccataacttgtgcttatacagatcggtattttatcatcttttctgtgaaagaacaaataagacaattgagcaaaagagttactgtaggatataaagatacctgcttttactcttccccaactctcgtttcctctttcagtgccaa

SEQ ID NO: 2462 - DNA, 1113 bp, Rattus norvegicus
ggagagaggwgccgagacagccaagatgctgaagctgctgctgctgctggcactgtcccccctggctagtctggtgcacgcggccccttgcccagtcaagcagcgagtgggcattgtgggaggacgagaggcttctgaaagtaagtggccctggcaggtgagcctgagatttaaattcagcttctggatgcatttctgtggcggctccctcattcacccacagtgggtgctcactgcggcacactgtgtgggactgcacatcaaaagcccagagctcttccgtgtacagcttcgtgagcagtatctatactatgcggaccagctactgactgtgaaccggaccgttgtgcacccccactactacacagtcgaggatggggcagacattgccctgctggagcttgagawccctgtgaatgtctccacccatatccaccccayatccctgccccctgcctcggagaccttcccctcggggacttcttgctgggtaacaggctggggcgacattgatagtgacgagcctctcctgccaccttatcctctgaagcaagtgaaggtccccattgtggaaaacagcctgtgtgatcggaagtaccacactggcctctacacaggagatgatgttcccattgtccaggatggcatgctgtgtgctggaaataccaggagcgactcctgccagggagactcagggggcccactggtctgcaaagtgaagggtacctggctgcaagcaggagtggtcagctggggygagggctgcgcagaggccaatcgtcctggcatttacacccgggtgacgtactacctggactggattcaccgctatgtccctcagcgttcctgagacccatccagggtcagggaagaaccaggcacctgctgtctttaactcactgcttcctggccagatggaaccctggccttctttgtactctgtctcccctgtctwccgggtgtccctctgagcccccactttgttccaccttgagtccctcgccactcctgtcccctctgcctcccaccacaacacagctgcactgtgcggctccctcttttctgtggctcattaaagtatgtgaaaattttgctccaaaaaaaaaaaaaaaa

SEQ ID NO: 2463 - DNA, 2303 bp, Rattus norvegicus
cacgagggtggttgtgaggcggtctgtgtttaaggtgtaccgttggcctggacgtggttggacgtgaggttttgccgagtgggtttccagcactgtttcctaggaaccaaaagtcaggttggagcagcgccggacagtggatggccttgactgacggcggctggtgcctgccgaagcgtttcggggctgttgctgcggacgccggcgactctgggccctttccagcgcgggagccctcctcgccgctctcccccatctcgtcctcttcctcctcctgctcccgggktgggratcgtggtccctgcggcsccagmaactgcaggacgccgcagctcgacactgaggcgktggcgrgacctccgggccgctcgctcttgctcagcccmtacacttcccatcccttcgccgctgctcacggagccgcggcgcccggggtcgctggccccgggagcgccctgtcgacttgggaggacctgttgctsttcactgacctcgatcaggccgcgaccgccagcaagctgmtgtggtccagccggggcgccaagstgagtcccttcgcggccgagcagccggaggaaatgtaccagacgctcgccgctstgtccagccaggggcccgccgcttacgacggcgckcccggcggcttcgtacactccgcagctgcggcggccgcggcggccgcggcasccakctctccggtctacgtgcccaccacacgcgtgggctccatgctgcccggcctgccttacctgcagggggcgggcagcgggcccakcartcackcgggckgckcgggcgcccacccgggctggyyccakgcctccgccgrcagccccccgtatggcgggggtgktgcadcgkgcggmkgykcrgyyggayccggwggygcgggatyakycacakcccacgcctctgcacgcttcccctactcgcccakcccgcccatggscawcggsgccgcgcgggaccccgggggctacgtggctgcgggcggcgcgggcgcgggtagcgtgagtggcggtggcggcagcctggcggscatgggtggscgggagcaccagtacagctcgctgtccgcagccaggccgctgaacgggacgtaccaccaccaccatcatcaccacccgacctactcgccctacatgggcgctcctctgactcccgcctggccagcgggacccttcgaaacgccggtgctccacagtttacagagccgcgcgggagctccactcccggtgccacgaggccccagcgcagacctgttggaggacctgtcggagagccgcgagtgcgtgaactgtggctccatccagacgccactgtggagacgagatggcaccggtcattacctgtgcaacgcatgcggtctctacagtaagatgaacggcctcagcaggcccctcatcaagccacagaagcgcgtgccttcatcacgacggcttggactgtcctgtgccaactgtcacaccacaaccactaccttatggcgtagaaacgctgagggtgagcccgtgtgcaatgcttgcgggctttatatgaaactccatggggtgcctcgaccacttgctatgaaaaaagaaggaattcaaaccaggaaacgaaaacctaaaaatataaataagtcgaaagcttgctccggtaacagctctgttcctatgactccaacttcctcctcctctaattcagatgactgcaccaaaaatacttctcctcccacacagtcgactgcctcaggggtgggtgcatcagtgatgtctgcagtgggagaaagtgccaaccctgagaacagtgacctcaagtattcaggtcaagatggcctctacataggtgtcagtttgtcctcccctgccgaagttacatcctcggtgcgacaggattcttggtgtgctctggccctggcctgagctggtgctgccaagggctctgaaggcctcataccacttgtgtctgattttgtccagcagtccagatggcggcaaaaaatgcagacataacattccttcgatgcgtgatttctgtgcctttgttttgaaagagatatatttcccaagaagcttattgaagtaagaagagatgggtctttgtaggaaggggcagcacagtgggcgtgtggcctattcctgtcagcctgggtctgcttccagccagcttgcctctggctctgctccacaccagtgggagaaactgtgacaatgactggggccttgtctgctaaggaagattgagagattaaaaaaaaaatagtttgtgtattgctccaaatcatgtgcttcttgtgatcaaccttggttatcccagaattc

SEQ ID NO: 2464 - DNA, 1258 bp, Rattus norvegicus
gacaagcagagaggagtctgagctacaaggatgagaagtctacttttcctggtgctgatttcagtctgtcgggctgaccacctttcagacagctacactccggatcaagacagagttattcaymtyswrgctgaaaatggcccccgtctacttgtggaagcagaacaagccaaggtcttctcgcacagaggtggcaacgtgacactgccatgtaaattttatcgagaccctacagcatttggctcgggaatccacaaaatccgcattaagtggaccaagctaacttcagattacctcagggaagtggatgtcttcgtttccatgggctatcacaagaaaacctacggaggttatcaaggccgagtgtttctgaagggaggcagtgataatgacgcctccctgatcatcacagatctcaccctggaggattatggaagatataagtgtgaggtgattgaaggactagaagatgatactgctgtggkggcattagagtkammaggtrtggtrttcccttactttccacgattgggacgctacaatcttaactttcacgaggctcgccaggcttgtctggaccaggatgctgtgattgcttccttcgaccagctgtacgatgcctggcggggcgggctggattggtgcaatgctggctggctcagtgacggatctgtgcagtacccaatcaccaaaccacgtgagccctgcgggggccaaaacaccgtgcctggagtcaggaactacgggttctgggacaaggataagagcagatatgatgttttctgtttcacatccaacttcamwggmmgattttactacctgatccaccccaccaagcttacctacgacgaagcagtgcaagcttgtctcaatgatggtgctcagattgcgaaagtgggtcagatatttgctgcctggaagcttctgggctatgaccgctgcgatgccggatggctggcggatggcagtgtccgctaccctatttctcggccaagacggcgctgtagtccgacagaggctgcagtgcgctttgtgggtttcccagataaaaagcataagctgtacggggtctattgcttccgagcatacaactgagtgtgccctggagtcagttctcgagatacgtgaaagttttgttcgtttgttttttgtttttaatatgaactcatgcaagtmcsaawwctgtgataaccctttttcacttactgtaaagagtcgttttcataaaggccaattcattcaaaaaaaaaaaaaaaaa

SEQ ID NO: 2465 - DNA, 2752 bp, Rattus norvegicus
tcgcgggcgccaatcagcgggcggcagggtgccagcccggggctgcgccggcgaatcggcggggcccgcggctcggggagggmrgcgsggmkmccgtcggmrgmggwaggarsarmwssyyckssbssmrgctcggacgsgcygrgacsagscgcysgrtgcagggtagatttaccaggctgtttctgagtgtggattgttacccttggtaagaaaatgtcgtccatcttgccattcactccgccagtggtgaagagacttctgggatggaaaaaatcagccggygggtctggaggagcaggtggtggagaacagaatggacaggaagaaaagtggtgtgaaaaagcagygaaaagtctggygaaaaagctaaagaaaacaggacgattagatgagcttgagaaagccatcaccactcagaattgcaatactaagtgtgtcaccataccaagcacttgctctgaaatttggggactgagtacagcawatacggtagatcagtgggacacaacargcctktacagcttctctgaacaaaccargtctcttgatggtcgtcttcaggtgtctcatcggaaagggctgccacatgttatatattgccggctgtggcgctggccagaccttcacagccatcatgagctcaaggcgatcgagaactgcgaatacgctttcagtctgaaaaaagatgaagtgtgtgtgaacccttaccactaccagagggtggagacaccagtcttgcctccagtcttggtgcctcggcacacagagattctaacagaactgccgcctctggatgactatacccactccattccagaaaacacaaatttcccagcaggaattgagccacagagtaattacatcccagaaacaccaccacctggatatatcagtgaagatggagaaactagtgaccaacagttgaaccaaagtatggacacaggctctccggctgaactgtctcctaccactctctcccctgtcaatcacagcttggatttgcagccagttacttattcagaacctgcattttggtgttcaatcgcatattatgaactaaaccagagggttggagagaccttccatgcgtcacagccctcactcactgtagacggctttacagatccatcgaactcggagaggttctgcttaggtttgctctccaacgttaacagaaacgctactgtagaaatgaccagaaggcatataggaaggggagtgcgcttgtattacataggtggggaagtgtttgccgagtgcctaagtgatagtgcgatctttgtgcagagccccaactgtaaccagagatacggctggcaccccgcgacagtgtgcaaaatcccaccaggctryarcctsawgakcttcaacraycragaayttgckrmtmykctkgctcagtctgttaaccagggttttgaggccgtttatcagctgactcgaatgtgcaccataagaatsagcttcgtgaaggggtggggagcagaataccggaggcagacagtaacaagtactccttgctggattgaacttcatctkaatggccccctgcagtggttggacaaagtattaactcasaygggatccccgtcagtgcgatgctcaagcatgtcctaaagtccgtcagcagtggagctcattggaagacttaacgtaccaactcctccgccacagtactcgtgtgtgatcccgtggackgtgctagtcaaaacccakagcgaaaacagcacttgaggtctcatcagttaaagcaccttgtggagtctgtttcctacatttraawtttagatgggaaattagtgtctagaaatgccctcccagagkggacaaakaagacttaaagacttaatdatgtytcgwtgggcataagacagtgtcccaaaggttattaatwccagtagtagttgwgtacagtaaygtgtycagacccagtattgcagwgctctgctgttwgtataccttcttagtgtgcataaatsasgtgtgtgctgctgcttggtctaggcamgcctttataaaattacagtacctaawmwrwwawwmmmamwwhwmmrwwatttttgygtcttttttaatatataatatatatatcgagattttcaaattatcatttwgaagcagattttycttgtagaaactaatttttctgccytttwccaaaaataaactcgygsrsgargamwmgtgvhwdaamwwrrmarwmmwwramcttaatgtgtccagwgggtcttagcattctttctgtgatcattttctgctgaattgcattagaaggaaaccttgttggaaacttccaggctctttgtgccatttctgttctgattcaaagcagtgcagcatgatgtcattgtggtaaatagttgcactgatggcttctgggttagttacttctgagtccagtaaaggattgtgtgagcagtaagtccttttgtcttctaaccagacttcagcagatgataaccagttgttccattgattaacttttgtctcaaacgtgcacaggtgacagtataattattttcagggctattctagaatcatctcagtatgtttccttcttccaacgccagtctgataataaagtatctttctgtaaaggcarwmarmwwwwrrmrwmgtctcactttactacaggttgtcacagaagagacctttgttagctgatgctgaagtgtcatcagcagatagggccatctgttcctaaagtgtatcgtctgtaatttataataaatagaatgttatattgcct

SEQ ID NO: 2466 - DNA, 3060 bp, Rattus norvegicus
  misc_feature (2891)..(2891): n is a, c, g, or t
cggacactagactgtagaggtgagaccaaggataggagccctcgggcaacgggaggaagaacatagaatagccttgaagggcagaaaagggggagggggtcttttctcagtggggaagagtgactgagggacttcactacatccagggctgagaccctttcccaggagaggaagagctcagcatggaagtgagacccctccccccaacccaatgtcctcctcacccttcttgaagagtacccactcccctccccctccttccttccccagccgtctgcagcggctcagtcgctcagtcagtctcgggctgtccagccagggtgtttggtggtgaggattcaggctccgtccagacaaggcagtggcctgaggctcagggccccccagcccctccctcccagtccatcagcgtcactccccagccccgagctggaccgcacaccttgggacacggttttccacttcctcaggacgagccccagactggaggagaggtcggaggaggtgggcgttgggctcttcacgaggaccccggcggcgggcccgggggaggcggccgaagcggcggcggccgggagcgacatggccgaggagcaagacctatcagaggtggagctgagccccgtgggctcggaggaacctcgctgcctgtccccaagcagcgcgccgtcgctgggacccgacggcggcggcggtggctcaggcctgcgagccagcccagggcccggcgaattgggcaaggtcaagaaggaacagcaggacggcgaggcagacgatgacaagttcccggtgtgcatccgcgaggcggtcagccaggtgctcagcggctacgactggacgctggtgcccatgcccgtgcgggtcaacggtgccagcaagagcaagccgcacgtcaaacggcccatgaacgcctttatggtgtgggcacaggcggcacgcagaaagttagccgaccagtacccgcacctccacaatgctgagctcagcaagacgctgggcaagctctggaggttgctgaacgagagtgacaagcgccccttcattgaggaggccgagcggctccggatgcagcacaaaaaagaccatccggactacaagtaccaacctcggcggcggaagaatgggaaggcagcccagggggaggcagagtgcccaggcggggagaccgaccaaggaggggctgctgctatccaggctcactacaagagtgcccacctggaccaccggcacccagaagaaggctcccccatgtcagatgggaacccagagcacccctcaggccagagccatggccctcctacccctccaaccaccccaaagacagagctgcagtccggcaaggcagatcccaaaagggatgggcgctccttgggggagggcgggaagccccacatcgacttcggcaatgtggacatcggggagatcagccatgaggtaatgtccaacatggagacctttgatgtgactgagctggaccaatacctgccgcccaatgggcacccaggccacgtgggcagctactcggcagctggctacgggctgagcagtgccctggctgtggccagtggacactctgcctggatctccaagccaccaggtgtggctctgcccacggtctcgccccctgctgtggatgccaaagcccaggtgaagacagagaccacagggccccagggacccccacactacaccgaccagccgtccacttcccagatcgcctacacctccctcagtctgccccactacggctccgccttcccctccatctcacgcccccagtttgactactctgaccatcagccctcaggaccctattatggccacgcaggccaggcctctggcctctactcagctttttcctacatgggcccctctcagcggcccctctacacggccatctctgaccccagcccctcagggccccagtcccacagtcccacacactgggaacagccagtatatacgactctatcccgaccttagaggggccctgtcaccattggtgcccacgtggcccagggccccttcccccagcctgtgtgccctgctcctcatcagcctcatgcccagcagtggcagtggaggaggctgcagaggctgacagcagcaggcaggcttctgccagctcctgccctgatgacctccacccaccctggctcgggaggccaagccctgactgagctggcaaaggaggagtttggtggccatcccagactgagggtgaggggccacccatccccagaaataaccctctatcccaggacctgagaagtcgttctcaagtctttcagggaggcagaaaagggtatggtgggaaacctcactgctcctgttctctcctgggagagcaaggggctcaagggcctgtgtgccactgtgtcactgtgcctaaaagctaggctgcctagggacctgcttcaaagcctggagctggctctgtcctgtcactaaggactcactgaggacagctttgaacagctttgtgaagagcagggtgggacactcaatggacactctgatcctttcacccccctcctmacmtgaatgggaactgrccgaggtccccagatccagttctgcattagtaacctcatccctcacctaactgaggagagtcctcatgttcttccccasgaccwccaytcytcaaggcccaccccaggtgaggaggcagggkctccaggaaagaatcarargtgtccagsmttyctstcgsmttctgtcagcctmagttagsactgsacggsccctagcccmaragccmagtacytgggttgbtkgcagsargctggacactwaaccccttycatgkacmgkstamctttgsctygcaccctttgbtycarcgatatcttaatwaagkacgtagstytgtstyccmawhwmmwrwnwrharmmmagtccacaygwaacacatsgctgcccctttatmtycamagtcaccatgttcccatccctytaghtactccagccccaattaacttgcattargcactccaagtawtaaaawcaaagcttytggtwrmmwrmwwrrwrrmmwrraaaaaaaaaaaaaaaaaa

SEQ ID NO: 2467 - DNA, 1167 bp, Rattus norvegicus
gcggcgaccccccggcggcgcggagatgtggcccttggcggcggcgctgttgctgggctcctgctgctgcggttcagctcaactcctgcttagtaaagtcaaatctgtagagttcacgtcatgcaatgacactgtggtcatcccttgcaaagtccttaatgtggaggcccaaagcaccgatgaaatgtttgtgaagtggaagttgaacaaatcgtatattttcatctatgatggaaataaaaatagcactactagagaacaaaactttaccagtgcaaaaatctcggtctcagacttgctcaaaggcattgcctctttgacaatggatacccatgaggctgtggtgggaaactacacctgtgaagtgactgagctttccagagaaggcaaaacagttatagagctgaaaaaccgcccagtttcgtggttttctacaaatgaaaagatcctcattgttattttcccaattttggctatactcctgttctggggaaagtttggtatattaacactcaaatacaagtccagccatacgaataagagaatcattctgctgctggttgccgggctggcactcacactcatcgtggttgttggcgccatccttttcatcccgggagagaagcccgtgaagaacgcttctggtcttggcctcattgtaatctccacaggaatattaatactgcttcagtacaatgtgtttatgacagcttttggaatgacctctttcaccattgccatattgatcactcaagtgctgggctatgtccttgctgtggtcgggatgtgtctctgcatcatggcttgtgaaccagtgcacggcccmcttttgatttcaggtttgggaatcatagctctagcagaattacttggactagtttatatgaagtttgtcgcttccaaccagcgaactatacaacctcctaggaataactgaagggaagtgacggactgtaacttgaaagtcagaartggaagaatwcagttgtctgagcaccatggccttcacaactcacagctggaaggaacacacaacagtgactgactttcatctctgaaaaaagtcattgaaccataaatgaatattacagttaagtttatattaaagcagctgtaatttacgtaataaaaaatatatgatgtgctgtgtaaaaaaaaaaaaaaaaa

SEQ ID NO: 2468 - DNA, 7516 bp, Rattus norvegicus
gccgcgggctccagttccctggctacgcgtgagcgttcccgccacaccgagctcttggggccgtggttaaagcggagaggagccgagcgctctacccaccctgggagtctcctccaggccggcgagcaggagtctccttttagttggtgtttggcatcattatagtttggcatcttgaagaagatgttggaaaccatagacaaaaaccgggccctgcaggcagcagagcgcttgcaaagcaagctgaaggaacgcggggatgttgcaaatgaagacaaattgagcctcctgaagtctgtcctgcagagtccactcttcagtcagatcctgagccttcagacttctctacagcagctgaaagaccaggtaaacgttgctactttggcaactgcaaatgctgaccatgcccacacaccgcagttcagctctgccatcatctctaatctgcaaagtgagtcacttttgctgtctccaagtaatgggaacctcgaagcaatttctggacctggtgctccacctgccatggatggaaagcctgcctgtgaagaacttgatcagctcatcaaaagtatggcccagggtcgccatgtggaaatatttgagctcctcaaacctccatgtggaggcctcggcttcagtgtcgttgggctcagaagtgaaaacaggggagagctggggatttttgttcaggagattcaagagggcagtgtggctcacagagatggcagacttaaggagactgaccagatccttgccattaatggccaggtcctagatcagacgatcacacaccagcaggccatcagcatcctgcagaaggccaaagacactatacagcttgttattgccagggggtctttgccgcatatctccagcccacgaatttcccgttctccatctgcagccagcacagtttcagcccactcgaatccaactcactggcagcatgtggaaactatcgaacttgtgaatgatgggtctggtctgggatttggcatcataggaggaaaagcaactggtgtgatagtcaagacaattttgcctggaggagtagctgaccagcatggtcgactatgcagtggagaccacattctgaagattggtgacacggacctagcagggatgagcagtgagcaagtagcacaagtcctcaggcagtgtggaaacagagttaaactgatgattgccagaggcgctgtagaagaaactccagcaccttcctctttgggcatcaccctctcctcttccacatctacttcagagatgcgagttgatgcttctactcagaaaaatgaagaaagtgagacgttcgatgtggaactcactaaaaatgtccaaggattaggaattaccattgctggctatattggagataaaaaattagagccttcaggaatctttgtaaagagcattacaaagagcagtgctgtggagcttgatggaagaatccagattggagaccaaattgtagcagtcgatggcaccaaccttcagggttttaccaatcaacaagcagtagaggtgttacgtcacacgggacagacagtgcgtctgacactgatgaggaagggagccagccaggaagcagagattacgtcaagagaagacaccgcaaaagatgtggacctcccagctgaaaattatgaaaaagatgaagagtctttgtcactgaagagaagtaccagcatactgccgattgaagaggaaggatatccactgttgtcaactgagctggaagaaactgaagatgtgcagcaagaagctgccttgctgacaaagtggcagaggattatgggaattaactatgaaatagtggtggctcatgtgagcaagtttagtgagaacagtgggctgggaataagtctggaagcaacagtgggccaccacttcatccggtctgtgctaccagaaggccctgtgggacacagcgggaagctcttcagtggagatgagctattggaagtcaatggtataaatttgcttggggaaaaccatcaagatgtggtcaatattttaaaagaacttcctatcgatgtgacaatggtatgttgccgtcggactgtgccaccgaccgccctgtcagaagtggatagcctggacatacatgatcttgaactaacagagaagcctcatatagacctaggagagttcattggatcctcggagacagaggatcccatgctggcgatgtccgatgtggatcagaatgccgaggagattcagaccccgctggccatgtgggaggcaggcattcaggccatagagctggagaaagggagcaggggcctgggcttcagcatcttagactaccaggaccccatcgatccagcaaacacagtaatagtcattcgttctctggtgcctggcggcattgctgaaaaggatggacggctttttccaggagacaggctcatgtttgtcaatgacattaacctggaaaacagcactctggaagaggccgtggaagccttgaagggagcgccctcagggatggtgcgtataggagtagccaagcctttgcctctttcaccagaagaagggtatgtttctgccaaggaagacacttttctctgctcaccgcacacctgcaaggagatgggcctgtctgacaaagccctcttcagggctgacttggctctgatagatacacctgatgctgagtccgtagcagaatcaagatttgagtctcagttctctcctgataacgacagtgtctactctacacaagcctctgtcttatctcttcatgatggtgcttgtagtgatggcatgaactacggcccctctctgccctcatctcctcccaaggacgtgaccaacagttctgacctagtgctcggtctgcatttgtccctggaagaactctacacacagaacctccttcagagacagcatgctggctctcctcccacagacatgagcccagcagccacctctggtttcaccgtcagtgactacacacctgcaaatgctgttgaacaaaaatatgagtgtgcaaacacagtagcgtggactccctcgcagttgccaagtggcctaagcaccacagagctcgctcctgcactgcctgctgtggctccgaagtatttaacagagcagagctctctggtgtctgatgctgagtctgtcaccctgcagagcatgtcccaggaagcctttgagaggacggttactatagcaaaaggcagctccagtctaggcatgacagtaagtgctaataaagatggcctgggagtgattgtgcgaagcattattcacggaggcgccattagtcgggatggccgaattgctgttggtgactgcattttgtccattaatgaagaatccaccatcagtttaaccaatgcccaggcacgggccatgctgagaagacattctctaattggacctgacataaaaattacttacgtgcctgcagaacatttggaagagttcagagtaagttttggtcaacaagccggaggaataatggcactggatattttttcttcatacactggcagagatattccagaactcccagagcgagaagaaggagaaggggaagaaagtgaactgcagaatgctgcttatagcagctggagccagccccggagggtggaactttggagagagcccagcaagtccttgggcatcagcattgttggtggtcgggggatggggagccggctgagcaacggcgaggtgatgaggggcatcttcattaaacatgttcttgaagacagtccagctggcaaaaatggaactttgaagccgggagacagaatagttgaggtggatgggatggacctcagagatgcaagccatgaacaagctgtggaagccattcggaaagcaggcagccctgtagtgtttatggtacagagcattgtaaacagaccaaggaaatcccctttgccttccttgccgcacagcctttaccctaagtgcagcttcagcagcactaacccatttgcagagtctctccagctcacctctgacaaggcacccagccagtcagaatccgagtcggagaaggccacattgtgcagtgtcccttcctcctctccttcagtgttctcagaaatgagcagtgattatgcacagccatctgcaaccacagtcgcagaagatgaggacaaagaggatgagtttgggtacagctggaaaaatatccaagagcgttatggaacccttacaggccagctccatatgattgagctggagaaaggtcatagcggtttgggtctaagtcttgctgggaacaaagaccgaaccagaatgagtgtgtttatagtggggattgatcctactggagcagcagggagagatggccgactacagattgccgacgagcttttagagatcaatggccaaatattatatggcagaagtcatcagaatgcttcatcaatcattaaatgtgctccatctaaagtaaaaatcatttttatcagaaatgcagatgcagtgaatcagatggctgtatgtccaggaagtgcagcagaccctctaccttctacctcagaaagtcctcaaaataaggaggtggaaccaagtattactacatctgcttcagctgtggacctcagctcacttacaaatgtgtaccatctggagcttcccaaggatcaaggaggcttaggcattgctatctgtgaggaagacacactcaatggagtcacgatcaagagcctaactgagcgtgggggagcagccaaggatggaaggctcaaacctggggatcgcatcttggctgtagatgatgaacttgttgctggctgtcctattgaaaagttcatcagtcttctgaagacggcaaagacaactgtaaaactgactgttggagctgagaacccgggctgtcaggctgtcccttcagcagctgtcacagccagcggagaaaggaaagacagctcccagacccctgcagtcccagctccagacctggaacccattccaagtacgagcaggtcatccacaccagcaatttttgcttctgaccctgccacctgccccatcatccctggctgtgaaacaacaattgagatttccaaaggccaaacaggcctgggactgagcattgtcggggggtcagacacgttgctgggtgctattattatccatgaagtttatgaagagggagcagcatgtaaagatggaagactgtgggctggagaccagattttagaggtaaatgggattgacctgagaaaggctacacatgatgaagcaatcaatgtcctgaggcagactccgcaaagagtacggctgacgctctaccgagatgaggccccatacaaagaggaggatgtatgtgacaccttcactgtcgagctgcagaagaggccgggcaaaggccttgggttgagtattgttggcaaaagaaatgacactggagtgtttgtatcagacattgttaaaggaggcattgcagacgccgatgggagactgatgcaaggggaccagattttaatggtgaatggagaagatgtccgtaatgccacccaggaagcagttgctgccctgctcaagtgttccctaggcacagtaaccctcgaggttggaagaatcaaagccgctccattccactcagagaggaggccttctcaaagcagtcaggtgagtgagagcagcctgtcatccttcagtctcccacgttctggaatacatacatcagaatcgtcagaaagtagtgccaagaagaatgcgttagcatctgaaattcagggattaaggacagtcgaaataaaaaaggggcctgctgacgcgctgggactcagcattgccggaggagtgggcagcccgctcggcgacgtcccgatatttattgccatgatgcacccaaatggtgttgcagctcaaacccaaaaactcagagttggggataggattgtcaccatctgtggcacatccactgatgggatgactcacacacaggcggttaacttgatgaaaaatgcctcaggctccattgaagtgcaggtggttgctggaggagatgtgagtgtggtcacgggtcatcagcaagagcttgccaatccttgccttgctttcactgggctgacttccagcactatatttccggatgacttaggccctccacagtctaagaccataacactagaccgaggaccagatggcttaggcttcagcattgtaggtggctatggcagccctcatggagactyacsaatttatgttaaaacagtgttcgcaaagggagcagcggcagaagatgggcgtctaaagaggggtgatcagatcattgctgtcaacgggcaaagtctagaaggcgtgacccatgaagaagctgttgccatccttaagcggacaaagggcactgtcaccctcatggttctctcttgaattggctgtcagagccgaagcagccagctacgtgcccacctcctactgtaacggagtggaactgttcacatgacctgttgattggggaagactacgcggggccgagaaacacactgatttgttcctaacaaccaaacagcatttttcctttaccgtggcatttcatagtcttatgctcaaacagaagggaggtttgcagaggtaaacctcagttttatcttgaagatatctaacaatttatagtcatgtggacagaattattgtatgctcattttgttagtatggaaacaaaataatgcaaagttagccaagggagatggcttcagaaaaattaagataaaaggtggaaatttagaaaaaagaaggcagtcttgagtcttatagaacttccccaatctagaagtctacaaaaagaaaataaagtgcccgcagtactcttgaatagtccactgttttaaaattgtgaacattgtgatgtactggttctccttacctcttatgcgtattttttctgctaaaattgttcagcagtcttcataagctttaaaaagaaattgtgtttaatgcatatctcagtgttcttttttagttttgacctgctatattttcatgttgttgtatgtaaaataatgttgctaccctgtgttggccgcagttcttctaagaaacatccactccacgtagtcatggaagacagagaagaagcccagaacyttctaatgctgatttaacggactgatacracgttgaaaacacgttcagtaccatgctattgtttkwacattagtattaatcttaatgacwtagaaaaagacaatgtgttagtaattattttggttgtatgccattagtaaattgacagaaaaattaagggggttaatgtgacttcatttcactgctgtatattaacatcttacaatacaatagtttaagtctaagggaaacagatggagctgtttaccgagcaactggtgaggaattatgtgttcaatcccattttagagcgtgaaactcctacattagaatagataaagtcactttaaatattatctatatttgtaacagaagtcgtatacatatattttattatagcattcttgtgtaaatgcagaattaaagtgaataaataagttttttgtggtgtmcmgcaaamwaaaaaaaaaaaaaa

SEQ ID NO: 2469 - DNA, 651 bp, Rattus norvegicus
atgggagccgcccgcctgctgcctaaccttaccctgtgcttgcagctattgatcctctgctgtcaaacgcagggggagaatcacccgtctcctaattttaaccagtacgtgagggaccagggcgctatgactgaccagctgagcaggcggcaaatccgtgagtaccagctctacagccggaccagtggcaagcacgtgcaggtcaccgggcgtcgcatctctgccaccgctgaggatggcaacaagttcgccaagctcatcgtggagacagacacattcggcagcagagtccgcatcaagggggcagagagcgagaagtatatctgtatgaacaagaggggcaagctgattgggaagccgagcgggaagagcaaagactgcgtattcaccgagatcgtactggagaacaactacacagccttccagaacgcccggcatgagggctggttcatggctttcacccggcagggccggcctcgccaggcctcccggagccgccagaaccagcgagaggcccacttcatcaagcgcctctaccaaggccagctgcctttccccaaccacgctgaaaggcagaagcagttcgaattcgtgggctccgcccccactcgcaggaccaagcgcactcggaggccccagtcccaaacgtag

SEQ ID NO: 2470 - DNA, 759 bp, Rattus norvegicus
cggccgcggggagcggacatgtgcaggctgggctaggagccgccgcctccccccccgccccgcgatgtattcagcgccctccgcctgcacttgcctgtgtttacactttctactgctgtgcttccaggttcaggtgttggcagccgaggagaacgtggacttccgcatccatgtggagaaccagactcgggctcgcgatgatgtgagtcggaagcagctgcgcttgtaccagctctacagcaggaccagtgggaagcacattcaagtcctgggccgtaggatcagtgcccgtggcgaggacggggacaagtatgcccagctcctagtggagacggataccttcgggagtcaagtccggatcaagggcaaagagacagagttctacctgtgtatgaaccgaaaaggcaagctcgtggggaagcctgatggtactagcaaggagtgcgtgttcattgagaaggttctggaaaacaactacacggccctgatgtcagccaagtactcaggctggtacgtgggcttcaccaagaaggggcggcctcgcaagggtcccaagacccgcgaaaaccagcaagatgtgcacttcatgaagcgttaccccaagggacagactgagctgcagaagcccttcaagtacaccacagttactaagcgatcccggcggatccgccccactcaccccggctaggtccggtcacactcacccycsyrgagaactacgtcagaggaatatttttacatgaaaaaaaaaaaaaaaaa

SEQ ID NO: 2471 - DNA, 4386 bp, Rattus norvegicus
cctccacctctcaaatgctgggattgcaggatgtccccccacccctgctcccttgtgtccttgcttcctgctgccggaatgtatcacttaattgccaggtacccatggtctgattccaggatagaagggcgggcgagggggttggaggagaggcctctattatttccgcggtctggcaggcctggaagcaaagcttcaagtgcagaaggaggagtgtcggggaatggcagaaaaggctggaacagcaatgcagacctaggtaaagggcacagagctgagggaagctcctgggaggctccctgcagctcctgcctctgcacatgacccggactccttttctctctttggatctgcgtccagggactggcttgtacacacccctcccaggagaccccttggcagctgcacactcaggctccatccaagttggctctgcccctggggaaggctgctcaaaaggcctggctcccagtttctggggacccacagagagcctctcacctcgcagctcagctccatccgcctcctgtgcctggctgcgaccagctgggtctaactatagacagtcagcaacttcagccacttcaccgagtttcccaacagctttgagatttggaagccggaagcctgactgccttctcagaagctacggtccactacctcagccattctgttggagctgaactggcagatgaaggtgagacccaggcaccatggacctcctggtctcctcaggaatgaagggcatcgctgtcttccttgtctttatcttctgctggacaacctccaccctcagcagcttctggcagttccagaggatggtcaaacacatcacggggcgcagcgccttcttctcctattacggatatggctgctactgtgggcttgggggccgagggatccctgtggacgccacagacaggtgctgctgggctcatgactgttgctaccacaagcttaaggaatatggctgccagcccatcttgaatgcctatcagtttgccattgtcaacgggaccgtgacctgtggatgcaccatgggtggcggctgcttgtgcgggcagaaagcctgtgagtgtgacaaactgtctgtgtactgcttcaaggagaacctggccacctacgagaaaactttcaagcagctcttccccaccaggccccagtgtggcagggacaaactccattgctaggcaggccaccgtccctctgtcacctgctctagtctgagcccttctgaaaaaaactgtcttccccttcccctccaagagtccccaggctcctgcagctcagccttgctgtctagggagtgtcttctcaggcattaggggaccggaggtggagaattcctgccctggaatcagaccatgggtacctggcaattaagtgatacattccggcagcaggaagcaaggacacaagggagcaggggtggggggacatcctgcaatcccagcatttgagaggtggaggcaagaggtggggggtagcctccactatacggtaagttcaaggctaacctgagctacctgagaccttgccttgaaaaaacttttttaaaaaacgtttaaaggaaaagaaaacagaaagacacggggactgggctgaaaggtactctcaaaccgatttcccaggaagagcggagagccccaggttcagctccagcctgaactcccccataccctcagtcctggtcaggatgtgtgtctgactggggaaccaagtcctccacccgggtggagcttagctgggaactacgcaggtgtcctagaaaatacagtcctaagagcctcacccggagtctcatccccatttgctccaggactgacctctgtaaatcttccagcaggaagcaggctgtacccatctcaggaggtggggtgctgttagaacaatggtgtgcaccagtgacacaaagatgtcatggttaagatggcatcaagaagtggaaaggacattcggaacagtgggtccaaggcacccaaagtcctcaccccaatttagaagccgttggtcctgtaagacttaaatctactaaacaaggaaggtctaactgggctggaatctgaagttcatggtgccaggctggggcggtgggtggggacgtggccgtggccatgaccatgattgcctctctgcatggtgacacttgccttttgcaccctagctctcagcacatctgaaaaggacagactctcctgttcattccttgaatctgagactctcctcactaatgtagcaaaaatggaggtctaaagtgcaggcttcagcctctgaggtccagggcaggaggaagctggggctcagcctcctggaggatgagagcttgccgggtgagcatcagcgacagcagacccttgggctcagagagtccgcaagcctgggagagcctggccgagccctgactgcagcacacagagccgtgagcctcatacaagaagccacattttggggaagcttcagggtggctgattccacagctgttgggttcagaacggaagccgggagcactcactctcagatatggaagctttgttttacgagcgcttagcaccagttcaggatctgaacttcgtcctgaccggagagtccgtaccacatttttataggatgggaacacagagcgaggggcgtggagtaagctgttgaacgaccgatcatattttgacctaagaggttaagtaaggacgttaacatgggtgactgggcattagtcaggtcacctggttttggggtctttgaatcagctttcgtggccaggtcccttcctggactttggctcggaatttagaacgataagggaacgaagaggtgggcaagcttcgggcagtcagtaagaggcagcacattcatgacctgtgtgccttgtttagataatgggataagagtatctcctctcttacaccccttactggttaacagacaaacacgagacatctgaagaagcaggacaggagttaggttctggggcacaggaacatgaactcggttttgatcctgccggcaaggtggatcttgttcctgagaaggctggactcaggaaacttcctcttaacaagttagttgatggcgctggtccttagtcaccgatactgtcaggctctcagctcttgggccagacttggcggccatgggagtgtggtcacttgccccgtccccttcttccaggaggtactggggaamayggktggatttgtggagttgtagggaacactcrtggctcccttcacttagtaggtcagctaacatatgtgtatcgagcccataccgtgtgccatgtgcagtgctgagcagcagggagtcagagatttaaagacacacacacagacttcaagtctgagaattttgaatcccagggagaaccgctgagagccatggcgcttctaccaatgccagaggctaacacccggactgagaaaactaagcacgaggagacagcagggtcagcagagggcctgggagctagggccctgagcagtacctagttcaaatcacagagtcgtctttcttcctccaccctacccaggtacagcaagtagacacgggtgggggcagggcagggatgcaggaacattagggcacaccgatgtggctaggctaagctagagcatgttaccttctcaggggtcctgtcatgtcagagactggttccaacctggaaagatgtctgagtgacagctgtggtagaagaagagaggccagggtgatatcagcatgaagggctggattgctatgtgagatccagatctcttctgccactggggtcagcttctacacctggaaatagatgggctgcgttatggagggtggtgtgagtccctgtctgcgttgtgccgggaatcagagcagagtgttagcgctgtaaaaggacatgctggtgcttgcaggaaatcatcgatttcttggaagggcagccattcatctacaccagggattgactttatgccaggcttgtgatgagggtagaaaagtagaaattctgtccgctgcaaggagcagtcagaggacacaaggaccaaatagcttgggagttgcggaagtaggtgtctgctgagggagcagtgaccactgggggaaaggctccttcaaggaattcagggacaggggtgagggctgacatcttgcctgagaccctaaagaagagaaggagttgagagggctgagtatgctgtgtggagccccacccccacccccacccccacccccaccccaggtatatggatggaggataatgcgggggtcgggttcctctcaaatccatcatcccaccttcgagctgctggcacggccttgccagcacagcccgattctgtgttgacaaaatactcgaacgaaatgattacatgcaaataaaatgcaagaggaaaaatctaaaaaaaaaaaaaaaaa

SEQ ID NO: 2472 - DNA, 2181 bp, Rattus norvegicus
ccccagcctgcctaggtgctgggagccgggagctggattatggtggcctgagcagccgacgcagccgcaggagctgggagtccctcacgctgcaaagtccgcctggaagaccctgaaagctgcaggctccgatagccatgcccgcccctcccagccccacaaggggcccgatccccccgctgaggctggcggtcgccgtccagatgtagctgggtcccccggatcgccatcgtcctcttctctcgtgcgctacagatttctcctgcccactctccaccgccgggagcaggaactgagcgaggggcctgcagactctgcagtcctgatgcccccgaggccgctctcctgagagaagccaccaccacccagacttaggggcaggcaagagggacagtcgccaaccggagccacaaggcccgggctcaccatggccccggcgctgcgctggctcctgctatgggtgggctcgggaatgctgcctgcccagggaacccatctcggtatccgactgccccttcgcagcggcctggcagggccacccctgggcctgaggctgccccgggagacggacgaggaacctgaggagcctggccggagaggcagctttgtggagatggtggacaacctgaggggaaagtccggccagggctactatgtggagatgaccgtgggcagccccccacagacgctcaacatcctggtggacacgggcagtagtaattttgcagtgggggctgccccacaccctttcctgcatcgatactaccaaaggcagctgtccagtacataccgagacctccgaaagtctgtgtatgtgccctacacccagggcaagtgggagggggaactgggcactgacctggtgagcatccctcatggccccaacgtcactgtgcgtgccaacattgctgccatcactgaatcggacaagttcttcatcaatggttccaactgggagggcatcctagggctggcctatgctgagattgccaggcctgacgactccttggagcccttttttgactccctggtgaagcagacccacattccgaacatcttttccctgcagctctgtggcgctggcttccccctcaaccagactgaggcactggcctcggtgggagggagcatgatcattggtggtatcgaccattccctatacactggcagtctctggtacacacccatccggcgggagtggtattatgaagtgatcattgtacgtgtagaaatcaatggtcaagatctgaaaatggactgcaaggagtacaactatgacaagagcatcgtggacagtggcaccaccaaccttcgtttgcccaagaaagtatttgaagctgcagtcaagtccatcaaggcagcctcctcgacggagaagttcccggatggcttttggctaggggagcagctggtgtgctggcaagcaggcacgaccccttggaacattttcccagtcatttcactttacctcatgggtgaagtcaccaatcagtccttccgcatcaccatccttcctcagcaatacctacggccagtggaagatgtggccacgtcccaagacgactgttacaagttcgccgtctcacagtcatccacaggcaccgttatgggagcggtcatcatggaaggcttctatgtggtctttgatcgagcccgaaagcgaattggctttgctgtcagcgcttgccatgtgcacgatgagttcaggacggcggcagtggaaggtccgtttgtcacggcagacatggaagactgtggctacaacattccacagacagatgagtcaacacttatgaccatagcctatgtcatggctgccatctgcgccctcttcatgttgccactctgcctcatggtatgtcagtggcgctgcctacgctgcctgcgccatcagcatgatgactttgctgatgacatctccctgctgaaataaggaggccagtgggcagatgacagagatccccctggaccacatctgggtggttccctttggtcacgtgagttggagatatggatggtacctgtggccagagcacctcaggaccctcaccaacctgccgaatgcttctgccttgacagaaaagagacasytggcaagctggattacagggcttgcaaggsctgtwkgaaacaggagggagaaagcagcattctggtggcaggatacccttaggcctcgtg

SEQ ID NO: 2473 - DNA, 1001 bp, Rattus norvegicus
tcaacgtagtaacttccatctgtccccccccaccatgcagctctccacagcacttctattcctgctgctcacggccacttccttcacctcccaggtgctggctcacccaggttccatcccaacttcctgctgctttaccatgaccagtaagaagatccccaacacactactgaagagctacaaaagaatcaccaacaacagatgcacgctgaaagccatagtcttcaagaccaagctkggcaaagagatctgtgctgaccccaagaaaaagtgggtccaggatgccacaaagcacctggaccaaaaactccaaactccaaaaccataaacaacctcctcttttgacactaacccagagcctaagaaatgcttgattccttctcttttctaagatatgctatgggagaatatcggcacccatcccccaaggacttggcttcatgtagttacagatgggactggaagtcatgatgtttgatgagataagccagactcaaaaggttgtgtgatttcttgcatatgcaacatcttaaaaggagagagcatggaaggagatgtaggattattgaggaatagaaaggaatgagttaggggtaactgaggatgataggaggactaaatactatcaaagcaccttatacacatatgaaaatgtcataacatgacccattgtttttcaaaattaatatacactgattaaaatgctaatatttaaggacatgttacatttaagaaattggaattttaaagcatattttaatggatcttggttctttttgttgttttgcttgtttgcttgtttgaaatagggtctcactgtatcaccctgattgacctgcaacttactatgtagaccaggctgacctcaaactcacagagatttacctatttctgcctttaacgtgccatcatgccaagccagaatggttttagtattagtatgtactaattatgtataataaaaaattttactaccacaaaaaaaaaaaaaaaaaaaaaaa

SEQ ID NO: 2474 - DNA, 1708 bp, Rattus norvegicus
atccggagctgatctgatcgccggcgacatcagtcgggagaccagcccggcgcgtggccccctgcaggcgaggcgaggaggccaagcccattccctccctgagcccctgcgatcttccccggccctcgcgcctgcagcaggcacaggctagccccgggtcatacggacagtaagtgcgcttcgaaggccgtgcactcggcccacattcaagccctccaaacctcccgtccgtccgtccgtcctgcaacgatgcctgcccctttggagacctgtctctctgacctcgactgcgccagcagcaacagcgggagcgacctgtccagtttcctcaccgacgaggaggactgtgccaggctccagcccctagcttccacctcagggctgtccgtgccagcccgcaggagcgcgcccaccctctccggggcatcgaacgttcccggtggccaggacgaagagcaggagcggcggcgacggcgaggtcgcgcgcgggtgcggtccgaggcgctgctgcactcgctgcggaggagccgtcgcgtcaaggccaacgatcgcgagcgcaaccgtatgcataacctcaacgctgcgctggacgctctgcgcagcgtgctgccctcgttccccgacgacaccaagctcaccaagattgagacgctgcgcttcgcctacaactacatctgggccctggctgagacactgcgcctggcagatcaagggctcccggggggcggtgcccgggagcgcctcctgcctccgcagtgtgtcccctgcctgcccggtcccccgagcccggccagcgatacagagtcctggggctccggggccgctgcctccccctgcgctactgtggcgtcaccactctctgaccccagtagtccctcggcttcagaagacttcacctatggcccgggtggtccccwykwskcctttcctggcctgcccaaagacctcctccatacgacaccctgcttcatcccgtaccactaggsctttgcaagacaacgttaatacttyyttcctgccccagtctawgagcaatagatgggggagccggctgaagcctcggggascacccttacccccaggtggatgctgggagctttaaagaggggagggatacctgaccacttgctaggttgccgcaccctcgctgagaagctgcccctcggactgtttccccacgccccagcaccgggcccctcctgcccgccccccagacgggctttcggttttttttttgsacttyctgaacttcamaaaacctcctttgtgactggctcagaactgaccccagccaccacttcagtgtgatttggaaaagggacagatgagcccctgaagacgaggtgaaaagtcaattttacaatttgtagaactctaatgaagaaaaacgagcatgaaaattcggtttgagccggctgacaatacaatgaaaaggcttaaaaaaaaggagacacaaggagtgggcttcatgcattatggatcccgacccccaccactgtgggcttgctcccggaagaactgagtgcttgcatagctattcaggcaccgggccggagggtactttaatttattcaggatgcttcattcatatgaaaatgtatttttgtacataaagaatttattctattattatgagctatcaaagtttacatttttgtactgcagacgtttcgtgtaaataaaaaataagtaaaaaaaaaaaaaaaaa

SEQ ID NO: 2475 - DNA, 2241 bp, Rattus norvegicus
tttacttttatgctcaccatctgattggcctaggagctgtgaaatcagctgcaactgaaaatgtctgacagcttggataacgaagaaaaacctccagctcccccactgaggatgaacagtaacaaccgagattcttcagcactcaaccacagctccaaaccactgcccatggccccggaagagaagaataagaaagccaggcttcgctctatcttcccaggaggaggggataaaaccaataagaagaaagagaaagaacgcccagagatctctcttccttcagactttgagcatacgattcatgtgggttttgatgcagtcaccggggaattcactggaattcctgaacaatgggctcgactgctccaaacctccaacattacaaaactggaacagaagaagaacccacaggctgttctggatgttctcaagttttacgactccaaagaaacagtcaacaaccagaaatacatgagctttacatcaggagataaaagtgcccatggatatatagcagcacatcagtcgaataccaaaacagcttcagaacctcctttggctcctcctgtatctgaagaagaggatgaagaagaggaagaggaagaagatgataatgagcccccgcctgtcattgcaccaagaccagagcatacaaaatcaatctatactcgttctgtggttgagtcaattgcttcaccagcagcaccaaataaagawgccmccccaccttctgctsakamtsccaatwmmagtamtttrwacarraawamarawmggcaaagaaaaaaatccaagatgacagatgaggagatcctagagaagctaagaagcattgtgagtgttggggacccaaagaagaaatatacaagatttgaaaaaattggccaaggggcatcaggaactgtttacacagcactagacattgcgacaggacaagaggtggctataaagcaaatgaaccttcaacagcagcccaaaaaggaattaattattaatgaaattcttgtcatgagggaaaataagaaccccaatattgtcaattatttagatagctacttagtgggtgatgaactgtgggtagtcatggaatacttggctggtggctctttgactgacgtggtcacagaaacctgtatggatgaaggacagatagcagccgtctgtagagagtgcctccaagctttggatttcttgcactcaaaccaagtgatccacagagatataaagagtgacaatattctcctcgggatggatggttctgttaaactgactgattttggattctgtgcccaaatcactcctgagcaaagtaaacgaagcactatggtgggaactccctattggatggcacctgaggtggtaactcgaaaagcttatggcccgaaagttgatatctggtctctgggaatcatggccattgaaatggtggaaggtgaacccccttaccttaatgaaaatccactcagggccttatatctgatagccactaatggaaccccagagctccagaatcccgagagactgtcagctgtattccgtgacttcttaaatcgctgtcttgagatggatgtggatagacgagggtctgccaaggagcttttgcagcatccatttttaaaattagccaagcccctgtccagcctcactcctctgattcttgctgcaaaggaagccattaagaacagtagccgttagaagtgcaagccttacccctcaccgtctcccggatgaagtaagactgaactaaaacgtctsctgcagggatccacagaagaaargacagtcaaatgsagwgggggttctttaactttcaagtgaatagaaacttcttataaacctttttcmtactccctcagattatgtaatttatttgtaagccwgaaccgcagcccacacaggscagcaatgtcgaagtagccattaagtggccacttccaccgtgaagcgagagagccagtagtsaatccctcattcgtgcatttactttgaagaaaagagatttctcaaagatgcacactccctcttcatagtgctgtgtgtttttaagttagagagtagtcccccttccattcaaacctctttcaaaatcccttacccaacgtgatgttttttcacttgcattgtcttagatgtccagaaaaaaacgatrtcaarmtkttttttttaaaaaaaagaaagcaaaaaagcaaagaaawaaaaacawracaaaaaacaaacaaaaacgaaaaaaaaaaaaaaaaa

SEQ ID NO: 2476 - DNA, 3623 bp, Rattus norvegicus
gcgcctgggtcggctcgccgggctccgagagtggccggctccgggctgcgagggccggcggcggccgagggatgcgccgctcccggccgagccgatcccaccgctccaggtgagacggctccaggggcgcagagagccgcggccatgggaaccctgggcaaggcgagagaggctccgcggaaaccttgccatggctccagagctggccccaaagsaagactagaggccaaatcaaccaacagtcctctccctgcccagcccagcttggcccagatcacccagttccgaatgatggtgtccctgggacatctggccaaaggagccagcctggatgatcttattgacagctgcattcaatctttcgatgcagatggaaacctgtgtcgaagtaaccagctgttacaagtcatgctaaccatgcaccgaatcatcatctcctcggccgagctgctgcaaaaactcatgaatctatataaggacgccctggaaaagaattctccaggaatttgcttgaagatctgctattttgtcaggtattggataacagaattctggatcatgttcaaaatggatgccagcttgaccagcaccatggaagagtttcaggacctggtgaaagccaatggtgaggagtcccactgccacctcatcgacacgacacaaattaattctcgagactggtccaggaaactgactcagaggataaaatcaaataccagcaagaagcggaaagtgtccctgctgtttgaccatcttgaacctgaagaactgtctgaacacctcacctaccttgagttcaagtccttccgacggatatctttctctgattatcagaattaccttgtaaacagctgcgtaaaggagaaccccaccatggagcggtccattgccctgtgcaatggcatctcccagtgggtacaactgatggttctcagccgtcccaccccacagctccgggcagaggtcttcatcaagttcatccatgtggctcagaagctccaccagctacagaacttcaacacgctaatggctgtgatcgggggactgtgtcacagctccatctccaggctcaaggagacaagttcacatgtcccacatgagatcaataaggttctgggtgagatgactgaactgctgtcctcctgcagaaactatgacaactacaggcgagcctatggtgagtgcacccacttcaaaatccccatactgggtgtgcacctcaaggacctcatatccctatatgaagccatgcctgactacctggaagacgggaaggtgaatgtccaaaagctcctggccctttacaatcacatcaatgagttggtccagctgcaggacgtggccccaccattggatgccaacaaggacctggtgcacctgctgacgttatccctggatctatactacaccgaagatgaaatctatgagctttcctacgcccgtgaaccaaggaaccacagggccccgccactgacaccttcgaagccaccagttgtagtggactgggcctctggagtgtctcccaaacctgacccgaagaccatcagcaaacacgtccaaaggatggtggattctgtctttaagaactatgatctcgaccaggatggatatatctctcaggaggagtttgaaaagattgctgcgagctttccattttccttctgtgtgatggacaaagatagggagggcctcatcagcagagacgagatcacagcctacttcatgagggccagctccatctattccaagctgggcctaggctttccacacaactttcaagagaccacttacctgaagcccaccttctgtgacaactgtgctggctttctctggggtgtgatcaagcaaggctatcgctgtaaagactgtgggatgaactgccacaaacagtgcaaagacctggtagtgtttgagtgcaagaaacgatccaagagcccggcggtatccacagaamacrwsrgctctgtggtgccaatgtccactctttgtccactgggaaccaaagatctgctccatgcaccygaagaaggatctttcattttccagaatggagagrttgtggaccacagtgaggagagcaaggataggaccatcatgctcttgggcgtatcctcacagaaaatttcagttcggctgaagaggactgttgcccacaagaccacccagacagaatcatttccttgggttggcggcgagatgccccctggtcactttgtgctgacttctccaagaaagtcagcacaaggkgctctttatgtgcacagtccagcatctccgtgccccagcccagcactggtccggaagcgggcattcgtcaagtgggagaacaaagagtcccttatcaaaccaaaaccagagcttcacctcaggctccggacctaccaagaactggaacaggaggtaaataccctgagggcagataacgatgctctgaagatccagctgaagtatgcacagaaacaaatagaatccctgcagcttggcaaaagcaatcacgtcttagcacagatggaccacggtgatggtacttaatccagaaattcaaggaacagaatctgcagacgggtttactgggatctcacttcaaaactgattgcagaggttcagcaactttagactgattgacttttaaagggcagagatagccactgtwawwrrwrwmmwwrrwwttttccctaactgtctttaatgtgagtcgtgggttttcagtcagttgagtmaaagggaagaaaagttccagcatgtaaaacactgagcagtcatattctaaccttttctttcttttactgaaaccaataccaacatgtgctaaaataagagtatagtttcctgacagtgtctcaggcagcctgctttactgattcgcacttagataaagagcccctggtgaatcaatttgctgccttccccagggtttctgcaaactgggagttactttgttctacccgaaaacctgctcataatggaaacaataccctaaaagtggtgactttgacatgcctgcattgtttgtgaagctgatccctaccttattcactacctcagatctcaagagcctctttccctgtcctttacttgccccctatttcctcccttgcttgtaggcacatcagcatatctacctagaagtgacctcctagagatgtagcctgtgtttaaatccagagcttcttaattgaacttgacattgtctgattgcaggccaacttatagctctaggtcttagtcattatgaaatacaaaataaaactacccataatcatcaattaccatgtcatacacagaactcattatctaagtcaaacgacgtaaacacgcctgtccagatagtctttctttagtggatagaattaacaatctgtgaccttttaaaagacatggtctgtgaacagtgtttagttcttcacgttctagtctctctctctctctctctctctctctctctctctctctctctctctctcaagtaaactatcgtaaggtcctcttttgaactgaatctgtgcttaaaattgtcttcacttttattatctacaaataagctatgggaggcgatggctttaacagctgacagcatttacctatgtgtagaatatgtgtatatagtatcaggcatgcatgga

SEQ ID NO: 2477 - DNA, 940 bp, Rattus norvegicus
gcaaagtcacactcaggacacaagcgacatggccctgcgcgcgctccatgcccagcctacaggcggtcctcagctgaggttcctgctgttcctgctgctcttgctgcttctgctgtcatggccatctcagggggacgccctggcattgcctgagcagcgacgctccctctctgagtcccaactcaacccggacgagctacggggtcgcttccaggacctgctgagccgactgcatgccaaccagagccgggaggactcgaactcagaaccaacccctgacccagctgtccggatactcagtccagaggtgcgattggggtcccacggccggctgctgctccgcgtcaaccgggcgtcgctgactcagggtctccccgaagcctaccgcgtgcaccgagcgctgctcctgctgacgccttcgtccaggccctgggacatcaccaggcccctgcaacgtgcgatcagcctccagggaccccacgctcgcgcactgcgcttgcgcctggcgccgcctcccgacctagccgtgctgccctctggcggcgcgcgcctggaactgcacttacgatcggccgccggcagggggcgccgaagcgcgcatttgcacccaagagactcgtgcccgctgggtcccgggcgctgctgtcacctggagactgtgcaggcaactctcgaggacctaggttggagcgactgggtactgtccccgcgtcagctgcaactgagcatgtgcgtgggcgagtgcccccacctctaccggtcggccaacacgcatgcgctgatcaaagcacgcctgcatggcctgcagcccgacagagtgccggccccgtgctgtgtcccctccagctacaccccggtggttcttatgcacaggacagacagcggcgtgtcactgcagacttatgatgatctggtagcccagggctgccactgcgcttga

SEQ ID NO: 2478 - DNA, 3295 bp, Rattus norvegicus
cgcagaaggcaaggtgtcccgaggctccagggttatgagatcgtcactattcagaaccttttaacaacaggtaattacgattcctattttttattctcccgagaataaaagcaataattgaagagctgtaccttggtactttgcatgtgcacattcatggagtcagttgtccctatatttgagactggtgtccctccttgtaattgcccacaagtactcgcacataatgagtcccagcactcaagtaccccctgcaggctttctaattacatttaatttttaatagtatagaagcttttagaatgtttggggaggggagtaactgtaattatttgtaagcggttatttgaaagtccccaaagcaaacaaccacttcaagttctcacttattccagagaggcaaagaggaaaaaagcacctgctgcccagagttttatttggtgtacagatatttagacgcactgtgcatatgagatgattccaggaggatggggtactcgcgtccggaaaaactggctgaactctgagatggcttagcggaaatgtagaaagagggggagaaaaggaagatttttctgctacctgttactgccccagaggcagccaagtcctcggtagcctctgctggggctagacattcaattgttttactaaaggctttttacagtccttattagaagcggcaccttcaccattgccagtcgctgaccattgtaattactccatcttttaaagcgaggtttgaggcgaactttgaaaagctccaataaagagcgggcggccctttcaatgggctgtttattagagaggagccttttgcacctgatccccagcgcgtgggagagcctcgcctgggagccagagcttttgtacaaggtgggaatttagcgggggtgggggcgggggggtgagacaaggaaagaaaggcaagggagggatggaagacgtatgcccacttctgtggccaaatgtgtcgttggtggggaaataattcggtggaatctacttttcctcctccgtgcactggctctcccttctgtataatcttcttaaaaatcggggtcagtgttagtaaattacgtaatggcttttcactttatttaaacctctaagtagtggaaagccagaacagagatgagttcagaacgttccatttccaaacacaccttttttttgtgagttgggagtgacttgggacacattcagaaaaacgtgcactctgcacttatttctacagagggtacctggccagacaattgcccagaacacagttaagctgatcaccaggaagacacccatagccactcacgacaggcccagtgatgtccagtacgcagcagcgaggcacagacacgccagcatgaagcgctgcgtttaactttaacttttcctagaggcatccattttgcaaggaactcctgtgtatttctatttgtgtgcatttctgtaggatgagggagagggagctgaagacttatccagcttttaactatagctggtggatattttctttctttcctctttctgcttgcctctttccctgttgaatacaggaagtggaaacatgaccaaatcatacagcgagagcgggctgatgggcgagcctcagccccaaggtcccccaagctggacagacgagtgcctcagttctcaggacgaggaacacgaggcagacaagaaggaggatgagcttgaagccatgaatgcagaggaggactctctgagaaaygggggagaggaggaggatgaagatgaggatctggargaggaggaagaggaggaggaagaggaggatgatcaaaagcccaagagacggggccccaaaaagaaaaagatgaccaaggcgcgcctagagcgttttaaattaagacgcatgaaggccaatgcccgcgagcggaaccgcatgcacgggctgaatgcggcgctggacaacctgagaaaggtggtaccctgctactctaagacacagaagctgtctaagatagagacactgcgcttggccaagaactatatctgggctctgtcagagatcctgcgctcaggcaaaagcccagacctcgtctcctttgtacagacactctgcaaaggtttgtcccagcccactaccaatttggtggctggctgcttgcagctcaacccccggactttcttgcctgagcagaayccggacatgcccccacacctgccaaccgccagcgcttccttcccggtgcatccctactcctaccagtcccctggactgcccagcccgccctacggcaccatggacagctcccatgtsttccacgtcaagccgccgccacacgcctacagcgcagccctggagcccttctttgaaagccccctaactgattgcaccagcccttcctttgacggacccctcagcccgccgctcagcatcaatggcaacttctctttcaaacacgaaccatccaccgagtttgaaaaaaattatgcctttaccatgcactaccctgcagcgaccctggcagggccccaaagccacggatcaatcttctcctcgggtgccgctgctcctcgctgtgagatccccatagacaatattatgtctttcgatagccattcgcatcatgagcgagtcatgagtgcccagcttaatgccatctttcacgattagaggcacgtcagtttcaccattcccgggaaacgaatccactgtgcttacagtgactgtcctgtttacagaaggcagcccttttgataacattgctgcaaagtgcaaatactcgaagcttcaagggatatatgtatttattgtcgttactgcctttggaagaaacaggggatcaaagttcctgttcaccttatctattgttttctatagctcttctattttaaaaaataatagtacagtaaagtaaaaaaggaaaatgtgtaccacgaatttcgtgtagctgtattcagatcgtattaattatctgatcgggataaaaaaaatcaagcaataattaggatctatgcaatttttaaactagtaatgggccaattaaagtatatataaatatatatttttcaaccagcattttactacttgttacctttcccmkgccgaaktwttttkttgtgattttgtacagaatttttaatgactttttataacgtggatttcctattttaaaaccatgcagcttcatcaatttttakacatatcagraaagtagaawtatatctaatttatacamrwmtaatttaactaatttaaaccagcagaaaagtgcktagaaagttattgcgwtgccttagcacttctttcttctctaattgtaaaaaaaaa

SEQ ID NO: 2479 - DNA, 1848 bp, Rattus norvegicus
ggagcggagagcggtgagcgacatgtccttccgaaaagttgtgcggcagagcaaattccggcatgtatttggtcagccagtcaagaatgaccagkgctatgaggacattcgagtctcccgagttacctgggacagtaccttctgcgcagtcaaccccaagttcctggcagtgattgtggaagccagtggtgggggtgcctttatggtgctccctctaaacaagacaggccgcattgacaaggcctacccaacagtrtgtgggcacacaggacctgttctggatattgactggtgcccccacaatgacgaagtcattgccagtggatcagaggactgcactgtcatggtgtggcagattccakagaatgggctgacctcccctctgacagagccagtagtggtgcttgakgggcataccaagcgtgtgggcatcatcacctggcaccccacagcccgaaatgtgcttctcagtgcaggttgtgacaatgtggtgcttatctggaatgtgggcactgcagaggagcygyaysgmswakrsrgmtwgcaymstgaccycakskacmatgykagcygrwacyrcaacggcagcctcttttgcacagcttgcaaggacaagagtgtccgaatcatcgatcccaggcggggcaccctggtggcagaacgggagaaggctcatgagggggctcggcccatgcgggccatctttctggctgatgggaaggtgttcaccrctggtttcagccgcatgagtsaacggcaactggcactctgggacccagaaaactttgaggagcccatggccctgcaggagctggattcaagcratggggctctactgcctttctatgacccggacaccagtgtggtctacgtctgtsrcargggtgattccagcatccggtactttgagatcacagatgaacctccctacatccactttctgaatacctttaccascaaagaaccccagaggggtatgggcagcatgcctaarargggcttggaggtcagcaagtgtgaaattgccaggttctacaaactgcatgaacgcaagtgtgagcccataktaatgactgtgccaagaaagtctgacctctttcargatgatctgtaccctgacacakccggacccgatgctgctcttgargcakaggattgggttagyggtcakgatgctgatccaatcctcatctcactacgggaagcctatgtgcccagtwaacaacgggacytgaaggtcagccggcgcaacgtgctatcggacagcaagcctgccggttacagccgctccggagtctccacagytactgcaattactgacattcccagtggcaaccttgctgggtctgktgaagctgggaagctggaagagktgatgcamggacttcgggcacttcgggtgmtsgtcaaggaacaaggggagcgtatcasccgcctggaggagcatytgggccgcatggagaatggggawacakagkacmamsagrracytgctsyckwtamtgmcyscytcycskmmravvmwkmshrystagcttstgtgsccaggtcacaccargcagtttgctgctcagtgcctctgtggcaggtcrtggscagtttgcacstctccacagcytgrkgcycakgttggaagcaccacctggcttttggaagatttttgtaccaaggcaaaktccaagtacthtaagggaccatctcctsgamttgcccaacccactgccccctcayywgaaaaagcrkcagagatgggttytatattttcatbccaaataaawgctctktsthwarmmaaaaaaaaaaaaaaaaaaaaaaaaaaaaaaaaaaaaaagtgtggcgacggcaaaa

SEQ ID NO: 2480 - DNA, 2440 bp, Rattus norvegicus
tcskcttysmgwgsstcccagtccacgcccaggctggggcggaccaggctggctggtgaacttgggggtttccccttttcgctcccattcgtgctgtggtcgtgaattcatccagggtccagaatgacgatccgacaccaaggccagcagtacaggccgaggatggcatttcttcaaaagattgaagcactcgtgaaggacatgcagaacccagagacgggagtcagaatgcagaaccagagagtcttggtcaccagtgtccctcatgccatgacaggaggcgatgttctgcaatggatcatccagcgcctttggatctctaacctcgaggcgcagaacttgggtaacttcatcgtcaagtacggctacatctaccctttgcaagacccgaagaatctcgtcctcaaacctgacagcagcctctatcgatttcagacgccgtacttctggcccactcagcagtggccagctgaggacaccgactatgccatctatctagctaagcgaaatatcaagaagaaggggattttagaagaatatgaaaaggaaaactatgatttcttgaacaagaagattaattacaagtgggattttgtcatcatgcaggccaaggagcagtaccggactggaaaggagaggaacaaagctgacaggtatgcgctggattgccaggagaaggcgtattggctggtgcaccgaagccctcctggaatgaacaatgtgttagactacggcctggaccgcgtgaccaatccaaacgaagttaagaaacaaacagtcactgctgtcagaaaggagattatgtattaccagcaggccttaatgaggtccacagtgaagtcttcggtgtcccttggaggaatcgtcaagtatagtgagcagttctcgtccaatgatgccatcatgtctggctgccttccaagtaatccttggatcacagacgacacccagttctgggatttaaacgccaagttggtggaggtcccaaccaagatgcgggtggagagatgggctttcaacttcagcgaactgattcgagaccccaagggccggcagagcttccagtactttctcaagaaggaattcagtggggagaacctgggattctgggaagcctgtgaggatctgaagtatggggatcagtccaaggtcaaggagaaggcagaggagatctacaagctgttcctggcaccgggtgcaaggcgatggatcaacatagacggcaaaaccatggacatcaccgtgaaggggctgagacacccccaccgctatgtgttggacgcggcgcagacccacatttacatgctcatgaagaaggattcttatgctcgctatttgaaatctccgatctataaagaaatgctggccaaagctatcgagccacaggaaaccaccaagagaagctccaccctcccatttatgagacgccacctacgctccagcccaagccctgtcattctgcggcagctggaagaagaagagagagctcgagaagcagccaacaccgtggacatcacccagccaggtcagcacttggctcccagccctcacctggccgtgtacacagggacctgcgtgcctccctctccctccagccccttctcaccatcctgccgctcgcccaggaagcccttcccttccccaagtcgcttcatccggcggcccagcattgccatctgcccctcgcccatccgagtggccctggagggttcttcagggctggagggcaagggggaagccagctggtctggtgccaaccctgggcccccagtcactgagagcatcgagacctcwskagrccgctcacgaccacacagccagcccagggccccgctcaaggcccgcgctgccctgtcccttggcaggtttctgagacggggctgtttggcatcaccagtttttgccaggctctcaccgaagtgcccttctgtgtcacacgggaaggtgcagcctctgggggacatgggtcaacagctgcccaggctgaaacccaagaaagtagccaactttttccagatcaaaatggaaatgcctacggacagtgggccckgcmygakggactcggatgaccccggagcaggagagtctggcgmccagaccacggaaaaggaagtcatctgcccctgggaaagcctggcggaagggaaggcgggctgagcagggccgtgcgccggaaagatggtcctggcagacaccatcagacctggggcacacttgctctcaaacccaagtgcattaggatgatattggagaactggaaaaaaacgaatggggtggagtccaatggaatgggcgtgtgctctggttgactcccaacggccaccttttccctttcactgcctttcccttgcttggccagacaggcatgtgggccagaagacgtcccttgctgccttaaaatcaataaaagggtcatctggaggmaaaaaaaaaaaaaaaa

SEQ ID NO: 2481 - DNA, 3883 bp, Rattus norvegicus
gcccctccgctcgccgctcgctgagctgttactccgagctacctgctggggaaattcacttcgacgtagcctggggtgtcttccaccagtcacagaatcagaaaagttgtcctctctaacaccaaagaggagatttcgctttctggggacaagttcaagacactgaagtgcaaggctgtggtaaattcctggaaagataaaatatgacaaaaagcaacggagaagagcccaggatgggaagcaggatggaaagattccagcaaggggtgcgcaagcggacgctcctggccaagaagaaagttcagaacatcaccaaggaggatgtgaagagctacctgtttcggaatgcctttgtgctactcaccgtcagcgctgtcattgtgggtacaatccttggatttgccctccgaccgtataaaatgagctaccgggaggtcaagtacttctcctttcctggggagcttctgatgcggatgctgcagatgttggtcttacccctgatcatctccagtcttgtcacaggaatggcggccctagatagtaaggcatctgggaagatggggatgcgagctgtggtctattacatgactaccaccatcattgctgtggtgatcggcataatcattgtcatcatcatccaccccggaaagggcacgaaagaaaacatgtacagagaaggtaaaatcgtgcaggtgactgccgcagatgccttcctggatttaatcaggaacatgttcccacccaatctggtagaagcctgctttaaacagtttaaaaccagctatgagaagagaagctttaaagtgcccatccaggccaacgaaacactgttgggcgccgtgatcaacaacgtgtcagaggccatggagactctgacccggatccgggaggagatggtacccgttcctgggtctgtgaatggggtcaatgccsyrrgcytmgttgtcttctccatgtgcttcggcttcgtgatcggaaacatgaaggagcaggggcaagcgctaagagagttcttcgactctctcaatgaagccatcatgagattggtagcggtgataatgtggtatgcacctctgggcatcctcttcttgatcgcagggaagattsttgagatggaagatatgggtgtgattggggggcagcttgccatgtatacagtgacagtcatcgtcggcctcctcattcatgccgtcatcgtcctgcctctcctctacttcctggtaacccggaagaacccctgggttttcattggagggttgctgcaagcactcatcacagccctggggacctcctcaagttctgccaccctgcccatcactttcaagtgcctggaagaaaacaatggtgtggacaaacgcatcaccagatttgtgcttcccgtgggggccaccattaacatggatgggaccgccctctacgaggctttggccgccattttcatcgctcaagttaacaactttgacctgaattttggacagattataacaataagtatcacagccacagccgcaagcattggggcagctggcattcctcaggccggtctagtcaccatggtcatcgtgctgacatctgtgggcctgcccacggatgacatcacactcatcattgcagtggactggtttctggaccgcctccgaaccaccaccaacgtgctgggtgactccctcggggccgggattgttgaacacttgtcccgacatgaactgaagaaccgagatgttgaaatggggaactccgtgattgaggagaatgaaatgaaaaagccgtatcagctgattgcccaggacaatgaaccagagaaacccgtggcagacagcgaaaccaagatgtagactaacacagaagtgctttcttaagcaccaggtgttggaaactgttctacaatgtgtccatctcccagagctctctctcccagtgagctcctctttcctccctactctgataggattggaaaatgtccaaaaacaaaggagggctctgcagcagccaaaacgtattggttttagccctcatttgaaaattttaaatcatttcgtattattcttaccaagtaagttactacaaacattaccaatttagatgacaaatgatcccttgtgattgttttgtaagtaaaagcattaagcaaatgataggctacaaaaacattttaaaaccaactttcaaaatgtaaaaatccttcagaacactactgagttttagtcttaaaacatagcaacttgatgagcaattatcagttacccgttgggtagctgagaggtttgccctttcttctgactctcatcctgactttatcagcatcagggcaatgcccacatgcacacagcacagccgtgaggtggagcagaaagtgaggctccccaatggtcttgagtgagccttgtctcatccctgggcctcagtgttctcatgcagaaaatgagtgacccctagataccataggcctctctagcccagacttttacaacatcaggaaggaccctgcccctgtataacatgaggatttcagacaggacacttaatgggagtggacatttctctctaggggcaggctgcgtgtggctcactagatcctgggtccagaatgtgggttatataagtagacaggtggaaggccatcccgggagaccatccccttggcctgttgttctgttttatcttgttttgttttccaacattaaaagaagcactcccttcttgggtactcttcccaaacccaagggaagaaagcctcccaccacctcttcgactgacagtgagatgtttaggaaacaaggagaagactagcagctagcaagtgtgtccatggtcttactacggaacacaaaagagcagaggcggaatagagtacagcccacattacaaaggaggattctttttaagatcagaaaaagttggttttctttaaagactaaaagagagctgaaccttggccttcttctgctggcctaaacgctttgtcttctgttcctaatcaatccccaaagaaacaacacataacatcactcctttcttatttcacagtccagcaaatgatatctctggaacagattcatatctataagctgggtggatggtctcatttccaaaaaaaaaagtttaaaatttggttagtttttcctattttaactggaagttcttaggatgacaaaaccacatactcctttgtacagagatgtctcttgacaaatcattcaagactctcatctagaatggagtttgcttgtgtccctgtctccccctccctaaatgcagatgaatcagcatgaaaataacatcaacgagggtggaagaaaagagggcaaaggaattgttttcaggcgaggcagctcccaggttgaaaagagatttttttacttccttaggaatatccaatcaaagatactcaatgggagccctytgacagtaccagctgtgtttctttctgagagaaaatgctgagtggacaccattatgctaacagactgaagrtctagactcsttgtgtctcccgatctactgtagagatactttctagagattctgagcgttacmkgcskataaaggttaacactaggctacagtggaatagtcatttaatggcaggctcaatttgggaagtacactacagaggttaacctatgtggcagtcgttttgcgacgctagtagaacaaacttaaccgcgtcaaattaacgctgtttacccagtgtgaycatattttttatactaaccgtttcttacgaaaacyggtcctctagggtgatcctttagscagcccatcacaggctscgcagatgtgtgwacccactgtggactgggaaacatcactttgtagatgtattttcaataaagaaaagatagttttacatgaaaaaaaaaaaaaaaaaaccctygtgccg

SEQ ID NO: 2482 - DNA, 4105 bp, Rattus norvegicus
cggccgcrcgcaccckcccggwgatgakgcgtcgattagcaaggtaaaggtaacagaaccatggctcagtttccgacaccttttggtgggagcctggacatctgggccataaccgtggaggaaagagccaagcatgaccarcagttccagagtttgaagccgatatctggattcatcactggtgatcaagcaaggaacttctttttccaatctgggttacctsagcccstcttrscrcaaatatgggcgctggctgacatgaataaggacggaaggatggatcaggtggagttttccatagccatgaagctcatcaaactgaagctgcaaggatatcagctcccccccgcacttccccctgtcatgaagcagcagccagcggccatctctagtgcaccagcgtttggtataggagggatggctggaatgccaccactgacagctgttgctcccgtgccaatgggctccatcccagttgttggaatgtctccgcccttagtatcttctgtccctcaagcagcagtgcctcccctggctaacggggcccctcctgtcatacagcctctgcctgcatttgctcatcctgcagccacattgccaaagagttcttccttcagcagatctggtccagggtcacaattaaacactaaactacagaaggcacaatcatttgatgtagccagcgcccctgcagcggcagaatgggctgtgcctcagtcgtcaagactgaaatacaggcagttattcaacagtcacgacaagaccatgagtggacacttaacaggtccccaggcaagaactattctcatgcaatcaagtttaccccaggctcagctggcttcaatctggaatctttccgacattgatcaagatggaaagctcaccgcagaagaattcatcctagcgatgcacctgattgatgttgctatgtctggtcagccactgccgcctgtcctgcctccagaatacatccctccttcctttagaagagttcgctctggcagtgggatgtccgtcataagctcttcgtctgcagaccagcggctgcccgaggagccatcgtcagaggatgagcagcaggtggaaaagaagctgcctgtgacatttgaagataagaagcgggagaacttcgagcgaggcaacctggagctggagaagcgcaggcaggccctcctggagcagcagcgcaaggagcaggagcggctggctcagctggagcgcgccgagcaagagaggaaagagcgggagcgccaggaacaggagcgcaagagacagctagagctggagaagcagctagaaaagcagcgggagctggagaggcagagagaggaggagagaaggaaggagatcgagaggcgggaggcagcaaaacgggagctcgaacggcagcgacagcttgaatgggaacggaaccggagacaggaactcctgactcagaggaacaaggaccaggagggcatcgtggttctgaaggcgaggaggaagactctggagtttgaattagaagctctgaatgacaaaaagcatcagctggaaggaaaacttcaggatatcaggtgtcgactggcaacccagaggcaagaaattgagagcacaaacaagtctagagagctgagaattgcggaaatcacccacttacagcaacagttgcaggaatctcagcagatgcttggaagacttattccagagaagcagatactcagtgaccagttaaaacaagtccagcagaacagcttgcatagagattcgcttcttaccctcaaaagagccttggaagcaaaggaactggcccggcagcagcttcgagagcagctggacgaggtggagaaagagaccaggtcaaagctgcaggagattgatgttttcaacaaccagctgaaggaactgagagagatacacagtaaacagcagctccagaagcagaggtccatcgaggcggagaggctaaagcagaaagagcaggagaggaagagcctggagttggagaagcaaaaggaagaaggtcagagacgagttcaggaaagggacaagcaatggcaggagcatgtccagcaggaggagcagcagcgccctcggaaaccccacgaggaggacaaactgaaaagggaagacagtgtcaagaagaaggaggcggaagagagagccaagccggaagtgcaagacaagcagagtcggcttttccatccacatcaagagccagctaagccggcgcaggcaccctggcccacgacagagaaaggtccgcttacaatctctgcacaggagagtgccaaagtggtgtattaccgagcgctgtacccctttgagtccagaagtcatgacgagatcaccatccagccaggagatatagtcatggttaaaggggaatgggtggatgaaagccagaccggagagccaggatggcttggaggagaaccgaaggggaagacaggatggttccctgcaaactatgcagagaagattccagaaaatgagattcccactccagccaaaccagtgaccgatctgacatctgcccctgcccccaaactggctctgcgtgagacccctgctcctttgccagtgacctcttctgagccctccacaacccccaacaactgggcagacttcagttccacgtggcccagcagcacaaatgagaaaccagaaacggacaactgggacacgtgggcggctcagccttctctgactgtacccagtgctggccagttaaggcagaggtcggccttcacaccagccacagccactggctcctccccttctcccgtcctgggccagggtgaaaaggtggaagggctccaagcacaagccctgtatccctggagagccaaaaaagacaaccacttaaattttaacaaaagtgatgtcatcaccgttctggaacagcaagacatgtggtggtttggagaagttcaaggtcagaagggttggttccccaagtcttacgtgaaactcatttcagggcccgtaaggaaatccacaagcatcgatactggccctacggaagctccctctagtctaaagagagtggcttccccagccgccaagccagccattcctggagaagaatttgttgctatgtacacttacgagagttctgagcatggagatttaacctttcagcaagggcatgtgattgtggttaccaagaaggatggtgactggtggacgggcacagtgggcgagacgtccggagtcttcccttctaactatgtgaggcttaaagactcagagggctctggaactgcggggaaaacagggagtttagaaaaaaaacctgaaatcgcccaggtcattgcttcctacactgctacgggtcctgaacagctcaccctggctcctggtcagctgattttgatccgaaaaaagaaccccggtggatggtgggaaggagaactacaagctcgagggaaaaagcgccagatagggtggttcccagcaaattatgtcaaacttctaagccctggaacaagcaaaatcaccccaactgagctacccaagaccgcagtgcagccagcagtgtgccaggtgatcgggatgtacgattacaccgcgcagaatgacgatgagctagccttcagcaaaggccagatcatcaacgtcctcagcaaggaggacccggactggtggaaaggagaagtcagtgggcaggttgggctcttcccgtccaattatgtgaagctgaccacagacatggaccccagccagcaatgaatcatatgttgtccatcccccctcaggcttgaaagccctcaaagagacccactatcccatatcactgcccagagggatgatgggagatgcagccttgatcatgtgacttgcagcatgatcacctactgccttctgagtagaagaactcactgcagagcagtttacctcatttgaccttagttgcatgtgatcgaaatgtctgagtcctgcgtgcagaggcagaagcaaattgcagaactgcacagggtggtgggtccttttgtgctttcctagtcactcagactgacggccccgccttcaswcwgagygactwksaaagyywyaarakkayttttaaatgtgtattttagccttttaataaaaatcaatcaattaaaaaaaaaaaaaaaaa

SEQ ID NO: 2483 - DNA, 3753 bp, Rattus norvegicus
atgcctcacttcaccgtggtgccggtggacgggccgcgacgcggcgactatgacaacctcgaggggctcagttgggtggactacggggagcgcgccgagcgggaagactcggatggacagggtaaccacagagagaatagtcccttccttagccctttggacgcctccagaggaaatgactactatgaccggaacctggcactgtttgaggaggagctggacatccgcccaaaggtatcatctctcctgggcaagcttgtcagctataccaacctcacccaaggagccaaggagcacgaggaagctgagagtggagaaggtggccgtcggagagccgccaaggcacccagcatgggcacccttatgggagtgtacctgccctgcctgcagaatatcttcggggtcatcctcttcctgcggctgacctggatggtgggcacagctggcgtgctgcaggctctcctcattgtcctcatctgttgctgctgtaccctgctgacagccatctccatgagtgccatcgccaccaatggtgtggttccagctggtggctcttacttcatgatttcccgctctttgggaccagaattcggaggtgctgtgggcctatgcttctacctggggaccacatttgcagcagccatgtatatcctaggagccattgagatcttgctgacctacattgctccaccagctgccatcttttacccatcgggcacacacgacatgtcaagcgccaccttgaataacatgcgggtgtacggaaccattttcctgactttcatgaccctagtggtgtttgtcggtgtcaagtatgtgaacaagttcgcctcactcttcctggcctgtgtgatcatctccatcctctccatttacgtgggaggcatcaagtccgcttttgaccctcctgtttttccggtgtgcatgctgggcaataggactctgtctcgggaccagtttgacatctgtgccaagacagttgtggtggacaatgagacagtggccacccggctgtggactttcttctgccacagccccaaccttactgctgactcctgtgacccctacttcctgctcaacaatgtgacagagattcctggcatacctggggcagctgctggtgtgctccaggaaaacctgtggagtgcttacctggagaagggtgaggttgtggagaagcatgggctgccctccacagatacccttggcctgaaggagagcctgtccctgtatgtggtggccgacatcgccacatccttcaccgtgctggttggcatctttttcccttctgtaacaggcatcatggctggctcaaaccgttccggggacctccgtgatgctcagaagtctatccctgtggggaccattctggctattgtcaccacttcactcgtgtacttcagcagtgtgattctcttcggtgcctgcatcgagggtgtggtgctccgggacaagtacggtgatggcgtcagcaggaacctggtggtaggcaccttggcctggccttcaccttgggtcatcgtggtcggctccttcttctcaacatgtggtgccggcctccaaagtctcactggggcgccacgtttactgcaagccattgccaaggataacatcatccccttcctccgggtgtttggccacgggaaagccaatggtgagccaacgtgggccctcctcctgacagcgctcatcgctgagctgggcatcctcatcgcctcccttgacatggtggcccccattctttccatgttctttctgatgtgttacctctttgtaaacttggcctgtgctgtgcagacacttctgaggacccccaactggcggccccggttcaagtactatcactgggcgttgtctttcctgggcatgagtctgtgcctggctctcatgtttgtctcctcctggtactacgccctagtggccatggtcatcgcaggcatgatctacaagtacatcgagtaccaaggggctgagaaggagtggggtgatgggatccgaggcctgtccctgagtgccgcacgatatgcactgctgagactagaggaagggcctcctcacacgaagaactggcggcctcagctcctggtgctgctgaagttagacgaagatcttcatgtgaagtaccctcggctcctcacctttgcctcccaacttaaggctgggaaaggcctgacaatcgttggctctgtcatccagggcagctttctggagagctatggggaagcccaggctgctgagcagacaatcaagaacatgatggagattgagaaagtaaaaggcttctgccaggtagtggtggccagcaaggttcgagaggggctggcccacctcatccagtcttgcggcctgggtggcatgagacataactccgtggtgctgggctggccctatggctggcgacagagtgaggacccacgtgcctggaagacctttatcgacactgtgcgytgcaccacagctgcccacctggccctgytggtgccaaagaacatagctttytaccccagcaaccacgagcgytacytggagggccacattgatgtgtggtggatcgtgcatgacggaggcatgctgatgctgctgcccttcctgctgcgccagcataaggtttggaagaagtgccggatgcgcattttcaccgtggcccagatkgaykamrwyagcatmmagatgaakawsgwtckgrccawmwwmmwrwawmamctccgcctggaagctgaagtggaggtggtagagatgcacaacagtgacatctcggcctacacctacgagcggacactgatgatggagcagcggtctcaaatgctgcgacagatgargctgaccaaaacagarcgggatcgarargcccagctggtgaaggacaggcactcsgstctgargctarararcctctactccgacrargargatgagtctgtgacaggcgctgacaagatccagatgacatggaccagagacaagtacatggctgaaccctgggaccccagccatgcccctgacaacttccgggagctggtgcacattaagccggaccagtccaatgtgcggcgtatgcacactgctgtgaagctcaatgaagtcattgtcacacgctcccatgatgcccgcctggtcctactgaacatgcccggcccccctaagaacagtgagggtgatgagaactacatggaattccwygargtcctaaccgagggccttgaacgggtgttgttggtgcgtggtggtggccgggaagtcatcaccatctattcttgrgcmcgakggagtcttgtggcctggagttgggttgtytaagacaacagtgcccasccttgcacctamttgccagttytgccttgcccasccttgytttggamtagctttgytagktytccagggaaaccaagcttgggccttgcaatgggaatggatccgagggcccacgggacctggaggatttagggactttcccytcccatactccaagggaggcctctcctgactcgagatgaytggtgagggctgatgtgggatttgaagtcccagactggctcacaagtgctatttattgtatatttattgtgtggatgtcatcatttcagaaaggggggrgacaataaaagggggagccgagytgggcctrtytgcaggaagatytggctcaggctgctgtgggcagcatcaagccaagtggaatggagctggccaagctgagcctgacttttttcaataaaacmtygtgymcttytgrrmmmaaaaaaaaaaaaaaaa

SEQ ID NO: 2484 - DNA, 3502 bp, Rattus norvegicus
agcacagcggcttggacccctgcagcctaagagcactggaggctattcctgcaatcagcagagtcctgagtctggcgagtctgggtgatcctagaactcagtgaactccaacttggagtgaccctttagggcaggctataagtctgggtccttggtgcacggtgacactgctgtgaaaccaccccaatccgctctccgggtttacgccggtcccgggcgcatacgggcaggaggccgggagcttggagcaggaggagcagcccggggcgggctgccagggcgagcaagcgagcgaggcgggggcggcgggtgcagaactgcgggcggcggcgcccgcgggtcactctcaggccgggcagcagcgacagggcgcagggtggtggggcgcaccatgcccacgttcgaccaggcgctgaggaaggcgggcgagttcgggcgcttccagcggcgcgtgttcctgctgctgtgcctgacgggtgtcaccttcgccttcctcttcgttggtgtggtcttcctgggcagccagcccgactactattggtgtcgcgggccccgcgccaccgcgctggccgagcgctgcgcctggagccctgaggaggagtggaacctcaccacgccggagcttcacgtcccagctgagcgccgtggccaaggccactgtcaccgctacctgctggaagacaccaataccagctcagagctcagctgcgacccactcgctgccttccccaaccgctccgctcctctggtgccctgcagcggcgactggcgctatgtggagacccactccaccatcgtcagccagtttgaccttgtctgcggcaacgcctggatgttggacctcacccaagccatcttgaaccttggcttcctggctggggcttttaccttgggctatgcagcggacagatacggcaggctcatcgtttacttaatatcctgtttcggcgttggcatcacgggagttgtggtggcgtttgcaccgaatttttctgtgtttgtgatcttccgcttcctgcaaggggtgtttggaaagggggcctggatgacttgctttgtgattgtgacagaaatagttggttcgaaacagaggaggattgtgggaatagtgatccagatgttcttcaccctcggaatcatcattctgcccggaattgcctacttcacccccagctggcagggcatccagctagccatatcgctgcctagctttctcttcctcctttattactgggtggtccctgagtctccccgctggctgatcacccggaagcagggagagaaagccttgcagatcctgaggcgtgtggctaagtgcaatgggaaacacctctcgtcaaattactcagagatcacagttacagatgaagaggtcagtaacccatcctgtttagaccttgtgaggactccccaaatgaggaagtgcacactcattctcatgtttgcttggttcacaagtgccgtggtgtatcaaggacttgtcatgcgcctgggactcatcggaggcaacctctacatggacttctttatctcggggctcgtggagctgcccggagctctcttgatccttctgaccattgagcgccttggacgacgccttccctttgccgcaagcaatatagtggcaggggtgtcgtgtctggtcactgcctttttaccagaagggataccgtggctgaggaccacagtcgctaccttgggaagactaggaataaccatggcctttgaaattgtttatttggtaaattcagagttgtacccaacgacattacggaactttggggtttcactctgctcaggcctgtgtgactttggggggatcatagccccatttctgctctttcgactagcagccatatggctagaactgcctctgatcatctttgggatcctggcatctgtctgtggtggccttgtgatgcttttgcctgaaactaagggcatcgccttgccggagacggtggaagatgtggaaaagcttggcagttcacagttgcaccagtgtggcagaaaaaagaaaacccaggtttctacttctaatgtctgaggcccctgagtctgcctggaagaccacagaagctgagcttggaatatgccttgcagtgtgcttcacctcctctaggtggcgccgttccaaggaaccgtaaagattccagagtattttatatggaataagataaagatttatcatgctacccaagcttctgggaacacataacctttgacctctttagcaaagatccagtaggtacacagattctgcctaggttctctttcattgggaccaatgtctctgacccactggggaggagatatgagaaggtcccaaccagttctccagttctcaggacagtcccatccaggaagcaggatgaacatatcaaggcctggcagtgaacggaagtgtactcagctgatctgatcaagactgagcagtgaggagtgttctgaagagtctgagaactgctatttctgattcgcttaagctccgaatacatgccttcagagagccgacatgcctggtgcccctccccttctgtccccaaagccactgaggttccaggccccaggttaggcacagttccctaaatgcaacacatccaaggacccagctacattattgtgaaatcacactgcagtccccacaccccaatattttgtctcctccttcagtggaccgctataatcacagattcttaattgaggaagaaaaaaaaaacatggattttgatttcccgggccttagaatttgaaaaataaaggggtaattatgtcatatttgtgaattccgtttcagtggtgcctgtggctgagagtccaaagaatagactttcttcatgccatctgggcacttccgacttatcttgggagaaaaacaaaacaccraaaacaaatacaaatacagttgttgtcacttcatgataaaagtcaattgtattcatactttaaaggattggcgacccatttataagggatgtaggagatactaatgagggactgaattttttttttattagatcaagactcctcaagcaaagactcaaatgtmamcacrgtattctacgtggkgtgcagttcttgataaattttcsgactcagtgtgtatgttagactgaaagtttcttaaacttcaaactcagtgtggacaggcaaaagtmgcctcaaagggaaaccttaccgatgtggaagaaagaaatgcatatgtggagaacataagacatgtgtgccaccccagagaagatgtgcgtgtgactgtaaaacatcgtttcaccctgacgcatgtgagaaccgaatgtgagtgttcagactcytgacagccttttgggtattcattgccacacccactgtgcgtgcccggcatctgtggcctggttccctgtgtgtttcatggctgtagcgcggctcttgtccactctgctgcctttggattgcatttcaagttggaagttctgtttcataacaataaacaatttttaaactgttwwwaaaaaaaaaaaaaaaa

SEQ ID NO: 2485 - DNA, 1577 bp, Rattus norvegicus
ggtccgggatgagcctcattcggaaaaggggcttctacaagcaggacatcaacaagactgcctgggagctgcccaagacctacctggcgcccgcgcacgtcggcagcggggcctatggcgcggtgtgctcggccatcgacaagcggacaggggagaaggtggccatcaagaagctgagccggcccttccagtcggagatctttgccaagcgcgcttaccgcgaactcctgctgttgaagcacatgcaccatgagaacgtcattgggcttctggatgtctacacacctgccacttccgttcgaaacttccaagatttctacctggtgatgcctttcatgcagaccgacctgcagaagataatggggatggagttcagtgaggagaaggtccagtatttggtgtaccagatgctcaaaggtctaaagtacatccactcagctggtatcgttcacagggacctgaagccaggcaacctggccgtgaatgaagactgtgagctgaagatcctggactttgggctggcacgccacacggatgcggagatgactggctatgtggtgacccgctggtaccgggctcctgaggtgatcctcagctggatgcattacaaccagacggtggatatctggtctgttggctgcatcatggccgagatgctaaccggaaagacactcttcaagggtaaggactacctggaccagctgacccagatcctgaaagtgactggggtgccaggtgccgagttcgtgcagaagctgaaagacaaggcggccaaatcctacattcagtccctgccccagagccccaagaaggatttcacacagcttttcccacgcgccagcccgcaagctgtagacctgctggacaagatgctggagctggacgtggacaagcgtctgaccgctgctcaggcactcgctcaccccctctttgaacccctccgggaccctgaggaggagacagaggcccagcagccatttgatgatgccttagagcgggagaatctcagcgtggacgaatggaaacaacacatctacaaagagatcgccaacttcagtcccatagcccggaaggactcgaggcgacgaagtgggatgaagctgcagtgactgcccgatctaacctgcggctgagcccgagactgtgacagggccaaactctccctcaggaccaatattattttgtcactacttctatctcagggtttataggaatgtagtgtcctgagccgagggaagaatcttccgatggcctaaggttcaggcctgagggagaattccagcctgctgtttggggggtgggggtggtgtgtattaaaacaaacatgtgggtgattgcctggctgtggggtcccttccttcctggagggttgggaccaaggatatgtcagtcaggctgagggccttatagggaatgactagggtctgcttctggggtgggggggggaggtgcagcacagaccaggatgagggcttaaagagatgactgccttttacctttttggaggtcagaataaatatattcacatgtagcccaggctgtcctccatgtagccaaaaaaaaaaaaaaaaaaaaaa

SEQ ID NO: 2486 - DNA, 2453 bp, Rattus norvegicus
actgttggctaagccggtctcactgctcctttagtctctttggacactttccaaatatcggggcgatgaccgtcaaaaccgaggctgctcgaagtaccctcacctactccagaatgaggggaatggtagcaatcctcatcgctttcatgaaacagagaaggatgggcctgaacgattttattcagaagcttgccaacaactcctatgcatgcaaacaccctgaagttcaatcctatttgaaaatctcccaacctcaggagcccgaacttatgaacgccaacccctcacctcctccaagtccctctcaacaaatcaacctgggtccatcctcaaatccccacgccaaaccctctgacttccacttcttgaaagtgatcggaaaaggcagttttggaaaggttcttctagcaaggcacaaggcagaagaagcattctatgccgtcaaagttttgcagaagaaagccatcttgaagaagaaggaggagaagcatattatgtcagagcgcaatgttctgttgaagaatgtgaagcaccctttcctggtgggccttcacttctctttccagactgctgacaaactctacttcgtcctagactacattaatggcggagagctgttctaccatctccagagggagcgctgcttcctggaaccccgtgctcgcttctacgcagctgaaatagccagtgccttgggttatctgcactccctaaacatcgtttatcgagacttaaaaccagagaatattctcctagactcacagggacacatcgtcctcactgactttgggctctgcaaggagaacatcgagcacaatgggacaacgtccaccttctgtggcacgcctgagtatctcgctcctgaggttctccataagcagccgtacgaccggacagtggactggtggtgcctcggggctgtcttgtatgagatgctctatggcctgcctccgttctacagccggaacacagccgagatgtatgacaatattctgaacaagcctctccagctgaaaaatatcaccaactcagcaaggcacctgctggagggcctcctgcagaaggaccggaccaagaggctgggtgccaaggatgactttatggagattaagagtcatattttcttstctttgattaactgggatgatctcattaataagaagatcacgcccccatttaacccaaatgtgagcgggcccagtgaccttcggcactttgatcccgagtttactgaggagccggtccccagctccatcgggcgatcccctgacagcatccttgtcacagccagtgtgaaagaagccgcggaagccttccttggcttctcctatgcccctcctatggactccttcctctgaaagctcccaggatggttccgaaggatttcctcagcgtttttctaaagtgttttagttagcctttggtggagtyacsagctgacagaacatcttagaagagaaatttgcacaccaggaagcttggcagtcccgcctgccgggssctgcacgcggcttgttgacgcggaagctttycggragctttccgaagagcacatcctcctctcagtgagctagtgaggkcttcatttcttttyttccttycmacgtggtgctagctctwaaggagcttgagagtgccgcctgagacgcaccttggtctcagtgagaaggaagatgcaggtctaagagggatctccgcaggtctgagctgtgatcaagaatattctgcaatgtgccttttctgagattgtgttagctccaaagcttttcctatcgcagagtgtccagtttttgtttgtttttttttttttgttttgttttttgtttcttttttttcccaacccttgcgtatttcccatgtgtgcagttagtgtgagtgctatgcctgatcacagacagttttgttgtaagcatcaatgtgacacttgcaggacactacaatgtgggacattgtttgtttcttccacatttggaagataaatttatgcgcagactgtttttttttgtaagatataataactaaaacctattgaaacggtcttgcagtgacgagmatccagatgcttgagggaagcattgctgctacaaatatttckatttttagaaagggtttttatggrccaatgccccagttgtcagtcagagccgttggtgttcaygttaaaatgtcacytgcaaaatgggcattawttatggttccccmcaacctttgttcattttctyttgcattcytrattattgtgtgtaaagawagtctgtacattgggttataacwctagatatttaaacttacaggcttatttgtaaaccatcatkttaatgtcctgtaattaacatggttataacatgtacactccccchtactcaccacacaactttttttgtgtgcggtkaaaccaattttggtttgcaataaaatcttgmmwvstrwwwrmrmaamaaaaawaaaaaaaa

SEQ ID NO: 2487 - DNA, 647 bp, Rattus norvegicus
gcttgggtcaagcttgaacttggttaccgccttctgttttcgctctgccttaaaacaggggcaaggatcctccaccccgaggtaacagaccctgtgggcccgtcgctttcccgcagaacatgagactgcctagaggagtaggggacgcggcagagctgcgcaagagcctgaagccactgctggagaagcgccggcgcgcgcggatcaatgagagcctgagccagctaaagggtctagtattgccgctgctaggagcagagacttcccgctattcgaagttggagaaggcggacatcctggaaatgactgtgcgcttcctacgggagcagcctgcgtcagtatgttccacggaagcacctgggtctttggatagctacctcgagggttaccgagcctgtctggcgcgcctggcccgcgtgctgcccgcctgcagcgtcctggagccggccgtgagcgcgcgcctgctagagcacctgcgacagaggactgtcagtggcggcccgccctcactgaccccagcatccgcttcagctccagcaccctctcctccggtgcctcctccaagcagccttggactttggaggccatggtaggttcctggatgttccacaggatcctgctgctggctgtcaagggacctagctgac

SEQ ID NO: 2488 - DNA, 1587 bp, Rattus norvegicus
cacgaggctggtactgmtkrtmctgmtkmtsctgctgctgctgctgctgctgctgttgcygctgctgctgtttccagcactccccctacacaatgctgcctgctgccctaacctccctgctggggccattccttctagcctgggtgctgcctcttgcccgaggccagacccccaactacacgagaccagtgttcctgtgtggaggggatgksacmggggagtcgggttacgtggcaagtgagggtttccccaacctctaccccccaaacaagaagtgcatctggacaataacggtgyctgagggycagactgtgtccctgtccttccgagtctttgatatggaactccacccttcctgccgctatgatgctctggaggtctttgctggatccgggacctcaggccagcgacttggacgcttctgtggcaccttcaggcctgcgcctgtagttgcacctggcaaccaagtgactttmmggatgacaactgacgagggcactgggggacgaggattcctgctctggtacakcggtcgggccacctcaggcactgagcaccagttttgcggggggcggatggagaaggcgcagggaaccctgaccacgcccaactggcctgagtcggattaccccccaggcatcagctgttcctggcacatcattgcaccctcaaaccaggtgatcatgctaaccttcgggaagtttgatgtggagcctgacacatactgccgatatgactctgtcagtgtgttcaatggagctgtgagtgacgactcaaagaggctggggaaattttgcggagacaaggcccctagccccatctcttccgaagggaatgagctcctggtccagtttgtatcagatctcagtgtcactgccgatggcttctcagcctcctacaggaccctgccacgggatgccgtggaaaaggagtcagccccaagtccaggggaggatgcacagcatggtccccagtcccgctctgaccctaagacaggaactggscccaaagtcaaaccacccagtaagcctaaagtccagcctgtagagaaacctgagggctctcctgctacccaggcaactccagttgctccagatgcccccagcatcacttgcccaaagcagtacaagcggtcaggcaccttgcagagcaacttttgctccrktagcctggtggtgacaggaacagtgaaggccatggtccggggcccaggggagggcctcactgtcaccgtcagtctcctgggtgkctacrarrccggrgacctggmcctgccytctccagctagtggcacctctbtgaagttytatgtgccctgcaagcagatgccccccatgawgrmasgagscagttacctgctgrtgggtcaggtggaararaacagrggccccrtccttcctccggrragyttygtggtgstytacrggscsaaccaggrccagatcctgrgtaacctaagcaagagaaagtgcccctcccagcctaggccrratgcctgmtgtcctsgccagatcrgagtgtggtgcttttatccraataaatgtttyttgaytcmrraarraaaaararaaaaaaaaaaaaaaaaaa

SEQ ID NO: 2489 - DNA, 1713 bp, Rattus norvegicus
  misc_feature (1694)..(1694): n is a, c, g, or t
ggccccgctcctcgccctgcctaccgccggcatctaaacacaggtgggagtgggagatcccgacaggtgagccccgcgccccgcagccacaaggatggagttcgtgaagtgtctaggccacccggaggagttctacaacctgctgcgattccgcatgggaggccggcggaatttcatacccaagatggaccggaactcgctcagcaacagcttgaagacttgctataagtatcttgatcagaccagtcgcagcttcgccgcggttatccaggcgctggatggggacatacgtcatgcggtgtgtgtgttttacctgatcctccgagccatggacacagtggaggatgacatggccatcagtgtggagaagaagatcccactgctgcgaaactttcacactttcctctatgagccggagtggcggttcaccgagagcaaggagaagcaccgagtagtgctggaggacttccccacgatctccctggagtttagaaatttggctgagaaatatcaaacagtgatcgctgacatctgtcacaggatgggatgtgggatggcagaatttctaaacaaggatgtracctccaaacaggactgggacaagtactgtcactatgttgctggactggtgggaatcggcctttctcgcctattctctgcctcagagtttgaagatcccatagttggtgaagacacagagtgtgccaattctatgggtctgtttctgcagaaaacaaatwtcattcgtgattatctggaagaccaacaagaaggaagacagttttggcctcaagaggtatggggcaaatatgttaagaagctggaagactttgttaagccagmgaacgtagatgtggccgtgaagtgcttgaatgaactcataaccaacgccctacaacacatccctgacgtcatcacctacctgtcaaggctccggaaccaaagtgtgtttaacttctgtgccattccacaggtaatggccattgctacgctggctgcctgttacaataaccatcaggtattcaagggagtagtgaagattcgrarggggcaagcagttaccctcatgatggatgccaccaacatgccagctgtcaaagctatcatataccagtacatagaagagatttatcaccgggtccccaactcagacccgtcagctagcarggccaagcagctcatctccaacatcagkacgcagagccttcccaattgccagbtyatctccmgaagccrctaytcccccatttacctgtccttcatcaygcyytwggcwrcmswkmsctgrcagtacwtsascactctgtcmcaggtcacagaagactatgtccagagagaacactgactttgtttagstggaagcggaagtccacgtgaagtgggtttttyttcttcccccagmtggattttgacttcccttggtttttccttmtactctaatctttsggagaactgagtgtgsgacctttaggaactytgaaraggaaaggacgccttgccctmagcagcmtggtgcttcctggatgtggtccctgccthttgtagccamtggcatcatgttgwccgaagcmctggaaaggccacatgtgatcctagtgaacctggctagaatgctgattgaatctatttaatttgaaacagcctttgaatwcctwtcmcmgtrraaawwraarwramwrrwmmwmwmwttctcntcaaaaaaaaaaaaaaaaa

SEQ ID NO: 2490 - DNA, 5847 bp, Rattus norvegicus
cagcgcccaggaggaggaggcggagagtcgctcccgccggccgagcatggggcgcccggcgccgaggccgctgctgctggcgctcctatcgctggctgtctgccgcgggcgtgtggtgagagtccctgcgggcaccctggttcgagtggtgggcactgagctggtgatcccctgcaatgtcagtgactatgatggccccagtgagcaaaactttgactggagcttctcgtcttcgggaagcagctttgtggagctcgccagcacctgggaggtgggcttcccggcgcagcagtaccgtgagcggctgcagcggggcgacatcctgttgaggaggacagccaatgatgctgtggagctgcacataaagaatgtccagccctcggaccaaggccactacaagtgttcaactccaagcacagacgccaccgtccagggcaactatgaggacacaatgcaggttaaagtgctggcagatgccctggtggtgggccccagctcccggcctcctccaggcctgagcctgcgcgagggggagccctttgaacttcgatgtatcgcatctactacgtcaccgttgcacacacacctggcacttcggtgggaactgcaccgtggcccagtgcaccgaagcatcctagccctaagccacgagggcaggtttcacccaggacctggctatgaacagcgctaccacagtggggatgtacgcctggacacggtgggcagcgatgcctaccgcctctccgtagcccgggcactctctgcagaccagggttcctacagatgtgtggtcagtgagtggatcacagagcaaggcagctggcaagaaatccaagaaaaagctgtggaagtggccactgtggtgatccagccaacagctctgcaactggccgtgcccaggacagtgtctgtgaccgaaggaaaggacctggacctttcttgcaacatcacaacagaccgtgtggatgatgtccggcctgaggtgacatggtacttcaaaaagacacccgatacctctttgcttgcctcccatatgctggctcggctggaccgtgattccctggtacacagctcaccacacgttgctctcagccacgtggatacccgctcttaccatctactggtgcgagatgttagcaaagaaaactccggttactatctatgcctcgtggccctctgggctcctggacacaaccggagctggcacaaggtggcagaggccatgtctgccccatctggtgtaagcgtgacctggctagaaccagaataccaggtctacctgaatgcttctaaggtccccgggttttccgacgaccccacagaactgcaatgccgggtgatagacacgaagcgtgtggatgccggtgtccgacttactgtgtcgtggtactatagaatgaaccgtcgcaatgatgacgtggtggccagcgagcttctcgccgtcatggacggggactggactctgagatacggggagagaagcaaacagcgggcccaggacggcgagtttatcttttctaaggagcacacagacacattcagtttccggatccaaaggactacggaggaagacaggggcagttattactgtgttgtgtctgcctggaccaggcagaggaacagcagctgggtgaagagcaaagatgtcttctccaagcccgtcaacatattctgggcctcggaagattctgtgctcgtggtgaaggcacggcagccaaagcctttctttgctgcagggaatacatttgagatgacttgcaaagtgtcttccaagaatattaagtctccacgatactctgttctcatcacggctgagaagcctgttggggacctctccagtcccaatgaaaccaagtacatcatctccctggaccaggattccgtggtgaagctggagaactggaccgacgcatctcgggtggacggcgtcgtgttagagaaggttcaagaggatgagttccgataccgaatgtaccagactcaggtctccgatgcgggcctgtaccgctgcatggtgacagcctggtctcctatcgggggcagcttgtggcgagaggcagcgaccagtctttccaatcctattgagattgacttccaaacctcaggtcccatatttaacgcctctgtgcattcagacactctgtccgtcacccggggagatctcatcaagttgttctgtatcgtcactgtggacggagcagtgctggacccagatgacatggccttcgatgtatcctggtttgcagtacactcttttggcttggacaaggctcccakmmtyckrymckmsktggaccggaagggagtcgtgactacaggccagagggactggaagagtaccgtcagcctggagcgagtgagcgtgctggaatttttgctgcaagtgcatrgctmtgaggaccaggactttggcaactactattgttctgtgactccctgggtgaggtcaccaactggttcctggcagagggaagccgagatccactccaggcccatctttataactgtgaagatggatgtgctgaacgccttcaagtacccgctgctgatcggcgtgggcctgtccacagtcatcgggctcctgtcctgcctcattgggtactgcagttcccattggtgctgtaagaaggaggtgcgggagacgcgtcgggagcgccgcaggctcatgtccatggagatggattaagcagttggagggacagaggaacgttgtaggagcagtggggtggggggtgagaagaggactctgagattttacaaccgagtgtgttacactaaaaccggtcctctctaatctcarrwrrramwmarmrmwmtctcttttctgcatgtcaagttccgagcgcggacatgtttaccagcacacggctcttcttcccacggcactttctgatatgtaacaatcgagtgtgtgtctccccccccccgctgaagctgtttaatggttaacccccgtctaattagttttctcctagcagcttatcgatccwctgakkcacgtgtgttgatcacttttgatttaagggatcgmagtgaggaagggcgaaagcattcagagttggtcatcatgagtaagagggtacctgcccaccmgaaagccagcatccacaagcagccatctggagagctgctacctgctgctctctaccctggcccagaactgatagagacctgtgccaaggcaagctgtggctatgactaccctgcccatcccccattgtcaggagtttaaactatattggaacctaaactctataacttcttgaccccataagccttttgtttccctttctcctctaccctcttctgttttcgggtttgtttctgtgagagtgaggatatggcagccctggagtctagaatttggctttccaccaagcaccttatctcgccaccttagccttaagaatgagtatgaagaaaaatccaccaccacctctgtccagggcaggtctgtgaggagaggacactggggaaggaaaggcacagatgcttgcttacttgctcactctgtagttctgaggccgctgtgcctgctccaggaatcccagggtgagtgggagcagagggcatctgagttgtgccgctgagccaggtgccctgtcccttcatgagaggcactgtcccttgtacccccaggaccagcatgggagccacaaatgtgccacattgagctccttcccaggaaggcagattgctgcctgccagactgactgacttcaaggaatcagaaattgcctggagcaagcgtgtgttctctgtgacctttttcagtccttgaagtctttttaagatccccgcagggggtggtgaagaggggtatactttgtggacggtttgctttcctattagaaacacaaagggaacccagcaatttagtgttatgtgaatggcctgtaaaataggattgaaggcagccggctctgcctgactgggcccagcaggaataggacagagggcaggcacaccttccaggtcaccagtgcctgctccatcagggcctcagccatgcaaagtctctcgccctagcatagccttccaggagcctccgataggtactgaggctcatcagccacccggtaccctcaccctaccctctacctctgaaggatttaacattgttgtcttccaaaggggagtgggggaggagagctcctttctcttaagcaataaagtaataagaaaagatggccattcacgggcagctctagtcaccatgggaccggatgcgctgagctcccccctccccaccttctctccatgtggcccatggtggcttttgtatttgccacccagtttccwctgmkkgtttcgagcccaccttggagactgctcttatgatgagattctgagccggtggctctagcccaggtggggggtacaggtttagagtcggtagcaagaagagggacagcaggtgcaccccacacaagcaagagaggccagagaaagaggggaggcttcggaagacatggctgttctacatgtcgctctcttattgctagctcagacgtgaggcacaggtgactgtacaaacaggaattaggggagtagaaccaagtattaggaacttcaagcctgtgccattactggagaagattcagggcctttgcagtgcagccctccttaggaggacragagagatttagccttggatgagttgaggtgagccctagctgtacatgaacccacagaggtccaagcgggtaactgatggtgagagatgagtgatcggtcctaccttcccctttcccttttgtctgatgttgagatttgaacctgagttgtggaggtcatgcccaaacccctccatgttgcttagggctggaagagggaccagaaaccccaggacytagttccttttgggaatattggcattctggggtrtgtgtctttttaagtgtggtcaaacactcttgatgtaccaaatagtgttccccgtgaagcgctcttcytgaggctcccacccagcaacactggtctgagggaaggaaaggccaaaccaggcctgggcacatgaaattgcacttcttaaagagaaactttttagaaggttgggtattttyyttaatcacaaaaatctcccactgaaagaacctaagctacattcagatcgargcctctaaattaaattgtttactttacaatgtttacacacatgactcacttttttagaaaaataagaaaactgcaaactccggctttttaamaamwwwwmarhwwwttcatgcatgggataratatgctggcaacctgactcaccagctggatcaaatcctcatttagaaatgtcccgatatgtggatatatgtgtcttcccccmtcccaaccacacagctccctcmtgcccagacctctgwctgtttctctggtggcttttgcctcctgctttgcagaccgcctgcagccatgattttgttacggcatccasgagccaaagaytgcgccttggragcaggrdyrrtaagcarkrstayacywykygvtackgtcgggggyctttttctywttyttttyttttttagcttcactgatggcaacagaggawgaaaggaattgaggtttaggcaagttctcttcccctgtgtgaccagattctcggtgacacacagttgtgcagwwcastaggagaacaaggttgkrttttmtkttctrgtgtgtaacacaaggatctgcaggattttccgtagacaaagaggtctcgtgtatttttgtccmtakccaaggttatacaaactaattgtgttgttttrwactgtggccacammtrtkmygcaatgcaccatttgtttttgtttttattttattaaaggaaatttaatttaaawmaraaaaaaaaaaaaaaaa

SEQ ID NO: 2491 - DNA, 3512 bp, Rattus norvegicus
gaagtgaagttgctgtcagtggcgcctccggctcccggggaagctgagagtttccgcaggtggcggctgcggcggcggcggcagcggtagcaactgcaacagtagcaacgaaggctgtgggtctgcagctgtgttcccagtcgacattgctcacggtgaaggtgacatctccctccagtttcacaaaatgagtgtggtatggttacgaagaccaggacctaaacttcacagagagcccagcctgctgttctgatgccgaaagggagacagaaagtcccacgcttggatgcccgcctgggcctgcctatctgcctctgtctggaattagccatcttctttctggttccccaggtcatgggcctaacagaggcaggtggtcttgacaccttgggtgcaggggggctaagctgggctgtacatctggacagcctagaaggtgagaggaaggaagagagtctgatacaacaggcaaatgctgtggcccaggcagcggggctggtgaatgctgggcgcattggagagctccaggggcactacctctttgtccagccagctgggcacgggcaagccatggaggcggaggccatgcggcaacaggcagaggctgtgttagccaagcatgaagctgtgcgctggcactcagagcagaggctgctgaagagggccaagcgcagcatccacttcaatgatcccaagtatcctcaacagtggcacctgaataatcggcggagcccaggaagagacatcaatgtgacaggtgtgtgggagagaaatgtaactgggcgaggggtgacggtggtagtggtggacgacggagtggagcacaccgtccaggacattgcacccaactatagcccagagggaagctatgacctcaactctaatgacccagatcctatgccccaccctgatgaggagaacggtaaccaccatgggacccggtgtgcaggagaaattgcagctgtgcccaacaacagcttctgtgcagtaggtgtggcctatgggagccgaatagcaggtatccgggtgctggatggaccactcacagacagtatggaagctgtggcattcaacaaacactatcagatcaatgacatctacagctgcagctggggccccgatgatgatgggaagacagtggatggtcctcatcagcttgggaaggctgccttacaacatggagtgatggctggtcgccaaggctttggaagtatctttgtggttgccagtggtaatggtggccagcacaatgacaactgcaactatgatggctatgccaactccatctacactgtcaccataggagctgtggatgaggagggacggatgcctttttatgcagaggagtgtgcctccatgctggcagtcaccttcagtggaggagacaagatgctgcggagcattgtgactactgactgggaccttcagaagggcactggctgcactgaaggccacacaggaacctcagctgcagcccctctagcagctggcatgatagctctcatgctgcaggtgcggccctgcctcacgtggcgggatgtccagcacatcattgtcttcacagccactcagtatgaagatcatcgtgcagactggctcactaatgaggctggattcagccacagccatcagcatggtttcggcctgctcaacgcctggagacttgtcaatgcagccaagatctggacgtctgtcccttacttagcttcctatgtcagccccatgctgaaagaaaataaggctgttccacggtccccccactctctggaggtcctatggaatgtcagcaggacggacctggagatgtcggggctgaagaccctggaacatgtggcggtgacagtctccatcactcacccacgacgtggcagcttagaactgaaactgttttgtcccagtggcatgatgtctttgatcggcgcgccccgcagcatggactcggaccctaacggcttcaatgactggacattttccactgtgcggtgctggggggaaagagcaagaggagtctacagactggttatcagggatgtaggagatgagccgctccaggtgggcatcctccagcagtggcagctgacgctgtatggctccacgtggagtccagtagacatcaaggacagacaaagtctcttagaaagtgctatgagtggaaaatacctgcatgatgacttcactctgccttgcccacctggactgaaaattcctgaggaggatggttacagcattacccctaacacactcaagacccttgtgctggttggctgcttcagtgtcttctggaccatttactacatgctagaagtgtgcctgagccagaggagcaaggcttccacccatggctgcaggagaggatgctgcccctggcccccacaaagccaaaactccaaggaagtggggacagcactagaatcaatgccactgtgcagcagcaaggacctggatggagtggattcagagcacggggactgcacaactgcctctagcttgctggccccagagctgctgggggaagctgactggagtctgtcccagaacagtaagagtgacctggattgtcctccccaccaacccccagacctgaaggatggacagatctgctgaccccagagcccagcttcttccatgtacwacaggctcttcctaaacttgrwwawrarrmwwwmaawcatggatgctcaggagagaatggtcctgatagtgacatctgccacccaaggcctctgaagcattctcagccttctcaagagggtgagggccatcttaattaagcgcagtggtaagggactggtgttcatggctcctctagctgagctttgctgagagcctttcgacaaggggttggcgcccaggccaggcagcccttgatttcatctctctcgggctagtcactgtcctcggccatcaggacctccaccccttcacaagttatgcagcaggtgcctgtatacctaggaacactctcaacagaagtgccgctgtaccgagggcccagagagaggctggcaagagcctagacatgcctaccctgaaagcagctgccttcattaccctttcctgtgtgcctgttctgaagcccgtaccttcactaccactcacccttcctgctgaaggaatggtggcgtgtcccaggaaaaytgggaggcacaggattcccasccagcacccttgytscctcactggggaagttgbcctgytgggctgcagagagytgagacacagtsttgtctaagatagcatgggagcccctgcctmtgaccacctgtcttcctctgcaaagtgctcagggaaatggccttcatyccagaggccagctgtccgcctgacttttcckccattsttggccttctccccttcccatctttggagctaattgttaatatgaattttttaatgcttaagatttgatttttacttttcaaagcaamawwwwrwwraawwwwtttytgcacagctttccaaaataaaaagcagaagtaaaaaawwmmwmmmawwaaaaaaaaaaaaaaaaa

SEQ ID NO: 2492 - DNA, 1253 bp, Rattus norvegicus
samkwsgggccyccwkcyacsammkrgagkmtgmmwgctgcrrgmcacastagccctccctccatggagtttgggctgcttggtgaggcagaggctcgaagccctgcgctgtcattgtcagatgcaggcactccacaccctccgcttccagaacatggctgcaaggggcaggagcacagtgactcggagaaggcctcggcctcactgccggggggctcccctgaggatggctccctgaagaagaagcagcggsggcagcgcacgcacttcaccagccagcagctgcaggagctggaggccaccttccagaggaatcgctacccsgacatgagcacgcgcgaagagatcgcsgtgtggaccaacctcactgaggcccgcgtgcgggtgtggttcaagaaccggcgcgccaagtggcggaagcgggagcgcagccagcaggcggagctgtgcaagggcggyttcgcagccccgctcgggggcctggtgccaccytacgaggaggtgtacccgggctacacgtacggcaactggccgcccaaggcgctcgccccgccgctcgccgccaagaccttcccgttcgccttcaactcggtcaacgtggggcctctagcttcacaacctgtattctcaccgcccagctccatcgctgcctccatggtgccctcggcggcygctgccccgggcaccgtcccaggtcccggagccttgcagggcctgggcggggcaccccccgggctggctccagccgccgtgtcctccggggcagtgtcctgcccttacgcctcggccgccgcagccgccgctgcagccgcctcctccccttatgtataccgggacccgtgtaactcgagcctggctagcctgcggctcaaagccaagcagcacgcctctttcagctaccccgccgtgcccgggccgccgccggccgctaaccttagtccctgccagtacgccgtggaacggccagtgtgaaccgcaggtctgtggatccatccccgagggcggggcagtaattcacagcctctctggacaggggtcgcctagactggcttgcccttcgtcccagggtctgaaaaggggtgccagagcacccgggaagaggcggctccgaagagggccttttccctcacagcccctgaggggtggtctgacccctatacggagaccgcggccctgggactaaggccaggaacagggaccagctcccccggggccaattcacccttggctcaccccgccttctccccgaattc

SEQ ID NO: 2493 - DNA, 2748 bp, Rattus norvegicus
acccccctctcctctcctcctcctcctcttttttagaagcagcgatcggagatggatgtctctctttgcccagccaagtgtagtttctggcggattttcttgctgggaagcgtctggctggactatgtgggctccgtgctggcttgccctgcaaattgtgtctgcagcaagactgagatcaattgccggcggccggacgatgggaacctctttcccctcctggaagggcaggattcagggaacagcaatgggaacgccagcatcaacatcacggacatctcaaggaatatcacttccatacacatagagaactggcggggcctgcacacactcaatgctgtggatatggagctctacacgggactccagaagctgaccatcaagaattctggactccggaatattcagcccagagcctttgctaagaatccccacttgcgttatataaacttgtcaagtaaccggctcaccacactctcctggcagctcttccagacgctgagtcttcgggaattgagactggagcagaacttcttcaactgcagctgtgacatccgctggatgcagctgtggcaggaacagggggaggcacggctggacagccagagcctctactgcatcagtgctgatggctcccaactccccctcttccgcatgaacatcagtcagtgtgatctccctgagatcagtgtgagtcacgtgaacctgactgtccgagaaggagacaatgctgtaatcacttgtaatggctctggctctcctttgcctgatgtggactggatagtcaccggactgcagtccatcaatactcatcagaccaatctgaactggaccaatgtacatgccatcaacttgaccctggtgaatgtgacgagcgaagacaatggtttcaccctgacgtgcattgcagagaacgtggtgggcatgagcaatgccagcgttgctctcactgtctactaccctccacgtgtggtgagcttggtggagcctgaggtacgcctggaacattgcattgagtttgtggtgcgtggcaacccgacacccacgctgcattggctgtacaatggacagccactgagggaatccaagatcattcatatggactactaccaggagggtgaagtctcagagggctgcctgctcttcaacaagcccacccactacaacaatggcaactacaccctcattgctaagaatgccctgggcacagccaaccagaccatcaacggccacttccttaaggagccctttccagagagcacagatttctttgactttgagtctgatgcgagccctacacctcctatcactgtgacccacaaaccagaggaagacacttttggggtgtccatagcagttggacttgctgcttttgcctgcgtccttctggtggtcctctttatcatgatcaacaagtacggtcgacggtccaaatttggaatgaagggtcctgtggctgttatcagtggggaggaggactcagccagcccactgcaccatatcaaccatggcatcactacaccttcatcgctggatgctgggccggatacagtggtcattggcatgactcgaattccagtcattgagaacccccaatatttccgtcagggacacaattgccacaagccagacacatatgttcaacacatcaagaggagagacatcgtgttgaagagagaactgggtgagggagcctttggaaaggtcttcctggctgagtgctacaatctaagccccaccaaagacaagatgcttgtggcagtgaaggccctgaaggatcccaccttggctgccaggaaggatttccagagggaggccgagctgctcactaacctgcagcatgagcatattgtcaaattctatggggtctgtggtgatggggatccactcatcatggtctttgaatacatgaagcatggagacctgaacaagttcctcagggcccatgggccagatgcgatgatccttgtggatggacagccacgccaggccaagggggagctaggactctcccagatgctccacatcgccagtcagatagcctccggcatggtgtacttggcctcccagcactttgtgcaccgggacctggccaccaggaactgcctagttggagccaaccttctagtgaagattggagattttggcatgtccagggacgtctacagtactgattactacagggtgggaggacacaccatgctccccatccgctggatgccacctgaaagcatcatgtaccggaagtttaccacagagagtgatgtgtggagctttggggttattctttgggagatctttacctatgggaagcaaccatggttccagctctctaacacagaggtcattgaatgcatcacccaaggccgtgtcttggagagaccccgagtctgcccaaaagaagtatatgatgtcatgctggggtgctggcagagggaaccacaacagcgactgaatattaaggagatctacaaaatcctccatgctttggggaaggccaccccaatctacctggacattcttggctagtggtgactggtggccaagcgtttatactctgttgcctcctctctccctgcctcatctcctctttttcctcacctcaactcctttcgtccatctttgaccgaaacgaacatcttcatataaactcaagtgcctgctacacatacaacactgaatttaaacaaaacaaaacaaaacaaaacaaaaaaaaaaaaaaaaaacgcgaggggggggcccggtacc

SEQ ID NO: 2494 - DNA, 3710 bp, Rattus norvegicus
ccaccaggcctaacaactagaggaggcttacggccctcggaaaccacgcccccatcagtcagtccccaccctcagctgacatcagcgagtccggccctgggcgcagagcgcaggcagcgcggagccgcgccggccggccctgcgcccacgccgccccgggtctcgcggcccgccggccacccgcgccaccgggagtcgtccatggtgcagcgcatgtgggccgaggcgtccgggcccatagggggcgccgagccgttgtttcccggctcccggcgcagccgcagcgtgtgggacgccgtgcgtctggaggtgggcgtccctgacagctgtccagtggtgctgcacagcttcacgcagctcgaccccgatctgccgcgcctggagagctctacgcaggagattggggaggagctgatcaacggggtcatctactccatctccctgcgcaaggttcagctatacccaggagccaccaagggccagcgctggctagggtgcgagaatgagtcagctctgaacctctacgagacttgcaaggtgcgcacggtgaaggccggtactctggagaagctggtggaacacctggtgcctgccttccagggcagtgacctttcctacgtcaccgtattcctgtgcacctacagagccttcacaaccactcagcaggtgctagacctgctgttcaaaagatatggctgcatccttccctactccagtgaggacggcggaccacaggaccaactcaaaaatgccatctcttccatcctgggcacctggctggaccaatactccgaggacttctgtcaacccccggactttccctgcctcaagcagctggtggcttatgtgcagctcaacatgcctggctcagacctggagcgccgtgctcaccttctcctggcccagctggaggacctggagcccagtgaggttgagcctgaggccctgtccccagctccagtgctgtctctgaaaccagcttcacagctagaaccagctcccgccctgcttctgacgcccagccgagctgtggcatccactccagtacgagagccagccccggtgccagtactggcatccagcccggtggtggcgccagcctctgagctagaaccagctctggagccgcccctagaccctgagccaaccctcgcacctgctccagagctggaccccactgtctcacagagcctccacctcgagcccgctcccgtgcccgctcctgcattagagccttcctggcctctgcctgaaaccacggagaacggactgtgtgcaaagcctcacctactgctgttccctccagacttggtggctgaacagtttacgctgatggacgcagagctattcaagaaagttgtgccctaccactgcctgggctccatctggtcccagcgggcaaagaagggcaaggagcacctcgcgcccaccatccgtgccactgtcgcccagttcaacaacgtggccaactgtgtcatcaccacctgccttggggaccagagtatgaaagcttcggacagggcccgggtggtggaacactggatcgaggtggccagggagtgcagggtgctcaagaatttctcctccctctacgccatcctctctgccctacagagcaatgccatccaccgcctaaagaagacatgggaagaggtctccaggggcagctttcgagtgttccagaaactgtcagaaatcttctctgatgagaacaactactccttgagcagagagctgctcatcaaggaaggaacctccaagtttgccacgctggagatgaaccctaggagaacccagaggcggcagaaggagacaggtgtcatccagggcactgtcccctacctgggcacattcctcactgacctggtgatgctggacacagccatgaaggactatctatatgggagactgatcaactttgaaaagaggaggaaggagttcgaagtcatcgcccagatcaagttgctccagtcggcctgcaacaactacagcattgttcccgaggagcactttggagcctggttccgagccatgggacggctcagcgaggctgagagctacaacctgtcgtgtgagctggagcccccgtctgagtcagccagcaacaccctgaggagcaagaaaagcacagctatcgtcaagcgctgggagcgacgccaggctcccagcacggagctcagcaccagtagcagtgcacactccaagtcatgtgaccagctccggtgcagcccctacctcagcagcggggacatcacggacgcactcagtgtgcactcagctggttcatccacgtctgacgtggaggagatcaacatgagctttgttccagagtctcctgatggccaggaaaagaagttctgggagtcagcctcccagtcgtccccagagacctctggcatcagctcggcctccagcagcacctcctcttcgtcagcctctaccacaccggtgtctaccacacgcacccacaagcgctctgtctcaggggtctgcagctacagctcctcactgccactctacaaccagcaggtgggcgactgctgcatcatcagggtcagcctggatgtggacaacggcaacatgtacaagagcatcctggtgaccagccaggataaggctccgactgtcatccggaaagccatggacaaacacaacctagatgaggacgagcccgaggactatgagctgctgcagatcatctcagaggaccacaagctgaaaattccagagaacgccaatgtgttctatgccatgaactctgccgccaactatgacttcatcctaaagaagcgggccttcactaagggggctaaagtcaagcatggagccagctccactctccctcgaatgaagcagaagggactcaggattgccagaggcakcttctaaggacgtctcccaggggctggctggctggctggggactaagsasktwsagmctagmstgscccagsccaswgstryctctgmccwsctkccagcycagrcyactcccagactccactttcaccccgaacctgtcctgctgccgggattgacacctgccactgacaggctgacctggcctccggggaccgctcaccgccttaggtgccttctgctctctgcaaccagaggactagctgactttgccaaggggtgctgscagmkgggcatggagcctcgcctsccctggacaatgtccmccacactttcctgtcacykccyyargtgcwgmtcwctgcmaccmrwgswcycagmtgctyyrssacabssryrcwsccagbggggmtgccaactgcgttctctcmttgtgyccataggcmmtggcctgggaccttcatggaggtcctagcctttcttaggctgcascaaagattccaccttcaggcctacagartragggrgtytygcccmccamgrgcccaarccctyccatggatcakrgarrraagccctytcatggrccscctggttggcattgaaccccatwccactgaaagtsccattcaccmccgstgsgtcccgggtgtacaagactacatgcaatgggaggtttktggggagggggaasacgaytggmtatttgtwtaaaacgtaaaaagtttmctgattggggtggggcaatatttatttkttgtaaatagaaaatgctagacttswatwttwtattaaaatcccgtttythythwrraaaaaaaaaaaaaaaaaaaaaaaaaactctagcggcc

SEQ ID NO: 2495 - DNA, 2832 bp, Rattus norvegicus
ggggggatgttgagggatgagggcctttctggtggcctccgttacttcaagtcttcatgactggaacgaagggaagactggagttctgaactacagtctcaggaattaatttcctcgtatcctgcctaccctaacccataaataaaaagacaggtatcctgggtctctctgaagacctcctgtctaaggaggcctttctggaagacttcctttctatgtgtacctgtggggtcttttgtggggagggatgtctcagtcgcctgtgattagcttttctcctgaagactgctgaggcctcctctgggtacaccacctctccctccactgcccagtctgagaggctcaggagcttcctgggggctgaaggtgagctctgcagggcaatataggggcaaaggggtgcagctgtccactcagtctgcgcccccgactgccccagcttgcctgtggggtgctctggctcagtggccatggccactcctggctgcagaccaccacagacctcatcttctcctcgctcaccgtgttgaaccacctgggacctgcagcctggctaggttctgggacctgggggacaccaagtctgctgttagtctctctgactgtgagcctgggcatcatcaccaccctggtgtggcaccttctcaagacacccccagagccacctgtcccactgcccccagaggacagacgacaatcagtgagccggcagccctccttcacttactcagagtggatggaggagaaggtagaggatgactttctggacctggacgcagtgccggagacacccgtgtttgactgtgtgatggacatcaagcctgaggctgatcccacctcgttgactgtcaagtccatgggtctgcaggagaggaggggctccaatgtctccttgaccctggacatgtgtactcctggctgcaatgaggagggctttggctacctggtgtccccacgagaggagtcagcccatgaatacctgctcagtgcctcccgtgtcctccgggcagaggagctgcacgaaaaggccctggaccctttcttgctgcaggcggaattctttgaaatccccatgaactttgtggatccaaaagaatatgacatcccagggctggtacggaagaatcggtacaaaaccatccttcccaatcctcacagcagggtacgtctgacgtcaccagaccctgaagatcctctgagttcctacatcaatgccaactatatccggggctacaatggggaggagaaggtgtacatcgccacccagggacccatcgtcagcactgtggtcgacttctggcgcatggtgtggcaggagcgcacacccatcatcgtcatgatcaccaacatcgaggagatgaacgagaagtgcacggaatattggccagaagagcaggtcgtccacgatggcgtagagatcactgtgcagaaagtcatccacacagaggactaccggctgcgacttatctccctcaggagagggactgaagagagaggcttgaagcattactggttcacatcctggcctgaccagaagacccccgaccgggcacccccactcctgcacctggtacgggaggtggaggaggcagcccagcaagagggaccccactgttccccgatcattgttcactgcagtgcagggattgggagaaccgggtgcttcatcgccaccagcatctgctgccagcagctgcgacgtgagggcgtggtagacatcctaaagaccacgtgccagctccgtcaggacaggggcggcatgatccaaacatgcgaacagtatcagtttgtgcaccacgccatgagcctctatgagaagcagctatccctccagtcctcagagtgaccacactcttcctctgagatccactgggcactgccgagtctgaggctggggcttcaccccaactacccaaggtcttaccttgggtcctgggcctgttccctggctctccccttcagtctgcccccatctgttgtcctggcctggtccctaccccaagcctagctcttctactgtacatactgcagagttcgggagggcaggggaggaatgtgccaggccaggcctggggccctgggcctgacccacactatatagacctggggcctcagttttaaccatgattccacagctacttgrtccaaaatgttttcatgccacaccccaagtgtcctaccacaacatgttctgtctgtccatccatcacagctatctgtaccaaacactgtgtcccctcagccaggaaaggagtactgatctgagctctcacccctcarccctcacccacatcgccattcccagacacccaccctgatccccaggcagagatgtctaccaatctctggcctcacaggatgtggatggtggagaccaggcaragragaatgtggtggttgaccgagatcccagctragaaggttcccaggcaagggtgggcatctctggcctatgagacactggagagaaagaggacagatatagtgggaaaccctaaggatctgagccctgagggggccctycaagagtagggtggggacagckscagasstgcaaggcatckkymygwgkcactatgggaaaccccaaatgtckcctcgmtacatgttgctccgtgtgttcccttgtccatgtttgtgttgagagcccatgakcakggcatgcatgactctttggcaacatgtgttatcttggagccacgtgtttttatcgctgactttawatatttattccacggcatacagagacatttggtgtckttttawaatctgctcgtggtcattgaatagagcaataaacagagcattttgvgcaaaaaaaaaaaaaaaaaa

SEQ ID NO: 2496 - DNA, 3540 bp, Rattus norvegicus
ttaaacgttcctgctaagtaatcggtgtgctttcttcggctactcttcggtgggggcttgctgtggtctagcctgggaaggtctagcccaggtcccgccgaaacagagtgagcctgtcgccatgccggcttgctgcagctggaacgatgtctttcagtatgagacaaacaaagtcacccggatccagagcgtgaattacggcaccatcaagtggatcttgcacatgaccgtcttttcctacgttagctttgctttgatgagcgacaagctatatcagcggaaggagccccttatcagctctgtgcacaccaaggtcaaaggcgttgcagaggtgacagagaatgtcacggagggcggggtgacgaagttagtacacggcatcttcgacacggccgactacaccctccctttgcaggggaactcgttctttgtaatgacaaattatctcaagtcagaaggccaagaacagaagctgtgtcctgagtatcccagccgcggtaaacagtgccattctgaccagggttgtataaaaggatggatggacccacaaagtaaaggaatccagaccggcaggtgtataccttacgaccagaagaggaagacctgtgaaatctttgcctggtgtcctgctgaggaagggaaagaagccccacggcctgcactcttgaggagcgccgaaaacttcaccgtactcatcaagaacaatatcgacttcccgggccacaactatactacgagaaacatcttaccaggtatgaacatctcttgtacctttcacaagacttggaaccctcagtgtcccatcttccggctaggggacatcttccaggaaatcggagagaactttacagaggtggcagttcagggaggaatcatgggcattgagatctactgggactgcaacctggacagctggtcccatcgctgtcaacccaaatacagcttccgccggctggacgacaagtacaccaatgagtccctgttccctggctacaacttcagatacgccaagtactataaggaaaatggcatggaaaagcggacattgatcaaagccttcggcgtgcgttttgacatcctggtttttggcactggaggaaagtttgacatcatccagttggttgtgtacattggatccaccctgtcctatttcggtttggccaccgtgtgtattgacttgatcatcaacacgtatgccagtacctgctgcaggtcacgtgtttacccctcctgtaagtgctgcgagccctgtgcagtgaatgagtactactacagaaagaagtgtgagcccatcgtggagcccaagccgacgttaaagtatgtgtcctttgtggacgagccccacatttggatggtggaccagcagctgcttgggaaaagtctgcaagatgtcaaaggtcaagaggtcccgagaccccagacggacttcttggaactgtctaggctctccctctctctccaccactcacccccaattcctggacaacctgaggaaatgcagctgctccagatagaagcggttcctaggtccagggacagcccagattggtgccagtgtggaaactgcctcccgtctcaactaccagagaaccgcagggccctggaggagctgtgctgccggaggaagccaggacagtgcatcactacctctgagctcttcagtaagatcgtgctatccagagaggccctgcagctcctcctgctctaccaggagcccttgctggcgctggagggagaggccatcaacagcaagctgcgacactgtgcgtacaggagctatgccacctggcgctttgtctcccaagacatggccgactttgccattctgcccagctgctgccgctggaagatccggaaggagttccccaagacccaggggcagtacagtggcttcaagtatccctactgacagtatggctgccacattatggtgactcataatatagcattctcttggaaagacttagagacacactttcagccaaaggggaacttaagtcttcctccctcgtaagccgtgttgaagggattgttaggccaatggcaagcacatgaacccctctccacgtggatgagaaacagatgcagatctgagcctgcggcttgacctggactgcggtgccacccacagcctataacgtatacacaggctcctcgaatcccgaccttccccaactcacttcctctgaactagcattgtggagacggtgaaggtgttttctctcccgtccatgtcttcccagcttcctggatacagaggcccattcctgaaaaccaaaccttttgagattcgagagtactctgagaaatgaaatatggccacaaattctttgacgtcctccaccccaacccaacccctcaagacccaaaggtgtcgtttcccctccccattacgggcaactctggcggcttcatccagtagcggatgtgacgtcacatgtattgtttcaggccctagttttaagaggctaacaacttccaattcctgttgaacgcttgctgagaggaagccaggcaagttaagagcacaactataggggcttctcggctgtgaggaagcccgagaagctccagggggaagtaatcaacctgagccagctcatcaccagaagctgccaccggcaggtgattccagacacgacacgtgactgaaactgcaggagacgaactgcgcatgtcaacccagaggaccactctgctgccttgtcgttacatgtggggagtgcggtcaccacacagcaacaggcaaccggagcaagggatgctaaccgaggcccgagtcactgcaaagcgtagagactccttatatcgggcaactttaagaggtcacattaaccagactagaagccatcgcatctaaccgcataccagacacagtctgacgcctcattgctatgctatggttctaagtgactgctattggcagaaaccactaaaagccgcctctgtgcctttaacgtcctggactgaacagccaatgagtccgaggcaatctaatgcctcagcctagtgcctttggggggcggggggtcagaagagggtgtctcctggaactggaattgcaggtggatatgaggtaccgtgtgggtcctgggaagtgaacttgagccctctggagcagcagccggtgctcttaaccactgagccgtccctacaccttcacaaccacatcttaaaaatcataatcataatagagaaaaagagaggggaagagcgcctggggaggtggttcagtgggtaagagcacaagcatgaggacctttgttgggatcacagcatccacctaaagtttggatgtggcttggtagagacaggagggtgggggtggggggggtgagcttgccatgtaatctgatgaccttgaaccccatggtgaatgtggagaatcacgttctctgacttccacatggacctcacacacacaccacacaccacacagacacagacacactaccaccacaaccacaagcacacatacacatgaagacacacagagacatatacacactaccactaccaccacaaccacacactcacaca

SEQ ID NO: 2497 - DNA, 1305 bp, Rattus norvegicus
cacgaggggcttccggcggctcgcgaggtacacacggygkcwygrsccggtcgtccttccctttgcacgtgtccaccccgmgatgctccctctgctgcgctgcgtgccccgcgccctgggtgccgccgccacgggcctccgagcctccatcccggccccgccgcttcggcatttactgcagcccgcgccccggccatgcctccggcccttcggtttgctcagcgtacgagccggctccgctcggcgctctggcctcctgcagcccccaggttcctgcgcgtgcgctgcggctctgcacacggaaggagacaaggcctttgttgaatttttgactgatgaaattmasgargrrmasragrtccagaagcataagtcccttcccaaaatgtctggagatkgggagctggaagtgaacggcacggwggctaaattattgcgcaaagttgccggagaaaagatcactgtcactttcaacattaacaatagcatccctccaacctttgatggtgaagaggagccctcacaggggcagaaggccgaagagcaggagccagaactgacatcaactcccaattttktggybswmgwkrcmaagamtkmtggcamgargacccttgtactggactgccactatcctgaggacgagatcggacacsargaygaggccgagagtgacattttctctattaaggaagtgagctttcakaccmctggtractctgagtkgagggatacaaactacacactcamcrcagactccytggastgggccttgtatgaccacmtaatggatttccttgcggaccgargggtggataacacttttgcagakgagttggtggagctcagcacagccytggagcaccaggaatatatcacctktcttraggmcctcwaaagctttktcaagagtcagtagaactgtgagactgaggsctctaatmtaaacggccagctytsstgggcgagcaaaagctgccttgacmtcacaactatgctttgmmmtggctgtcatcctaatatatgggggaaagcaagtttaaattatcgccgttacacctccatttackattcctttgggctcttttcctgdacacatctattatttgtagatttttgtakkacatgatgatgaacaataaactgacttcmtcstscmrraaaaaaaaaaaaaaaaaaaaaacattgcggccgcaagcttattccctttagtgagggttaattttagcttggcactggccgtcgttttacaacgtcgtgactgggaaaaacctggcgttaccaacttaatcgccttgcagcaca

SEQ ID NO: 2498 - DNA, 3058 bp, Rattus norvegicus
gaactcacgagcctcgcacgcagaggccctcagcgccccgtytcccgctctgcggtatccccagatccccggacgggtgytgtgggaggctgaggacggcatgcgggactacgacgaggtgaccgccttcctgggcgagtgggggcccttccagcgcctcattttcttcctgctcagcgccagcatcatccccaatggcttcaatggtatgtctatcgtgttcctggcggggaccccggagcaccgttgccttgtgcctcacaccgtgaacttgagcagcgcgtggcgcaaccacagtatcccgttggagacgaaggacggacgacaggtgcctcagagctgccgccgctaccgactggccaccatcgccaacttctctgcgctggggctggagccgggacgggacgtggacctggagcagctggarcaagagaactgcctggatggctgggagtacaacaaggacgtcttcctgtccaccatcgtgacagagtgggacctggtgtgtaaggatgactggaaagccccactcaccacctccttgtttttcgtgggtgtgctgatgggctccttcatttcgggacagctctcagacaggtttggtcgcaagaatgtgctgtttttgaccatgggcatgcagactggcttcagcttcctgcagctcttctctgtgaacttcgagatgtttacagtgctttttgtccttgttggcatgggtcagatctccaactacgtggcagcatttgtcctgggaacagaaattctttccaagtcaattcgaattatattcgccaccttaggagtttgcatattttatgcatttggcttcatggtgctgcctctgtttgcatacttcatcagagactggaggatgctgctgcttgcgctcactgtaccaggggtgctgtgtggggctctctggkggttcatccctgagtccccccgatggctcatctctcaaggccgagttaaagaggcagaggtgatcatccgcaaagctgccaaattcaatgggattgttgcgccttccactatcttcgatcccagtgagttacaagacttaaattccaagaagcctcagtcgcaccacatttatgatctggtccgaacacgaaatatcaggatcatcaccatcatgtccataatcctgtggctgaccatatcagtgggctacttcggactttctcttgacactcctaacttgcatggggacatctatgtgaactgcttcctactggcagctgttgaagtccccgcctatgtgttggcctggctgttgctacagcacctgccccggcggtattctatctctgctgccctcttcctgggtggcagtgtccttctcttcatacagctggtgccttcagaattgttttacttgtccactgccctggtgatggtgggcaagtttggaatcacytctgcctattccatggtctatgtgtacacggccgagctgtaccccactgtggtcagaaacatgggtgtgggggtcagctccacagcatcccgccttggcagcatcctgtctccctactttgtctaccttggtgcctatgatcgcttcctgccttatatcctcatgggaagtctgaccatcctgacagctatcctcaccttgttcttcccagagagctttggtgcccctctccccgacaccattgaccagatgctcagggtcaaaggaataaaacaatggcaaatccaaagccaaacaaggacgcaaaaagatggtggagaaagcccaacggtcctaaagagcacagccttctaacaccctgtccagaaggtgaaaaactgaaaggaaacctgcgtgtagtcagaaatgctctcaatcactgagggctttctgttctgttgaccttgtgtctcacatgctcacggatggggcatctgtcctgaagagccaccttcctccagggccaccaaggctaaccacacacagcttgcacatcccatcacagtgtggactggggcctcccagagaagttactgagtctcttgaagcagtgggacttggaagactgagaaacatctgctagacaygctttgttatcctgtaagacctgatagtcacagacagaacagcaggtctgtttcccctcctttccctaactgaagaacttacaggaaaggaataaaagtgactcagtggtggtgtgcttgtctaggatgcaccagaaggaaacaaaaatttcttttcagaaaataagtgattccatggggagtttgatttctcatcttacctaagttaaccaaaatcctgtgatcattttaacccacaacagaagaacacaagaccaagggaaccctaaaggaaactgaggtgaggctggtacataaagcagacagtgtgtggactgtggctgctctgcccctcagccagctgtactgtgtgtgtctggtcagggtcctgccttgcccagaccctgtgagaaacctactgttgaggccaggcttggcctccactgctgtgtaaatcagaactcaggctgccagacacttggctgtgtcttgagggaaatgtatggataamarrgtgtyccttccttcywcsagsmctgwsmygggagtttgymatctgctgtkgwatcwcaasctatttgyccttwarcagaaacttgggaactgcytgtgtttcccagctcagggtwaccctggytggtgtscrgwygmvratataaatggccttcacagtctwagccactagagsggctytgagtgccaaaaatmctaacaccatgcttcttccttttmsgatgtgtaatcatgaggaaaatcacargaaagaaatgtaaattgtgttcacagtctctcasagtcgctggctgcagtcacatcggtggggatttcrtgttcagtgattgtcttcycttctgattatgttsccatggtgctccgaaagcacacgcttcacgctcttaaaatgcaaaacawacacagaaacccrtattttgtgaaagctactgaagtgccttgggcaaggatatggttttaataaactgattttttttttwwaawwawaaaaaaaaaaaaaaaaaactcgagactagttctc

SEQ ID NO: 2499 - DNA, 3459 bp, Rattus norvegicus
gggttcctccaaggccagtctggcagggtaggggttccgcggggtctgggtagtggggtgcaagtcgaaggcgacccagtgacaaaagaagggcgaggaacaggggtggcaagcggaaagcggagccgcgcgcgcagtgggcgggaaacccgggggcggcggcagagaggcgggcgcgcgcctcgcggggaggggtgtggaggagggaggaggaggcgtctggacggtgcagccgggcgggccgcgccagccctgacagagcctcgcggcagccgcagcaacaggcggcggggccgggctcgtggggcagaggcggtggtggggcggggagctccaggaggagcgactcggagctggccaccgccagcagggaaggagagcatcgccgcctcccgcgctcggccgccgcagccctccgcccgccaccgcgcccaccctgcgctggaccccgcgggcggcggcgcgcgcatcctgcagagcccaggctacgccgagctgccgccagacatgaccgtggtgcccggggaccacctgctggagccagaagcggcgggaggcggcggcggggacccgcctcagggaggctgtgtcagtggcggcggctgcgaccgctacgaaccgctgccgcccgcgctgcccgcsgcgggcgagcaggattgctgcggggagcgcgtggtcatcaacatctccgggctgcgcttcgagacacagctcaagaccctctgccagttccctgagacgctgctaggcgaccccaagcggcgcatgcgrtacttcgacccgctccgcaatgagtacttcttygaccgcaacagacccagcytcgacgccatcctctactactaccagtccgggggccgcatccgccggccggtcaacgtgcccatcgacatcttctccgaggagatccgcttctaccaactgggtgaggaggctatggagaagttccgtgaggacgagggcttcctgcgggaggaggagcgacccctgccccgccgtgacttccagcgccaggtgtggctgctcttcgaataccccgagagctcssggccggcccggggcattgccatcgtgtcagtgctggtcattctcatctccattgtsatcttctgcttggagacactacccgagtttcgcgacgagaaggactatcccgcctctccgtcgcaggacgtgtttgaggctgccaacaacagcacgtcgggggcctcctctggagcctccagcttctcggaccccttcttcgtagtggagaccctgtgcatcatctggttctcctttgagctgctggtgcgattctttgcttgccccagtaaagccaccttctccagaaatatcatgaacctgatagacattgtagccatcatcccttattttattactctgggcactgagctggctgagcgacagggtaatgggcagcaggctatgtcactggccatcctgagggtcatccgcctagtaagggtcttccgcatcttcaagctctcccgccattctaaggggctgcagatcctgggacagacactgaaggcttccatgcgagagctggggctgctcattttcttccttttcattggggtcatccttttctccagtgcagtctactttgctgaggcagacgacccttcttcgggttttaacagtatcccggatgccttctggtgggccgtggtaaccatgacaactgtcggttatggtgatatgcacccagtgaccataggaggcaagattgtgggctctctttgtgccatcgcaggtgtcttgaccattgcattgccggttcctgtgattstttccaacttcaattacttctaccaccgggagacagaaggggaagagcaagcccagtacatgcacgtgggaagctgccagcacctctcctcttcagcagaggagctccgaaaagcccggagtaactccactctgagtaagtcggagtatatggtgatcgaagaggggggtatgaaccacagcgccttcccccagacccccttcaaaacgggcaactccactgccacttgcaccaccaacaataatcccaactcctgtgtcaacatcaaaaagatattcactgatgtctaatagatgatacgattgccattctgtgcccagtattgtgtggaacatgcccccttggtctgtgtatgcccttgatttatacatttccagaccattcatcaaggaaagtacatgaagaagtggaaaagcacacttcattctccctctccctattgcttcatactgaaacaggtgcctggttttgcaagtgggctgcattctctcagctctttttctctctccctctctctctccctgtttcttaattttgtgaacaacaaacttacattaagcttggtttcttgtgcaagccctaaagctacatcctgagaggaaatgaaactatagagtcagagtaactgtgtgacctcaaaaatcaaaagatagttgtttctttactaagtaaaggaggcagaacttaaatgatgctcctgttcggtggacttttcagcattatttcctgactaagtgtaactacttaacctctggatgtgtgggtggaaagtctaactagagtgttgacgtgtaaaccctctataatttttttttttttggactggcctttcagtttgatctcccctctaagaatttcaggttcacataactttgaaccaaaagggaaatgccccaaatgtcctgatctgactattaactcttcggagtttgcaaagcattttgaaaacattagacacagattccaatgaagttgtgagttcatgcccaagtcaatatctacgaaagtctagaaactcattttcagtgctgccaggagaaacaacagaaattcctgatgcatctgagagataagcttctgcagtatcacaggaagattaaagtggcagacaccccttccagcggaagttactaattcggacctgactgatgcagttcccatagcaacccgtgtttcctgggaaacccgaaaaaggttgtcatggcatcttttgctctctagccccacccccaccccaggccgtgcgtttctacagtaacctttccagatggttcctacttacacgacttcataagaaaaaacactatttgaataaagcgcacaaattaagtgaaagactatatagaggtgaaatgaatcacaaaatgcttttttacattttatataaatcattgatgttatcccataacgactggatcagaaaggaaactgtcgtctttgaaatgttacatgtaaggcatgatctgaattaaattatgtcagctgtttggtaacaatttttaaagatgcttctgtacagttctttcactaagaaatgacaagtcaacagatgaaaygaaaacagcaatataaacatggtctgtacataagcaagtgagagtcagtgtacccgaagtcttacacgataccttcagatttcctcaattaaaaaraaaaaaaaraaa

SEQ ID NO: 2500 - DNA, 4008 bp, Rattus norvegicus
gccgaggcccgcgcagtagcggtactaagtagaggctgctggacgcgccccacccggcaccaggcggagccagagatgcttgccagggccgagcggccccgcccgggcccccggccgcctccggtctttcccttcccgccgccgctgtcgctgctgctgctgctggcgatactaagcgccccggtgtgcggccgcgtcccccgctcagtgcccagaacctcgctgcccatctccgaggctgactcctatctcacccggtttgcagcgtctcatacgtacaattactctgctctccttgtggatcctgcctcccacacactttacgtcggtgcacgggatagcatcttcgctttaaccctccccttctctggggaaagaccccgaaggatcgactggatggtacctgagactcacagacagaactgcaggaagaaaggcaagaaagaggacgaatgtcacaattttatccagattctcgccattgtcwatgcctckyrcckcctcacgtgcggsaccttcgcttttgatccgaagtgcggggttattgatgtgtccagtttccagcaggttgaaagacttgagagcggccgggggaaatgtccttttgagccagctcaacggtcagcagctgtaatggctgggggcgtcctctacaccgccactgtgaagaacttcctggggactgagcccatcatctcccgagctgtgggtcgagctgaggactggattcgaacagagaccttgtcatcctggcttaatgctccagcctttgtcgcagctatggtcctgagcccagctgagtggggggatgaagatggagacgatgaaatcttttttttcttcacggagacctcccgagtgttggactcctatgagcgcatcaaggtcccaagagtggcccgagtgtgtgcgggggaccttgggggcaggaagacccttcagcagagatggacgacgtttctgaaggctgacctgctgtgcccagggcccgagcatggccgggcctccggggttctgcaggctatggcagagcttcggcctcagcctggagcgggaacccccatcttttatgggatcttttcctcccagtgggaaggagctgccatctctgctgtgtgtgccttccgaccccaagacatccgggcagtgctgaatggtccctttagagagctaaaacatgactgcaacaggggactgcctgtcatggacaacgaggtgccccagcccagacctggagagtgcatcgccaacaacatgaagctccagcagtttggatcctcactctccctgccagaccgcgtgctcacctttatcagagaccaccctctcatggacaggcccgtgttcccggctgacggccgccccctgctggtcactacagatacagcctatctcagagtcgtggcccacagggtgaccagcctctcagggaaagaatatgacgtgctctacctggggacagaggatggacacctccaccgggctgtgcgcattggagctcagctcagtgtcttggaggatctggccttgttcccagaaccacagccggttgagagcatgaaattgtaccacgattggctcctggtgggctcccatactgaggtgacacaagtgaacaccagcaactgtggccgtctccagagctgctcggagtgtatcctggcccaggaccccgtgtgcgcctggagcttccggcttgatgcttgtgtggcccacgccggcgagcaccgcgggatggttcaagatatagagtcagcggatgtctcttctttgtgtccaaaagaacctggagaacatcccgtagtgtttgaagttccggtggctactgtgggccacgtggtcctgccatgttcccccagttctgcctgggcatcctgtgtgtggcaccagcccagtggagtgactgcgctcactccccggagggatggactagaggtggtggtgaccccaggggccatgggggcttatgcttgcgagtgtcaggagggtggagccgcccgcgtggtggctgcttatagcttggtgtggggcagccagcggggaccctcaaaccggscccacaccsttgtgggggctggattggttggctttctcctgggtgttcttgcagcatccctcactctcctcctgattggtcgccgtcagcagcgtcggcgacagagggagcttctagctagagacaaggtgggcttagatctgggggctccaccttctgggaccacaagctatagtcaggaccctccctctccttcgcctgaagatgaacggctgcccctgsccctgggtaagcggggcagtggttttggtggcttccctccacccttcctgctggattcttgcccaagcccascccacatccggctcactggggcgcctctagccacgtgtgatgagacctccatctaaagccggggaaaatgactgccagccatgagcagtctctggaactagtggctaccaagaccatgatcatggctgctccttwmwmwwrrarwmwrwrwrttcacacattagtgtctgtcctctggacctggacctggcctttgcccagattcctgattctcatgagagatcaaccctgtaaccttctgcgatggcctcttgtcttgggcccatcagcttgtggggtggagtaaggacataggccccggaaagggaatcagtgtggaggtagttggggcgtgtgtgccctgcgtccttgtggtggctgtatgatttcccagtctgctgactcwggggakcgcrksmkcccctgactgccttgagatctctcccaactcagtttccccttgctctggaagagtgtgtgtctatacactggtgtgcctagaaggcctgtccatgtgtgcatggacgacagggccggtgcctcggtgcttttggggagtcggagagaaaggttggaatgggggacaacttaaccctcggtagccagtgagggaaaccacatgcccgtccccatcaccccacagcgcttctttaactttgagcaaagttcccaaagtgaccttctgggtgggaagggcagcaggacatgtggcccccgtccttctccttgtctttcccttctggctgccaaccactgccgtgccaccgctgcgctttccctggctggagtggaggctgagtcctctgtccttggtttccatttaaaatgaacttcacaacattctaaatattgggggatgacaaatgacttttttccccagaaaagtgtgtaggaaatacaagcaggttaaagaagatttgcctcagtgactttcacccttgccctaaagcaggagtccctcagctagcgtctgtggactccctgaaattgtatgcgtctgtggactccctgaaattgtatgcaaagtgtctgtgtgtgtgtgtgtgtgtgtgtgtgtgtgtgtgtgtgtgtgtttgcgtgcatgtgtgcatgtgtgtttgatggctttcatcagattctcaaggccttaatgaggttaaaggaccacggcctatagtcaccacacttgggccacatggaggaggtgttgctctctgaggcagttcctccctggcctgcctgaggccagcccctggacacattgctgctggagaccccacatctctccagaacttggaagctaggctctgcgcgtgcttgaaggcaccaccatctcccttcttgcttcattctcctgtgtgctctgcctctgctcagtcctgctcttggcctgtgaatgtgcctcgcccgtccctggtgggggacctcaaaccccagtgctgatgctaccctttccagtgggagtttctgttctgctttccttgacagcagcctgtgaactactcacgagtccccttggtttggagttcccggtggctttgagtaggatctttggcgtggcatctaacctagcagcattgatcgttcattgtaaagtggggatatacctacctcagggttgctgcaaggatcaaacgaggaaacgtataaataaagcattacccacagcaaaaaaaaaaaaaaaaaaaaaaaaaaaaaaa

SEQ ID NO: 2501 - DNA, 1278 bp, Rattus norvegicus
atctgtttcccaggagactctggaaaacgcaggggcagagtccccaacagcagctgagggctcgaagagactaggtacctgcttgtggagttttttgtcccggagcaagctgtgtgctcagacttgaccatgtttgggcatggaggctcaacccagatggaactgaagactgcttccctagagaccaactggagaccaaacttcctgctagagctccaaggcctgacttggggtgggggggtgggggccagtggagagaaaccatctgccagcggagacccagggaactaaatgactgttgcctcckgtggccatggggaagaagctggtgatggcccagaagcgcggagagackcgagccctctgcctgggggtggcgatggtcgtgtgtgccgccatcacttactacatcctgggtaccactgtgctgcccctctaccagaaaagtgtgtggacccaggaatccacctgtcacttggttgaaaccaacatcaaggaccaggaagagctggagggcaggaaggtgccccagtacccatgcctttgggtcaatgtatcagctgtgggcagatgggccatgctgtatcacacagaagacactcgggatcaaaaccaacagtgctccyatatccccaggaacctggacaactaccagacagccttrgttgatgtgaagaaggtcagagccaatttctacaaacaccataatttctattgcttttctgcacctcaagtcaatgagaccagtgttgtgtaccagcgcctctatgggccccaaatcctcctcttctccttcttctggcccaccttcctgctgactggyggccttcttatcattgccatrgtaaagctcaacaggtccctstcyrtcyykgcrgcycagargtagaycaatctcttctgcacagcagcwwggagtcaccaggaacggcaggggtcccgggcaggcataattctcttcctcttgtcctccatttaatttgttcaacctctttggacaatcatttcttgctcaagaatgtttaacagctctctccggttgacttcgaagggcaaaggaactgccagtcacagctctcgatccccggcttcagttggctcacatctgttacctgctatgtcactgtctactcccaagacgatgaatatcgtcacctctgtccctatgtgctctctcttagttcctcagatacccacctttgacatccaggatgctgtccttggccaaattcagcttctttgaattgtcataaaagccatagctctcaaaaaaaaaaa

SEQ ID NO: 2502 - DNA, 2742 bp, Rattus norvegicus
  misc_feature (2646)..(2649): n is a, c, g, or t
cagcagccttgccctctgacttgatatttaccagacccggccagcatggctgtcctgaatccaatgactttgggaatttatctccaactcttcttctgctccatcgtgtcgcagccaactttcatcaacagtgtcctcccaatctcagcagcccttcctggcctggatcagaagaaacgaggcaaccacaaagcatgctgcctactgatgcccccgccacccccactcttcccaccgccattcttcagaggcagccgaagcccgcttctctccccagacatgaagaatcttctggaacttgaggcctccccatcaccctgcatgcaaggctctctaggctctcctggcccccctgggccccagggtccacctgggcttcctggcaaggcaggaccaaagggagaaaagggggatcttggccgcccaggaaggaagggtagacctggacccccaggtgttcctggcgagcccgggcccgttggctggccaggccctgaaggacccaggggcgaaaaaggcgacgtgggtatgatgggtctgccagggtcaagaggaccgatgggctctaagggcttccctggatccagaggggaaaagggatccagaggtgaaagaggggacttgggtcccaaaggagaaaagggtttccctggatttcctggaatgctggggcagaaaggtgaaatgggtccaaagggagaatctgggatagcaggacatcggggccccacaggaagaccagggaaacgaggcaagcagggtcagaagggagacagtggaattatgggcccaccaggcaaacctgggccttctggtcaacctggccgtcaaggtcctcccgggcccccaggacccccatctgcaggacaacttgtaatgggactcaaaggggaaagaggatttccagggcccccgggaagatgcctttgcggacccccyrcgartgtgaataacccctcctatggggaccccatgtatggrcgcggctcccctcgagttcctgcgatttttgtggtcaacaaccaggaggagcttgagaagctgaacactcaaaatgccattgcctttcgaagagaccagcgatctctgtacttcaaagatagccttggctggctccccatccagctaacccctttctacccagtgggtttacaccataaagcagcatggcacctgtgtggggatggggtcctgcagcctggggaggaatgtgacgatggtaacccggatgtgagtgacggctgcattgactgtcatcgggcctactgtggagacgkttatcggcaccggggcgtggaggactgtgacggctctgactttggytacctgamgtgcgagacctatctccctggatcatacggagaacttcggtgcacccagtattgctccatcgactccacaccctgcsgatacttmacgtgagaggctgcagggacaggtgggctgtggcccatggacccgttggctgtttctstacccttcacatcaagctggccttgccctctcctgggacagtgccctttgaccttcatgtgacaaaacaaggatatattcttgctgctacgacatgcttttgactccgtatgactggaagttttggaccactgaatcctgtcttaattctaagaaccagaatccttctataccccaccctggaaacttccccatcccctccaatctggctaaacagctggctgtaatgcctgatctcttctggaaagatgctggctsaagcgtggawwwrrmwwarmamwrwtaagcatacaggcatctacaggcctggcgtggttcgttctggtctaccaggtttaggggtgctcgtgaacaggcttctgcacctccaagcacatctgttccgaccccaaagcgagccagctgctgggtctctcaagatttaagaaccacatcataggaggtgagaaattctcttggtgcagctcccagcttcagacctgctgaggggacccttcagctggctggagcctggatcaacttcatgttgatcagtcaggggtacgagagagccacaaggcccaagcttggtcccaggaagagggtgaaggctcagctgagtcactgccatgtgacccctaccagaacagaaaccttcttccttcccgaagttctctgaggcaccatctgaccttgtgcttctctctgcaccttgacctctgtcttgacagtgccctcttgcaacgtgcctgtgtgaaagtctcacccctcatgccctcccatggcccgtgctgctgtttcctcatgctggcttccctggcttgggctccactgccaagtccttggctgcaggacgcgccggtgactctcttccatgcccatcttgcataccccttgttccctcactgtgtgcccaacctcttcctttatcctgggattctttttcctaagccctgcatttctgagaactgccttcccatatttcatgaatggggtttggctctatttggggaaacatcgctttttgtccccctccccaatgcgcgcacctgccttgccccactacccaggctgcctctgggctgtgcaaagctcttcagtgagcccaagccttgggaattcagcaggtggcaccttctcacccagcaagtccgagctgtgaatggtatttcctgagagaaatcagcctgaggnnnncttcaggggcagacagctatctatttactattctgggacttctgggtgggcaaacaagaaataaaggtgattcttggctgtgaaaaaaaaaaa

SEQ ID NO: 2503 - DNA, 3328 bp, Rattus norvegicus
attatcctgctcaccagatgtcttgaaaatttttcttacaacattggccattggttttcactgccttcaaaagatcaaaattactccagaaatttgaaagtttgatttaaaagaaaaaacgtgaacagatggacaatatgtctattacaaatacaccgacaagcaatgacgcctgtctgagcattgtacacagtttgatgtgccacagacaaggtggagagagtgagacatttgccaaaagagcaattgagagtctggtaaagaagctgaaagagaagaaagatgaactggattctttaataacagctatcactacaaatggagctcaccccagcaagtgtgtcaccatacagagaacactggatggacgactgcaggtggctggtcggaaaggatttcctcatgtgatctatgcccgtctgtggaggtggcctgatctacacaagaacgaactaaaacatgttaaatattgtcagtatgcatttgacttaaaatgtgatagcgtctgtgtgaacccatatcactatgagcgggttgtctcacctggaattgatctctctggattaacactgcagagtaatgctccaccaagtatgttagtgaaggatgaatatgttcatgactttgaaggacagccatccttacccacggaaggacattcgattcaaaccatccaacatccaccaagtaatcgcgcatccacggagacgtacagcgccccagctctgttagccccatcagagtctaatgccaccagtaccaccaacttccccaacattcctgtggcttccacaagtcagccggccagcattctggcaggcagccatagtgaaggactgttgcagatagcttcagggcctcagccaggacagcagcagaatggattcactgctcagccagctacttaccaccataacagcactaccacctggactggaagtaggactgcaccatacacacctaatttgcctcaccaccaaaacggccatcttcagcaccacccgcctatgccgccccatcctggacattactggccggttcacaatgagcttgcattccagcctcccatttccaatcatcctgctcctgaatattggtgttccattgcttactttgaaatggatgttcaggtaggagagacatttaaagtcccttcaagctgtcctattgtaactgtggatggatacgtggatccttctggaggagatcgcttttgcttgggtcaactctccaatgtccacaggacagaagctattgagagagcaaggttgcacataggcaaaggagtgcagttggagtgtaaaggtgaaggggacgtgtgggtcaggtgcctcagtgaccacgccgtcttcgtgmagagttactacctggaccgtgaagctggccgagcacctggtgacgccgtccacaagatctacccgagtgcgtatataaaggtctttgatttgcggcagtgtcaccggcagatgcagcagcaggcggccaccgcgcaagccgcagctgctgcccaggcggcagctgtggcaggaaacatccctggwymtgrgtccktargtrgaatagcmcykrcyatvartytgkcygctgmkgcwrgmattggwgkagacgacctccggcgcttgtgcatactcaggatgagcttcgtgaagggctggggcccagactacccgagacagagcatcaaagaaaccccgtgctggattgagattcacctccaccgagctctgcagctcctggatgaagtcctgcacaccatgcccattgcggacccacagcctttagactgagatctcacaccatggatgccctaaccatttccaggatggtggactatgaaatatactcgtgtttataatctgaagatttattgcatttttgttctkctctgtctttcataaagggttgaaagatgtgtttgctgccytgcwctwarsrgacakarrctgmmkyaaaaytktttttctattttagaactttcaggcatggctcagagctcgaagatcasgaagatccaatttttactaagtcttcactggttgttatgtatgaaggagtcattccagtgctgggaactcagccctctaagtatgcgagagakagctccttacatgcaggacactgatgtgttgtctgcaraatwaattcactgktgctgactttaakgctgagaagwtytyamagttaagtcacctgttactwrkkgggcaaagtcattgctgamcrarckscwcgcaagtggsagtccagtcttccaaaagcarcttsactcccttaaagscttttgkcmgtctttattcarwmksgkgttkgcaagktaaamagtgmasgdgratwaaattcatagtgkcttgcarmctttagggtttttccccaagacaaaacactaawctgkgkgswtatkgammattcyttacmattmccagtmawagaaatgccatttaaaattacagttttatccctaatggatggccatccycgagagatacactgtgccctgttaaacagkacatgaattcttctatatttctaggtgcaaggttgcttataaaaaacaaagcctaggggaggaattttttttcccttaaktcatagggagaaggtwttgtatttataaaaacactaaaagcagagttgctmtgcstgatgcttcactgttckgcamggkggcagtgcttcaactgaaataatgactattytggaaactgctaaattbtatgttaaagactgtgcagaataacggaaaccgtgcagttggtaacaggtagtttggatatttttgtacttgatttgatgtgtgactytttttcatatactgtttaaatcatgtatgttttgacattgtttaaaattcagtttttgtatcttggggcaagactgcaaacttttttataccttttggttatcctaarcccttcgtttgccatcattgatcccttggtggtgactttgtagacgttgaagtagaagcgtgggacgcattgactgtaccacagacatgtatactttttacctagttactagagygaataaaacykmgtgccatatamraarwwraawwmwarrwwwrrwwwttaaaatgctttccttttgcacttttgaatccaatctcagtggcaagacaccttctactaactgacaggcaacagccagttgtattgggcagctctggttttccttcacactctaccaggactttcccatgtacattatggatcatgtgtagagttggttattttttgagtttttattttctgtagcgaaaaaaataggctacagtaaaatagtgtgaataaaaccaagatcatcattgarawrwwwwwamwmwaaa

SEQ ID NO: 2504 - DNA, 4236 bp, Rattus norvegicus
gctgcagcttccctcacgcccagcctccgagggcgacgacgtccgcgctcgctccacagacaccgtcccgcggcagaggcgctttccaactcccgcgcagcagccgaaggacgcgctatgaagtcttatactccatatttcatgctcctgtggagtgctgttggaatagcaagggctgctaaaatcatcattgtgccgccaattatgtttgaaagccatttgtacattttcaagacactagcatcagccttgcacgagagaggccatcacactgtgttcctcctctcagaaggcagagacattgacccatctaatcactacagcctccagcgatacccagggatcttcaacagtaccacctcagatgctttcctgcagtctaaaatgcggaatattttctctggaagattgacagcagttgaactggttgacatactggatcactatactaagaattgtgacatgatggttggcaaccaagccctaatccagggtttgaaaaaagaaaagtttgacctgctactggttgaccccaatgatatgtgtggatttgtgatcgctcatcttttaggcgttaagtatgctgtgttttctactggcctttggtatcctgctgaagtyggagcgcctgctcctttagcttatgtcccagagtttaactcactcctcacagaccgcatgaacttcctggaaaggatgaaaaatacaggcgtttacctcatatccagaatgggggttagctttctggttcttccgaaatatgaaaggataatgcagaagtacaacctgctccctgcaaagtccatgtatgatttggttcatgggtccagcttgtggatgttatgtactgacgtagcactggagtttccaaggcccaccctgcctaacgttgtatatgttggaggaatcctaacaaagccggccagcccactgccagaagatctgcagaggtgggtagatggtgctcaggagcatggctttgtcctggtatcttttggagctggtgtcaagtatctgtcagaagacattgctaacaaactggcaggagctctggggagattgcctcagaaagtgatttggaggttttctggaaccaaaccaaagaacctaggaaacaacactaagctcatagaatggttacctcaaaatgacctgcttggccattcaaacatcagagccttcctaagccatggtggtttgaacagtatatttgaaactatgtatcatggtgtccctgtagtaggaatcccactctttggagaccattatgatactatgactagagtacaggcgaaaggcatggggatcttgttagaatggaatacagttactgaaggggagctgtatgatgcactggtgaaagttatcaacaatcccagttatcggcagagggctcagaagttatcggaaattcataaggatcaacccggccaccctgtcaatcggactacctattggatagactacattcttcgccacgacggagcccatcacctccgttcggctgtccatcagatctccttctgtcagtattttctactggatattgcctttgtgcttctgcttggtgctgtcgcgctctacttcatagtgtcctatgtgacaaaatttatctatagaaaagtcaaaagtctgtgttctaggagtacgcacagcacagttaakggacactaccaaaatggaatcctcaatggcagatacaaaggaaatggtcatattaaacatgaaaaaaaggtaaaatgagccaacagcccaggcgacgggagcagatatgtsyyggtcattgagtttgtagtgctactctttagtctaacagctaccaaaactaaatgtcagcaaacaatcytaacaccctcatcagaccctgttaatgaaatccatggataaaatgtctgtacagagcacaacccaagtgcaaaaatgtattttattctaacactgatgcagaaagwwggcagwgaaccatttagaaagcccttaattatttaaatcaattaagtgattgtgtcggacytgagttttaagtgttatgtatgtattacaggtgagggatggtgtttttctcttgataagatgcgtgtatgtttccgtgtcgttgagttttagcttccatttgtatttagcttgtaacagtatttcaaagactgtttcctaaactcagtgtacgaggcaagtgaaaagatggggtgggcacagwttttgtatttttgtttattatagacatttttatttttttttttgtatatgcttttttcttaccaactatggatacttgcgaaggaaactcgtaatgaagtaactgagtaaaaagrktttcacatttttttckwatattttyctcctaccaataatttttctccagaagaatkttytaattaggacaaagcaacaaagctcttacttttgttyaaagtactgaagagtacggctcaaacagmmcttgkragcagagccatgtgcmaawgcttgtgtgacttgratatccmtcatttgagtktgaatattcaggtatcaacttytraaattttarctttaaaataatcaccyytcattcyttttattatctgggkcacratatastacataggtgccaacatatattcctcttaagccaggaacatttgccgttttctcctccttggtacctggtttgactgcaggagtttgaagtttgtcagcaaacaagacttcccatgcgacacagaaggtgacagaaattgtgccacccatttgtgcaatgagttcccgttccctyctcactccatcagsccaactcggtagcctttttggtcattgtgcttgacacgggacagtaagagtatctatttggaacagggagacgagtcacamcgttcataaattcagracctccytgttgaaccactwactaamcggcaactgwargctwattmtasgtcactgtgtwyactgagcatkygcwstgcacatgcrgagtgtgygcttwatttatktgtggtkggaaatcccacccttkrcacttkrgagtwgagraatgraatawttacttaacgksrctcaccaacctsgcagagktgtgraraawmtaraakgmtgkarawccttgtyakacactgtgacaywcaamtttgtgrcactcycaccasgagccagkctcatgkacttagatatmwmcagttttttaatgsacagtgcakacmgccyactgstktmtgaatacwwsraatggtrtcygwacacamcagytagctactccttttcacaatcttatcacaatgttgccgttcaaagaggaaaaaagatcaggcmatgaatggtggggcagcagagcatagagtgtatgaacgagctgagtttacttktggsatttgataaarktggtawtaggcactaactggatgattaaacataagttawtttccactgkgatttmaamaaaacttmwaacamtaaacaaagttgwamwtrrmwaaawrwwrwwrraawaaaatttttattcggattttattttacagtattatatataggtatatttacattataaacatgtttcttcttttaaaaaagaaaaagaaaagacacccatcatgagtagaactatgaaggaggaaaccaagaagatgttaatcacctaagtgggatatctgttcaaaaacaaaacaaaacaaaacaaaacaggtaaaggactgtagagatccgtgatagagtaagtgataaagacctttagctttcatgtgaaagaagtggatggtgagaaaagtgttctgtgttatcctctgtaaacatcaccagggtgtattagagaagatgacacaaaggggagaatattaggtgaatgctcaggaaagtctaatagcaaagacattagactagtggcaatggaaatcaagagaaactaaagatttgagaagattttaaaaatgtcaatttctgtgaaatctacttcagcatggccaacatagtgactttcaagacaggctgagctgtatagtgggaccctgtctaaaaatttcaaaagggaaaaatttaaaaaataagatatataaagagggctatctattaactagatggaatagttgggatctcttttcatccatgtgatacacacagcaaatgacaaatgttggtatggtagtcctataacattatcatggacttgaaaatttcttattttctcttattgtcagacattgtagtgttgtggtacaacttatgactcaagtttgagatgatgtttacataaagaaacatattccg

SEQ ID NO: 2505 - DNA, 3357 bp, Rattus norvegicus
ccgcgtcgacccggcacaaacacaccatgcaccctgacagtaaatttataaaaaatttttttcaactatagcacaaaaaatgtgtatcacttaacagggatgacaaatggctgtcacttcagtcactataatgcacaatatatatatgccttctacttatgaagcacgtttactggaaaacaactgttatgcagacggcatcctcatttttcttatgtttggtctcttgtcccttgagagatcatgtccagtaagggatctacaacagttccttgtgtgtgttaacaatgatgaaatcacaattgatgtgttttcctgagtctgtccccacagttaaacaatgcctttctccccggggcgccgcgcccggccggcgcctccgcttccagccaagatggcggagagcggcgaggctctgggtacggtcccggagcacgagcggatcttgcaggagatcgaaagcacggacaccgcctgcgtagggcccacccttcggtctgtgtatgatggtcagccaaatgcacacaagaagttcatggaaaagctagatgcctgcatccgcaaccatgacaaggagattgagaaaatgtgtaacttccatcaccagggctttgtagatgctatcacagagctcctcaaagtaagggcggacgcagaaaagctgaaggtccaggttactgataccaaccgaaggttccaagatgctggaaaagaggtgatagaacaaacagaagatattattcggtgtagaattcagcagagaaatattacaaccgtagtagagaaattgcagttatgcctgccagtgttggagatgtacagtaaactgaaggaacagatgagcatgcagaggtattattctgcacttaaaacaatggaacagttagagaacgtatactttcctcgggttagccagtaccgcttctgtcagctcatgatggacacacttcctaaactccgggaggatatcaaagacatctccatgtctgacctcaaggactttctggaaagcattcgaaagcattctgacaaaataggggaaacagccatgaaacaggcacaacagcagaagagcttcagtattgctgtacagaagcaaaccaatatgaggtttgggaaaaatatgcatgtaaacaatgacaggactctagaggaaaagagtgacatcatactgaagcacacacttgaggaggaggccgagaatgacgaggaggtcttaactgttcaagatctcgttgacttttcccctgtttaccgatgctcacacatttattctgctttgggtgatgaagaaacatttgaaaattattaccggaagcaaaggaagaagcaggcgcgcctggttctgcagccgcagtcgagtgtgcatgaaacagttgatggctatagaagatatttcactcagattgtagggttctttgttgtggaagatcacattttacatgtgacccaaggattagtaaccagggcatacactgatgaactctggaacatggccctctcaaagataattgctgtcctcagagctcactcatcttactgcactgatcctgaccttgttctggagctgaagaatctcatcgtcatttttgcggatactttgcagggttatggcttttctgtcaaccgactctttgaccttctatttgaaataagagatcaatacaacgaaacactgcttaagaaatgggccggtattttcagggacatttttgaagaagataactacagccctattcctattggcagtgaagaagaatataaaatggtcatcagtaaattccccttccaagatccggaccttgaaaagcaatccttcccaaagaagtttcccatgtcccagtcagtgcctcttatttatattcaagttaaagaatttatttatgccagtcttaaattctcagagtcactacaccgaagctctacagaaatagacgatatgcttaggaagtcaacaaatctgctgctgaccaggattctgagtagctgcttactgaacctcattagaaaacctcacataggtttgacagagctggtgcaaattatcataaacacaacacacctggagcaggcttgcaaatacctggaggactttataactaacattacaaatatttctcaagaaaccgttcacaccacaagactttatggactttctacttttaaggatgcacgacatgcagcggaaggagaaatatataccaaactcaatcagaagattgatgagtttgtccagctggccgactacgactggaccatggctgagtcggatgggagagcaagtggttatttaatggatcttattaattttttgagaagcatctttcaagtatttacccacttgcctgggaaagttgcccagacagcttgcatgtcagcctgccaacatctgtccacatccttgatgcagatgctcctggacagcgagttaaagcagatcagcatgggggccgtacagcagtttaacctagacgtcatacagtgcgaattgtttgccagctctgagcctgtgccaggattccaaggggacaccctgcagctggccttcattgacctcagacagctccttgacttgtttatggtttgggacwsgwskacttacctggctgactatgggcagccagcttccaagtacctccgggtgaacccacacgccgcccttacgcttttggagaagatgaaggacaccagtaagaagaataacatatttgcccagttccggaagaacgaccgggacagacagaagctgatcgagacagtggtgaaacagctcagaggcttggtgaccggtatgtcccagcacatgtagaccagatccatgcccgagtgcttctctgtggccagcaccggtcatgagacaataatttgtttacagaagccaaaaactgtagtagaggaamgatactratgagggcttaaacwwtwwkkwywkywwwywtcatttgtatggacttttaataastgaatactatkttmtatataaaaatgtaacattaatttttkccaattttagawgaaaastcaaaagtgtaatatataaacccaataaattgtgtatgaaactggttgcaaatattrraaaaamawrwmwmwrmwtgcattttttttctcctatttaagcttgaaggagtttctgtttgtgtcggctatagtttgggacccagccactgctcataaggaaatactcagtgctgtcgttggaatttattttcacctcagtgtgacttatgtggcccagaagttttagttctgcagagtgtgaggagtgagcacagatatcttgaaagttcctgaagtcaggctcagctctccaggacagtaaattatttgttctacttagatattttcattctgaaa

SEQ ID NO: 2506 - DNA, 3513 bp, Rattus norvegicus
gttgaacagcagccagagcctgaagaagccaactccagggcggaggaaaggaagcagaaggctcagcaccagtctccaacacttggcaagatgggtgactggagcttcctgggggagttcctggaggaggtccacaagcactctacggtcatcggcaaggtctggctcaccgtcctgttcattttccgcatgctggtcctcggcaccgctgctgagtcctcctggggagatgagcaggctgatttccggtgtgataccattcagcctggttgccaaaatgtctgctacgaccaagccttccccatctcccacattcgttactgggtactgcagatcatctttgtgtccacaccatctctggtgtacatgggccacgccatgcacactgtgcgcatgcaggaaaagcagaagctgcgggaggctgagaaagctaaagaggccggtggcaccggcacctatgagtacttggcsgagaaagccgagctgtcctgctggaaagaggtgaacgggaagattgtcctccagggcaccctactcaacacctatgtctgcaccattctcatccgcaccgctatggaggtggccttcatggtgggccagtacctcctctatgggatcttcctggacaccctgcatgtctgccgcagaagtccctgtccccaccccgtcaactgttatgtctcgaggcccacagagaagaacgtcttcattgtctttatgatggctgtggctggactgtctctgtttctcagcctggctgaactctaccacctgggctggaagaagatccgacagcgcctggccaagtcacggcagggtgacaagcaccagcttcttggcccctccaccagcctggtccagggcctcactcctcctcctgacttcaaccagtgcctaaagaacagcccagatgagaaattcttcagtgacttcagtaataacatgggctcccggaagaatccagaccctctggccactgaggaagtgccaaaccaggagcagatcccggaggaaggtttcatccacacacagtatggccagaagcccgagcagcccagtggcgcctctgcaggccaccgctttcctcagggctaccacagtgacaagcgccgccttagtaaggccagcagcaaagcaaggtcagatgacctgtcagtgtgaccctcctcttagggaggaccagtcccagaaggragccaaggagggtgaggcaggacagaagcggtctctctgactgtataccttcctcagcaccttctctcccgggtctggatggtgttgctcattaatcctccaaatttsagttctgagccgtattctcaaagattgggctactcctcaaatccccaaccccacatcctctaccagtattcgcagtgaagactttcaagtgatttagtgatatggtgggagcaggaatgggaaccttggcaaaatctggtctgggtaggacagacatgaagattcgacmktagcaacagataaaccctcaccccaaatcttgtcttcttcggtactaggcccatcctttttattttttaaaggaagaatccaaggttgagagtattcatcaaataatctgcattgtattgttcctttgaatctgtcgtttccatgtgccatacctcagagtgctggtgaggtaactgtgggttgcccttggctgcatctccctcctcccagtcttaaaggggtgtccttggtcctcggccagcatcagctttacaagtgccttggtatgtgcctttggaaaacactgcatgttgatgatgctgcagccttactgccaggctagacacccagctcagaagggtgccaagacctctagaagtcactgtgcacataagcattgctggaattgccaccagctgtcatcctgcagtcctttacagttcaacctagtgatagaaaccgtcctggacagctcacccagtgttcctctaaaatcttggttaacaggaatgtccaaagtcaccatcctctcttggaccctggccagattaccagccaccaagttcagtggaatttccccaggatttaatgaaacaaagagagcattgtgcttctcaggttccttggggggtgttgggggggattcttctgtggagatgaaaagagaggagggggaggacactggaaaactattttcccttctgcatatgcckwssactgcctcccagcttggactgctgagaggtgtggtgatagatagcaacggaggcccaagatctctctcttagaggcatcaaggggacctggaagccgagatggagctccggttggttttgacacggcccttatttagtgcagatgctcctgtgtttccttgggacccttaggtacatcagggagggactgtagaaaattcctgccttcctcagggtctatcctgggctatctactgagaggatccacagtcggtgtctctccttatgcagatggaaagatgctcagcgtcagatatcaagacttacaaacacaatgctctgtgtgtgtgtgtgtgtgtgcatgtgtgtgtatgagtgtgtgcatactcaaccatcyatgtgtgtatatgtgtgtgtgtgcatgctcaacmatctgtgtgtgtgtgtgtgtgtgtgtgtgtgtgtrtrtrysygtgtatacccgtgtatgcatgcagatagaatggtaaagaagagccctgaagaactgtaagraaacatgtagaaaacttgggtttttctgcctccttttctgttgcccgacaggacagctgagcttgcttcctaatcagcctaaaggtcaaacctgggaagtcagtacaggagggtgaaggttcagaggtcaacccctgcccatgtgaccatctctgggtccctctgctggtatttggatggctgaagatacttgggaaaggctgactggctgtcccasccccagtgtatctcattcattcctgacaccgacgctatgattctctgcyyttctagttatgggatgtstgtttgtcttctgaaatggggccttttgagttagaaaatctgagaccagtcttcgatggtgaggtttttcagaagagaaagagaaagtaatatgtgtgactggtyytaaataaaatacgtctctacatgttaamwmwrrwwwrwrwmwmctttggactgtggctttaagagggtggcagacttgatggagaagggagagcatggagtcagacgcacaagggttaaaatcccaactgctggtctctacctggccatcagtgagctctttcacttctgaagtctgttagtcacctgtaagtcaatccagtgatgttcactccattaggctgtgaagtgagaggctgtgtaggaagagaaagacagatcctctcaggcacaagagtttacaattgaggagccattgtcattattttcaatacagagtggtccagaacccgaggtactgagggataattctagaccttcctcttttggaactcacagcattatctacctggggggaacaaatgaactcacagaaaggacacaagtagggtgcaggacaggg

SEQ ID NO: 2507 - DNA, 1896 bp, Rattus norvegicus
tctttaattgggggcaattagctccctgccaggaggtgcggcccggggaggggccaggaccaagaacgtgcccggtactgcccagtctttgtctgctgcctccggatgcacagcgatgggggaatggaccatcttggagaggctgctggaagccgcggtgcagcagcactccactatgattgggaggatcctgttgactgtggtggtgatcttccggatactcattgtggccattgtaggggagacggtgtacgatgatgagcagaccatgtttgtgtgcaacrccctgcagcccggctgtaaccaggcctgctatgaccgcgcctttcccatctcccatatacgttactgggtcttccagatcataatggtgtgcacccccagtctctgtttcatcacctattctgtgcatcaatctgccaagcagagagaacgccggtactcgactgtcttcctagccctggacagagaccctgctgagtctatagggggacctggaggaacggggggtggtggcagtggtgggagcaagcgagaagataagaagttgcaaaatgccattgtcaatggggtgctccagaacacagagaccaccagtaaggagacagaaccagattgcttagaggttaaagagctggctccacatccatctgggctgcgcacagcagcaaggtccaagcttcgaagacaggaaggtatttcccgcttctacatcatccaagtggtgtttcgaaatgctctggagattgggtttctggtgggccagtactttctatatggcttcagtgtcccagggttgtatgagtgcaaccgctacccctgcatcaaggaggtagaatgttatgtgtctagacctacggagaagacggtctttctggtgttcatgtttgctgtgagcggcatttgtgtggtgctcaatctggctgaacttaaccatctgggatggcggaagatcaaactggctgtccggggagcccaggccaagaggaagtcagtctatgagattcgtaacaaagacctgccaagagtcagtgttcccaatttcggcaggactcagtccagtgactccgcctatgtgtgaaagggcaggtttggggaaggcctgctaggtggcaagtagccccaaggcagaggatgactcgagggtgtacaggtttgccctcatttgcgtagtgctcgctgtgaaggtctaggatacagatattaagaggtcgtcatcaacacaaaggagaggtagaactgtcatcacatgtcacaccatcagttctactgagaccaccgggtagagtgacaagatggctaagttggatgtccttgggccttcttctttcgtggcccttcctgctcctgataatagtgaactggcatagctgccaagcaagaattagctcggctgagctctgtattctggtgaatggcatgagtcaaacactcattgatataaaatttgtgacccatctcagcacatacctttatcctgggctgcagaaaaaaaaatcctggaggatatttttcccccttcagcatgcccctttccctcaaacccaggatagcatgccagcttttctttttccttgatctggccttacattagccctaacacagtttatctgcaagctggagggaattacatggggtgctttttggagactggccagggcagaggtttgcagtagagccccatatgactggcccttagtcattaaaacaaaacaaaaccttaggaatgtctcaatatttccaattttttaaaactcaaattgcactggtgctgtttattaggggtgggggatgggagggagggaatctcaacaacacttctgtgagatggtcatttcactgttgagcatgtgtttatgagctttgagatatttctgccttctagattatggcccg

SEQ ID NO: 2508 - DNA, 3820 bp, Rattus norvegicus
acctggggagccagagcaccgcagtagcgcactttccttcgtgttcttcccgcgtcgagcccgagtggctccggccgcggtcgcacgcaacgccacgcgtccacagcgaaggacttgaggatccactgaggtgacagaatgaatcgcacggcatacaccgtaggagctttgcttctcctcctgggaaccctactgccagcagctgaagggaaaaagaaagggtcccaaggagccatcccacctcctgacaaggctcagcacaatgactccgagcagasccagtccccaccacaacctggctccaggacccgggggcggggccaggggcggggcaccgccatgcctggagaggaggtgcttgagtccagccaagaggccctgcatgtgacagagcgcaaatacctgaagcgagattggtgcaaaactcagcccctgaagcagaccatccatgaggagggctgcaacagcckcactatcatcaatcgcttctgttacggccagtgcaactccttctacatccccaggcatatccgaaaagaggaaggctcctttcagtcttgctccttctgcaagcccaagaaattcaccaccatgatggtcacactcaactgtcctgagctacagccacccaccaagaagaaaagagtcacacgcgtgaagcagtgtcgttgcatatccatcgacttggattaagtcaaagggggcacattcagcctgtcatagccatgccgagagccacacccaaaccacccgattcctacttggcttaaacctagaggccagaagaaccagcagttgcttcctggctggaggctgcttatgcatagagtatgcgcatgagtgtgcatgggtacctgtgggtgtttccaaacaccagcggaaacagcctctgcaggaaggcacttcctgttactgtgcttcagatggtcggaaatgctcacaccactggacccaacaccacaggggcagggctgtagatgactttgaccttgtgttccattggcctcctgggcaccaggatttcatttgagaatgaatactaacggaggaggtaactctgagggccgcattagactcggaacagtttgttcgtgctctcccacaacccattcctttctttgctctccctgaccttagtccatgttcttaaattaattcacttgatgtgagtgtaaatttctttcgtcttgtgaagaaccttcagagtgtggggagacaagtgataaaggcaaacagaacaggggattgacacaggagcattgagactgaggaccagtctggccagtgaaattcagtagcaagatgttcagagtttaaagattgttcccccccaaacaatatgagtcttgttttagcaaaggggctttactgatatttaaaagaacccagacagacagaggagaaatataatcagcaaaaaaaccaattctctgtgccggtatctgtgacctactgacaatatctgtaatccaatgttaagggtgaaatattgaccacttctgttttaagaaccaagtgaaaggaaaaaaaaaatatggccttctacttactttgcctctcaggaggatgactgagagcgttgttcgctagggtaagaaagacaaaacctcctaggcttagttttgctggattatcattgctttcccatcattcctgaaaaaatgcttcagagatgcagaaccttccaataaaatcgtgcttttcttgagaccatttgccagtaagggtcagtgttagacgagagagctgttgagagagctgatgagagaacagagacagagagagagagggccaatcccttagggaagcactagggtatattaacaggccacctacacccaatggatctatgtgacattgtaatcattatgcctactatggatgctgtcctctgaatacacatggctgcccaatgtctacttagcatctatgtaagggcccagagaaaggtgactgggtcttggtacattttggtttggctaagcaatactcttttaagactgacattctagctataaatgccccagatactttttttgccttttcctctcagagcgactagtcaagtgatatgtcatttggaaggcagacattcactgcctgctgcatgtgagttagacatgtctggggcttcttctgtttggcttttgttataggagagaaccagagaccatcaaagataccacagtcaaagaaccattgggagtaaagaaactttttgttttggtctagcccacccgcccatgtaacatcgaaacaggaaccatattacaaggcaaaagctatcttgaattcccaaaacactgggtctaattttgaaagtttaaaagtcactggtgatgactccacagtaagtgaacttgtgcgagcatagccgtgagtttcatttgtactgcgtgctccttcactgaatctttgaggcttccatatccatagccacatagtcacagggtggatttgattaggcccacacatacaaaggtgggtttggagggtggtgaagagggaaaaataagagaggatgaagatgaaaatatagacccacaccagagaggaaaaatgaccctcggtgctgaaaaacactgtgtcccatcttaattctgccacaaacatgcagtcttgctaaaaatcaacaacaacaataataaaaatgtttggcaattgcctcaaaattaacttctttgaaacgatcagcagcataagtgccctaaaagcacatcactggccaacggctgggacgtctgccttccttgccgtgcctagatcaagaccatcagaaaatgtgtccgctgccgtttattggagatgccccgtctgtcgctgattctggacgcaccagcgatgcaaggatggacactttctccaacattgccacagttacctttaggagcttgtaccacagtctctcttgtaagctggatttagatttggttcttgacggtagtagaaccaattttttttggcaagctttgttgcagtctccaccttacctgttaaataatgccagaaaccaaatatgaatcttacggcattcaattgtgcttggcactgaaagaggaaagccacacaccagataagtctgagtgcccctttgccattgtactcttcaaagtgagaaacctggaggaaggatagtctccatgtggaatgtgaataagcaaaagagttatggttatttaatgtaattaggaattctaggtccttcggttactgtgatttcgaatgttttctttctctgttttatacgacagcctctgagttggggcaaagaagaaacaggccgttgtatgttgctagagactttcgtcaggtcagggggacacacagtcttgtcacatatgaagagatgttaccaagtcaacgacaagccttattttttaacgttgaatgttccttaaaggctgacacttctgaagcaatgttaggaaagactttaaatgttattttgagagacttctgtgcgtatacaagcagataatgacggcatgttcagacaagcagaacatttctaaacgagaagtccgagctgaacgactgaaaagagattcctcgccatattgaatatcatctacattgtgtatttaatatactttaatcattttgaaacaacgaaggattatgcaggctatgacggaactactaccttgctatggatgagggttgggcaggatttaatggtctcatagaagctaatttggcttaaagttttatgaatctgtaactagaattttattttcaccctaataacattctatataacctttgccaaaaaagcaatcaataaattaacctcttctttctgtggcaaaaaaaaaaaaaa

SEQ ID NO: 2509 - DNA, 3380 bp, Rattus norvegicus
cggggcagccagcctacccaggttccctcctggagcctagctttgctacgagaacttcaggagcttaacacaaagcaggcaggggctccgggctggggcgggggatatcatggcccgcctcttcagtccccggcctcctcccagcgaagatctcttctacgagacttactacagcctgagccaacagtatccactgctaattctgcttctggtcattgtgctctgcgcgatcgtggcactgcccgccgtcgcctgggccagcggcagggagctgacctcagacccaagcttcctgacaactgtgctgtgtgctttgggtggcttctccctgcttttggggctcgcttcccgggagcagcaactgcagcgatggacacgacctctttctggcctcatatgggctgctttgctggctctgggctatgggtttctattcactgggggtgtggtgagcgcctgggatcaggtgtcctttttcctcttcatcattttcaccgtgtacgccatgctgcccttgggcatgcgggatgctgctgccgcgggggtcatctcatccctctcacacctgctggtccttggactgtaccttgggtggcggcctgagtcgcagagggatctgctaccacagttggcagcgaatgcggtgttgttcctgtgtgggaacgtggtgggagcataccacaaggcactgatggagcgagcattgcgcgccacgttccgggaggctcttagctccctgcattcacgccggaggttggacactgagaaaaagcaccaggagcacctcctcttgtctatccttcctgcctacctggcccgagagatgaaggcagagatcatggctcggctgcaggctggacagagctcacggccagagaacacaaacaactttcacagcctgtatgtcaagaggcaccaaggagtgagtgtgctgtatgctgacatcgtgggcttcacacggctggccagtgagtgttcccctaaggagctggtgctaatgctcaatgaactcttcggcaaattcgaccaaattgcaaaggagcacgaatgcatgcggatcaagatcctgggagactgttactactgtgtatccgggctgcccctctctctgcctgaccacgccatcaattgcgtgcgcatgggactggacatgtgccgggccatcaggaaacttcgggtagccaccggtgtggatatcaacatgcgtgtcggtgtgcactcaggcagcgtcctctgtggagtcatcgggctacagaagtggcagtatgatgtctggtcccatgatgtcacattggccaaccatatggaagcaggcggcgttccaggacgagtgcacatcacaggggccacgctggccctgctggcaggagcttatgctgtggagagagcagacatggagcatcgagacccataccttcgggagctaggggaacccacatacctggtcattgatccttgggctgaggaggaagacgagaagggcaccgagagaggattgctgtcttctctagaggggcacacgatgcgtccgtcactactgatgactcgttatctggagtcttggggtgcagccaagcctttcgcccacctaagccacgtcgacagtcctgcatccacatccactccactcccggagaaagccttcagcccccagtggagcctggaccggagtcgcaccccccgcgggctacacgatgaactggacactggagatgccaagttcttccaggtcatcgaacaactcaactctcaaaaacagtggaaacagtcgaaggacttcaacctcctgacgctctacttcagagagaaggagatggagaaacagtatcggctgtctgcgctccccgccttcaaatactacgcagcctgcaccttcctggtttttctgtccaacttcacaatccaaatgctggtgacaaccaggcccccagctctggccaccacctacagcatcaccttccttctcttccttctcctcctcttcgtctgcttctcagagcacctgacgaagtgcgtccagaaaggccccaagatgttgcactggctgcctgcgctgtctgtcctggtggccacacggccgggattgcgagtagccctgggcacagccaccatcctcctggtgttcactatggccgtcgtcagcctgctcttcttaccagtgtcgtcagactgccctttcctggctcccaatgtgtcgtcagtggcttttaatacttcctgggagctgccagcatccctgcctctcatcagcatcccatactccatgcattgttgcgtgctgggtttcctttcctgctccctttttctgcacatgagcttcgaactgaagctgcttctgcttctgctgtggctggtggcatcttgttccctatttctgcactcccacgcctggctgtccgactgcctcattgcccgcctttatcaaggctcattgggctccaggccgggggtactgaaggaaccgaaactgatgggagctatctacttcttcatcttcttcttcacactcctcgtcctggctcggcagaatgagtattactgtcgcctggacttcctatggaaaaagaaactgaggcaggagcgagaggaaactgagacaatggagaatgtactccctgcacacgtggcgccccagctcatcggccagaaccggcgcaatgaggacctctaccatcagtcgtacgaatgtgtttgtgtcctctttgcatccatcccagactttaaggaattctactcggaatccaacatcaaccatgaggggctagagtgtctgcggctgctcaatgagatcattgccgactttgatgagctgctctccaagccaaagttcagtggagtagagaagatcaaaactatcggcagcacctacatggcggccacaggcctaaatgccacccctgggcaggacacacaacaggacgctgagagaagctgcagccatctgggcaccatggtggaatttscagtggccctggggtytaagctgggtgtcatyaryawgcactcsytcawcaamkyccrchwkmdtrtrgsrykardccatggaccagtcgtagcwggggtgattggggcrcagaagccacaatatgacatctgggggaatacagtgaacgtggccagccgcatggagagcacaggagttctcggcaagatccaagtgaccgaggagacagctagggcymtgcaatccctgggttacacatgctacagccgaggtgtcatcaaggtcaagggcaaagggcaactctgtacctacttcctgaacacagacctgacacgaaccggatctccctcagcatcctagacacytgagctccccttctccaagatcctcaataaaatgtctccaggcatctgaaammwaraaaaaaaaaaaaaaa

SEQ ID NO: 2510 - DNA, 1968 bp, Rattus norvegicus
ggcacgagcggacgacaastgcwyswskgccccaatcaccagcgtgrctrtgtcccaccactggggatacagcmdkmdcawcggaccagagaactggcacaaggagttccccattgccaatggagaccgacagtcccctgtggacattgacaccgggactgcccagcatgacccttccctacagcctctgctcatatgttmcgataaggttgcttccaagagcattgtcaacaatgksyattymttyaamgwtgarttwsatgacwcmcakkamwttsyagtgytgwaagagggasccctcagtggctcctacagattgrtccagtttcactttcactggggstcatytgatggscagggctctgagcacaccgtgaacaaaaaaaaatatgctgcagagstwbwyttgkttcactggaacmccaaatwtggggattttggaaaagctgtgcascacccagatggactgsctgtyttgggtatttttttgaagaywsgasctgcctcacaakkcctwswkmarawhabyrmwgcamtgywytcmawwwrrhcrmaggggaaacktrcmgcctttgctaactttgawccttgctccyttcttcctgraaacttggactactggacawatcctggctytytgaccactccgcccctgmtgsmatststsacctgratastrctywagkaamccattacwktcakcagtkwdyarrtkkvtcatttccgtaaactgaacttcaattcggagggggaggctkaavaactgatggtggacwactggsgtccagbtcarccghtkaagamcagaaagatcaaggsgtcctttaaataaaatgaccctgcagctggggtccaaaargcmmaarwrwrrvwrmmwmwmtgtagctaagcmcagttccgccttggtgattcagatyccgactttksatytgmwattgtaggcctttttwcctctcacccattgtgsttactaataaawdrwraaaarrarrammmarrwrwmwmawrwrrwrrwarmawrrwrrmarrytgktggttgacttagggcatcctttctcagccacarcaatgcaatgcmaagaacagatatggcctcttgcttcwccacagccatagaataatgagtactcaggcctgtttattaaaatgctatttttaaamccatataaggtagaatgattgwttacaaatccacatcatgagacaaactgaggcaatttaggcaaatcaggtaaaacagtcatagttttatgkttattaattagatgaatgttcactattccaagatcttatattaaagaaaaacttttaaaaagcttatatatttgtagcaaagtyattcttaaatatgaattatgttgtaacttagtgacttttgatktctrgaggtgtaaatgaagatgtaaaaattgatatagttgtgatacagagtatawttccyttcagataacttmccataacctaatggataatgtattttagatatattctctaataaaattcagaactctawwwwrrrwwmmwwawwgtctgcgccacagggacagaaatgggtgaacaaatgactgcctactgggttcatatcaattcattatatatagtcagccattaaaattgaagcaaatccctgagcactggtgtgatcctttgagagtcctatgaaactcgtccagagagtcagaactgatggtgccacaaagggagaagcttcttccctcaaatgcacccccataacatttttccttctcacatgcccaaagtcatgggagagagatcaactaaccacagactcaagatctctgcaattgtgagcgacgaaacatttcttcttttaaagttgcatgtcagacgttttgtatataaggctaattaccatgtagcttcattgctttttattaagtaagctgttcattttatagagcaagacaaaagtgagctgatggttctggaactgaaaaatccattttt

SEQ ID NO: 2511 - DNA, 2059 bp, Rattus norvegicus
ctccaagagagtaagacactgagccagacacctttcctggctggccaactgaactcacctgaggctgaggcagcagaaggccattatccatggactcycacgaagtgctgctggctgccacatacctgctgggaacactggctgctttctgccttggacagtctggaaggggcttcgtaggtgcccaggtgatgctaagtggctccaactccaagtgtcagggtctagtggaggtccagatgaatggaatgaaaacggtgtgcagttccagttggaggctgagccaggayctctggaaaaacgccaatgaggcctctacagtgtgccagcagctgggatgtggtaaccctctggcccttggccatttgaccttatggaacagacccaagaaccagatcctctgccaaggacccccgtggtctttctccaactgcagcacaagttcgctgggccagtgccttccgctgagcctggtctgcctagagccccagaagacgacacctctacccacaaccaccctacccaccaccatgccggagcccacagcccctcccagattgcagctggtgccaggacacgagggcctgaggtgcacaggtgtggtggaattctacaatggcagccggggtggcaccatcctctataaggccaaggccaggcccgtggacctggggaacctcatctgtaagtctctgcagtgtggctctttcctgacacatctgtcccggatagagacagcaggaactccagctcctgcagagctgagggaccccaggcccttgccaattcgatgggaggcccagaacgggagctgcacctcactacagcaatgcttccagaaaacaacggtccaggagggcagccaggcactcgcagtcgtctgctctgatttccagcccaaggttcagagccgcctggtggggggcagcagcgtgtgtgagggcatcgctgaagttcgccagaggtcacagtgggctgccctgtgtgacagttctgcagccaggggtccaggacggtgggaggagctatgccaagagcagcagtgtggcaacctcatctccttccatgtgatggatgctgacaggacctccccgggggtcctctgtacccaggagaagctgtctcagtgttaccagcttcagaaaaaaacccactgcaagagggtattcatcacatgcaaagacccaaacccagtgggcctggccccaggcactgtggcaagcatcatcctgaccctggtactcctggtggtgctgatggtcatgtgcggtcctctgatctacaagaagctggtgaagaaatttcgtcagaagaagcagcgtcagtggattggtcccacaggagtgaaccagagcatgtctttccatcgaagccacacggcaactgtgcggtcccaggttgagaacccggcagcctctcacrtggacaatgagtacagccagcctcccaggaactcyygcctgtcggcttatccagctctggaaggggccctacaccgctcttccacacaacctgacaattcctctgacagtgactatgacctgcaagtggctcagarrctktaaaagaacttaaggccagcaacaaagaccaagcacatccctctgtcctgaggaagcatttaccactctgagtactgcccacttccacctcagccagaacttggacagaagccaaggtcctttggacaaggtcctgggccctgcagtggcaggccagctcctatatcctgtggccatggtagcctggctgcttcctccaaaagccaaaactcagcagacagagccttcaagcaaccgatccttgcaagcagagaccccagtatccagaggrgtcccaatcctttggggagcaatgaccagcgaggttgactttctccttggactcttgacgccatgaacgaatgatgtgatacacccaagtgggatacgtacaagaamwmmwwwmwmaarcatatttttaatatatctttgtaawtaawrrwwwwwmwamwwwccaagaacatgagtactccgggctgctgtgttcaggcccatcctcccgaccttctaagagacat

SEQ ID NO: 2512 - DNA, 2197 bp, Rattus norvegicus
ggaacacaaccgggaccggcaagaagccgggacctcccctcgttgcaggaactgcccgttcagtgagcactttagacctggaggccgcgagccccacccgggagcaggcggctgcgcggcttcagcaccacggacagcgctcgacccgcagccctagtatccgagaggctgcgcgctatgctggctgcatggccgggcactccaactcaatggcgctgttcagcttcagccttctttggctgtgctcaggggttttgggaactgacacagaggagcggctagtggagcatctcttagatccctcccgctataacaagctgattcgtccagctactaacggctctgagctggtgactgtacagctcatggtatcattggctcagctcattagtgtgcacgagcgggagcagatcatgaccaccaatgtctggctgacccaggagtgggaagattaccgcctcacatggaagcctgaggacttcgacaatatgaagaaagtccggctcccttccaaacacatctggctcccagatgtggttctatacaacaatgctgacggcatgtacgaagtctccttctattccaatgctgtggtctcctatgatggcagcatcttttggctaccacctgccatctacaagagtgcatgcaagattgaggtgaagcacttcccatttgaccagcagaattgcaccatgaagtttcgctcatggacctacgaccgtactgagattgacctggtgctcaaaagtgatgtggccagtctggatgacttcacacccagcggggagtgggacatcatcgcactgccaggccgacgcaacgagaacccagacgactccacctatgtggacatcacctatgacttcatcattcgtcgcaaaccactcttctacactatcaacctcatcatcccctgcgtactcatcacctcgctggccatcctggtcttctacctgccctcagactgtggtgaaaagatgacactttgtatttctgtgctgctagcactcacggtgttcctgctgctcatctccaagattgtgcctcccacctccctcgatgtaccgctggtgggcaagtacctcatgtttaccatggtgctagtcaccttctccatcgtcaccagcgtgtgtgtgctcaatgtgcaccaccgctcgcctaccacgcacaccatggccccctgggtcaaggtggtcttcctggagaagctgcccaccctgctcttcctgcagcagccacgccaccgctgtgcacgtcagcgtctgcgcttgaggaggcgccagcgagagcgtgagggcgcaggcgcgcttttcttccgtgaaggtcctgcggctgacccatgtacctgctttgtcaaccctgcatcagtgcagggcttggctggggctttccgagctgagcccactgcagccggcccggggcgctctgtggggccatgcagctgtggcctccgggaagcagtggatggcgtacgcttcattgcggaccacatgcgaagtgaggatgatgaccagagtgtgagggaggactggaaatacgttgccatggtgatcgaccgcctgttcctgtggatctttgtctttgtctgtgtctttgggaccgtcggcatgttcctgcagcctctcttccagaactacactgccactaccttcctccaccctgaccactcagctcccagctccaagtgaggtctcattcatttgcagctcctcaccccgtgacccctgcggttcagtactgggtgcaagatggatctctccccactccactgaagcctgcttcacacctccgttcacacatagtcctccagcctggaggctggacccgctgccttgtggtcgagccttctcctttccctctgagctcgttcaggcaggagtgccaatggtgggggccacggctggtaagtagaggccagagatcacagagccacctaccccgatgagggtgctggagaaggcgccaagaaagagacagagttatctgtgacctccaagtcatcggagaggaggaggtaggataaggggctcagactctggcagagtgcggctagtacttggcgcccacccacttaagtgagcgacactggtctgggaggactcgaagtgttggggagctctcttgggagctcggtctcccaccctgtacctcagagggctccagacccgggcttcaggttcccttctgccagtgc

SEQ ID NO: 2513 - DNA, 1724 bp, Rattus norvegicus
atggcagggcctgtgcccacactggggctgctggctgcccttgttgtgtgtggcagctggggcctgaatgaggaacaaaggctgatccagcacctgtttgaggaaaaaggctacaacaaagaacttcggccggtggctcgaaaggaggacatagtggatgtcgccttaagtctgaccctctccaacctcatctccctgaaagaagtggaggagaccctcaccaccaatgtgtggatagatcatgcatggatagacagccggctacaatggaatgccaacgagtttgggaacatcaccgtcctgcgcctgccctctgacatggtgtggctaccagaaattgtactggagaacaacaatgacggctcattccagatttcttacgcctgcaatgtgcttgtttctgactcgggccatgtgacctggctgccacccgccatcttccgctcctcctgccccatctcggtcacctacttccctttcgattggcagaactgctccctcaaattcagttcactcaagtataccgccaaggagatcagacttagcctgaagcaggaggaggaagacaaccgcagttaccccattgagtggatcatcattgaccctgagggtttcacagagaacggtgagtgggaaatagttcaccgggcagccaaggtcaacgtggaccccagtgtcccaatggacagcaccaaccaccaagacgtcaccttctacctcatcatccgccgcaagccgctcttctacatcatcaacatcctggtaccctgtgtgctcatctccttcatgatcaacctggtcttctacctgccaggcgactgtggagagaagacctcggtggccatctcagtgctcctggcccaatctgtcttcctgttgcttatctccaagaggctgccggccacatccatggccattcctttggtaggcaagttcctgctttttggcatggtgctggtcaccatggttgtggtgatctgcgtcatcgtgctcaacatccacttccgaacacccagcacgcatgttctgtctgagggagtcaagaagttcttcctggagaccctgcccaaactcctgcacatgtcccgcccagaagaggaagacccgggccccagggctctcatccggaggaccagctctctgggayacrwskccaaggcagaggagtacttctcacttaagtcccgcagtgacctcatgtttgagaagcaatcagagcggcatgggctggcccggcgcctcaccacagcccgcaagccaccagcaagytytgagcaggtccaacaggagcttttcaatgagatgaasccagccktggatggggcgaacttcatcgtcaaccacatgrgggaccagaacagttacaatgaggrgaaggacaactggaaccaggtggcccgcacagtggaccgtctctgcttgtttgtggtgacgcccktcatggtggtgggcacagcctggatcttcctgcagggtgtytacaaccagcccccaccccagcctttccctggggaccccttctcctatgatgaacaggacaggcgcttcatttagagcaggcatgagtaaaacagtcaggcagacggcggtctgagaattgtccttgagcttgtgcctatctggggctgtgtggctgggcagaggtcatgggaggaagagctccctcccaggagcaattcctttctaaataaaggagagagacacttgaaaaaaaaaaaaaaaaa

SEQ ID NO: 2514 - DNA, 6343 bp, Rattus norvegicus
ccctcccttccccttctcctcctctcccttggagagcccgggcaggcactgccctgcagccccagtgacaggaggagaccatactccccgacagcgccatggcccagattctgccaattcgctttcaggagcatctccagctccagaacctgggtatcaacccagcaaacattggcttcagtaccctgactatggagtcagacaaattcatctgcattagagaaaaagtgggagagcaggctcaggtggtgatcattgacatgaatgatccaagtaatccgattcgaagaccaatctcagcagacagtgccatcatgaatcctgccagcaaagtgattgcactgaaagctggaaaaactctacagatatttaacattgaaatgaaaagtaaaatgaaggcccacaccatgaccgatgatgtcaccttctggaaatggatctctctgaatacggttgctcttgttacggataatgcagtttatcactggagcatggagggggagtctcagccagtgaagatgtttgatcgtcattccagcctcgcagggtgccagatcatcaattaccgtacagatgctaagcagaagtggttgctcctgactggcatatctgcacagcaaaatcgcgtggttggagctatgcagctgtattctgtagacaggaaagtctctcagcccattgaagggcatgcggcgagttttgcacaatttaagatggaaggaaacgcagaagaatcgacgttattttgktttgctgtgcggggtcaggcaggggggaagttacatatcattgaagttggtacaccacccacaggaaaccaaccctttccaaagaaggcagtggatgtcttctttcctccagaagcacaaaatgattttcctgttgcaatgcagatcagtgaaaagcatgacgtggtgttcctgattaccaagtatggttatattcacctctatgaccttgagactggcacgtgcatctacatgaacagaatcagtggagaaaccatctttgttactgctcctcatgaagccacagctggaataataggagtcaacagaaagggacaagtcctatcagtttgtgtggaagaagagaacataattccttacatcaccaatgtcctacaaaatcctgatttggctctgagaatggctgtgcggaacaacctagctggtgcagaagagctcttcgcccggaaatttaatgctctcttcgcccagggaaactactcagaggctgcaaaggtggctgctaatgcaccgaagggaatccttcgtactccagataccatccgtcgattccagagtgtcccagctcagccaggtcaaacttcacctctgcttcagtattttggaatccttttggaccaaggccagctgaacaaatacgagtccttagagttatgtagacctgtccttcagcaagggcggaaacaacttttggagaaatggctgaaagaagataagctggaatgttctgaagaactgggtgatctcgtaaaatctgtggacccaacgttagcactgagtgtatacctcagggccaatgtccctaataaagtcatccagtgctttgcagagacaggtcaagtccagaagattgttttatatgctaaaaaagttggctatactccagactggatctttctcctgagaaatgtcatgcggatcagtccagatcaaggacagcagtttgcccaaatgttagttcaggacgaagaacctcttgctgatatcacacagattgtggatgtctttatggaatacaatctaatccaacaatgtactgccttcttacttgatgctttgaagaataatcgcccttctgaaggtcctttgcagacgcgattgcttgagatgaaccttatgcacgcacctcaagttgcagatgccattctagggaatcagatgttcacccactatgaccgggctcacatcgcccagctgtgtgagaaggcgggcctactgcagcgtgcattagaacatttcaccgacttatatgatataaaacgagcagtcgttcatacccatcttctcaaccccgagtggttagtgaattactttgggtccttatcagttgaagattccctagaatgtctcagagccatgctgtctgctaatattcgtcaaaatctacagatctgggttcaggtcgcttctaaatatcatgaacagctgtcaactcagtccctgattgaactcttcgagtcattcaagagttttgaaggcctcttttattttctggggtccattgttaacttcagtcaagacccagatgtgcactttaaatatattcaggcggcttgcaagactggacaaatcaaagaggtggaaagaatctgcagagagagcaactgctatgatccagagcgcgtcaagaatttcctcaaggaggcgaaactcacagatcagttgccactcatcatcgtctgtgaccgctttgacttcgtccatgacctggtgctgtatttatacagaaacagtcttcagaagtacatagagatatatgtccagaaagtaaatccaagtcgacttcctgtggttattggaggattgctggatgttgactgctctgaagatgtcattaaaaatttgattcttgttgtgagaggtcaattctctactgatgagcttgttgctgaagttgagaaaagaaacagattgaagctgcttcwysmkkggcttgaggctagaattcatgagggctgtgaggagcctgctacacacaatgcgttagccaaaatatacatcgacagcaataacaacccaragagattccttcgtgaaaacccctactatgacagtcgtgtcgtgggaaagtactgtgagaagagagacccacatctggcctgtgttgcttatgaacgtggccagtgtgatctggaactaatcaacgtttgcaatgagaattccctcttcaaaagtctttctcgctacctggtccgtcgaaaggatccagagttgtggggtagtgtgctactggaaagcaatccatacagaagaccattaattgaccaggtcgtacagacagccttgtctgaaactcaggacccagaagaagtgtcagtaactgtcaaggcttttatgacagcagatcttcctaatgaactcattgagctgctggagaaaattgtccttgataactctgtattcagtgaacacaggaatctgcaaaacctcctcatcctcactgcaattaaggctgaccgaacccgagttatggagtatattaaccgcctggacaattatgwtgcgccagatattgccaacattgccatcagcaatgagctcttcgaagaagcatttgctattttccggaagtttgatgtcaatacttcagcagtgcaggtgttaattgaacatattggaaacctggatcgtgcatatgagtttgctgaacgctgcaatgagcctgctgtttggagtcaactcgcaaaagctcagttgcagaaagggatggtgaaggaagccattgattcttacatcaaagcagatgatccttcgtcttacatggaagttgttcaggccgccaatactagtggaaactgggaagaattggtgaagtatttgcagatggcacgcaagaaggcccgagagtcctacgtggagacagaattgatatttgcactggctmaarcwwaccgtcttgcagaattagaagagttcatcaatgggccaaataatgctcatattcagcaagttggtgaccgttgttatgatgagaaaatgtatgatgctgctaagttgttgtacaataatgtttctaactttggacgtttggcgtctaccctagttcaccttggcgagtatcaggcagcagttgatggtgctagaaaagctaatagtactcgaacatggaaagaggtctgctttgcctgtgtagatgggaaagagtttcgccttgctcagatgtgtggactccatattgttgtgcatgcagatgaattagaggagcttatcaactactatcaggatcgtggatattttgaagaactcatcaccatgttggaggcagccttgggactagagcgagctcacatgggaatgttcacagagctagcaattttgtattctaaattcaagccacagaaaatgagggaacacctagagttgttttggtcaagagtgaatattcctaaggtgctgagagccgcagagcaagcccatctttgggcagagctggtgtttctgtatgacaagtatgaagagtatgataatgccatcatcactatgatgaatcaccccaccgacgcatggaaggaagggcagttcaaagacatcatcaccaaggtggctaaygtggaactgtactacaaagcaatccagttytacttagaattcaagcccttgttgttaaatgacttgctcatggtgctgtctccacggttgghtcatactcgtgcagtcaattatttcagcaaggttaaacagctaccactggkgdwaccatatttacgctcagktyaraaccacaacawcaagkccgkgawcgaatscstgaacaacctctttatcacagaggargattaccaggctctgcgaacatcaatagatgctkatgacaactktgacaacatctcacttgctcaacgtttggaaaaacatgaactcattgaattcagaagaatwgctgcttatctcttmaaaggaaacaatcgctggaaacagagtgtggagctgtgcaagaaagacarsctttacaaggatgcaatgcagtatgcctctgaatcgaaagacacagaattggctgaagaactcctgcagwggtttctgcargaagagaaragagaatgctttggrgsttrkctcttcacctgcyacgwksttttaaggccagatgttgtcctggraactgcwtggrgacataatatcatggwttttgccatgccctwtttcatccasgtcatgaargagtrtttgaccawggtggataamwtagatgcttcggagtcactgwgawaagwagargaacaagctacagagacacagcccwttgwttatkgtcagccccagctgatgctaacagccggacccagtgtggcagtccctccccaggcaccttttggttatggwtatactgcaccaccatatgggcagccacagcctggctttgggtacagcatgtgagacggaagctgatcccgtagtctcctattttcatactgaagcatcgtccacccacttctcagtttataaacgggaaacaggcaacgtgttcttgtaacctwtacttcatgaaggactacytttttgwtctaactatmgaytcggatcgcctakgttaaaactttatttkcacattccgcatcattagaccttcttttcaaaggggaatagtactcacgtgggctttttctycccctcattctttgaagaactgmttactattcaatctattgtgaagaacctgatttgcactctgtagtgttwaaagrammaaagaaactytaatattgaatctcttaaatttagtgtatgtaaacagctytcactatgwatkststaaawgcayyymattcycwttwattcaaagaaaagctamcgtkraaatmstgcymtgtgmccatgcaagaytgtcagarccawcmaagacmacrckwatcagcatatcttacaytgsrakcacagsgctckccaawttatttkraaatgcatacrgacaacttgcstgatttttwwttttttwaaaasgagkatcacaggccctgkaacctatgcaggtttccccawtatgcatatagaaaatgctagtgtgttgctcacttcatgtgtaacaggtgccctcatgttgtgctgtatcctgtgcyttyyctgtgrgmccattccattcaggaacaaagagchccatgactgcacacgtgtgtatttactaacccttccstgaggtgtgkgyatgtwggatattgtggtgttttasatcastgrgtgyacagaagrgrgaatwcaaacaagatattgctgttcttcagttttgttygtggaatttgaamttmcyccaatttaaaataaattaytggackgtggaaawaammwrwaraawwrmarwwttaattaaatacatctcaaaaccagaaraawrrwrrwwwwcatagtttctactggctactgctggagcatcacagagaggcataragggtgaagaagacatgcattatggtattacattcctccagttatgagagattgtgcagccgwcactgaataatgcgcccctcacatctcccaacattttaacctagtarcactcgggttttaagcatttyccctaactaaataagktataggtgttatattgacttgaaataaaggtgtatttttttttaaagtwaaaaaaaaaaaaaaaa

SEQ ID NO: 2515 - DNA, 1080 bp, Rattus norvegicus
gtgccggcggcggcccagcgtgaaggcgcggaggcggccatggcaggcaacttcgactcggaggagcggagtagctggtactggggccgcttgagccggcaggaggcggtggcgctattgcagggccagcggcacggggttttcctggtgcgggactcgagcaccagccccggggactatgtgctcagcgtctccgaaaactcgcgcgtctcccactacatcatcaacagcagcggcccgcgccctccagtgcctccgtcgcccgctcagcctccgccgggagtgagtccctccaggctccgaataggagatcaagaatttgattcattgcctgctttactggaattctacaaaatacactatttggacactacaacactgatagaaccagtttccagatcaaggcagggtagtggagtgattctcaggcaggaggaggcagagtatgtgcgggccctctttgactttaatgggaatgatgaagaagatcttccctttaagaaaggagacatcctgagaatccgggataagcctgaagagcagtggtggaatgcagaggacagcgaaggaaagagggggatgattcctgtcccttacgtggagaagtatagacccgcctccgcctcagtatcggctctgattggaggtaaccaggagggttcccacccacagccactgggtgggccggagcctgggccctatgcccaacccagcgtcaacactccgctccctaacctccagaatgggcccatttatgccagggttatccagaagcgagtccctaatgcctacgacaagacagccttggctttggaggtcggtgagctggtaaaggttacgaagattaatgtgagtggtcagtgggaaggggagtgtaatggcaaacgaggtcacttcccattcacacatgtccgtctgctggatcaacagaatcccgaggaggacttcagctgagtatagttccacactttgctgacagatgagaacaatctgtttccacccccaattgccgtctatacaattttcttacaggtgtcaaagcagtctagtttatataagcatcctgttgcctgtgatctt

SEQ ID NO: 2516 - DNA, 1768 bp, Rattus norvegicus
gctgccttcactatggatggtgtgagcacagccatcttgcttctcctcctggctgtcatctctctgtccctgaccttcacctcatggggcaagggccagctccctccaggacccaagcctctcccaatcctaggaaacctgctgcagcttcgctcccaagacttgctgacctcactcaccaagcttagcaaggactatgggtcagtgttcacggtgtacctggggcccaggcgtgtgattgtcctcagcggatatcaaactgtgaaggaggctcttgtggacaaaggggaggagttcagtggccgaggctcataccccatctttttcaacttcaccaagggcaacggcatcgccttctccgatggagaacgctggaagatcctccgaaggttctctgtccaaatcctgaggaactttggcatgggaaaaagaagcatcgaggagcggatcctggaagaaggcagcttcctgctggacgtgctgcggaaaacggaaggcaagccctttgaccccgtgtttatcctgagccgctcggtctccaacattatttgctctgtcatcttcggcagtcgtttcgattatsacgakgaacggctgctcaccattatccactttatcaatgacaacttccagattatgagcagcccctggggcgagatgtacaacatcttcccgagtctcctggactgggtgcctgggccgcacagacgcgtgttccggaactttgggggcatgaaagatctcatcgcccgcagcgtccgcgagcaccaggactccctggaccccaactctccccgggacttcatcgactgcttcctcacaaaaatggtacaggagaagcaagacccactgagccacttcaatatggacaccctgctgatgaccacacacaacctgctctttggtggaacggagactgtgggcaccactttacgccatgccttcctcattcttatgaagtaccccaaagtgcaagcccgtgtgcaggaagagattgattgtgtggtgggacgttcgcggatgcccacgctggaggrmcgtgcatccatgccttacacagacgcggtgatccacgaagtgcagcgctttgcagacgtcatccccatgaacctgccccaccgcgtcattcgggacacacctttcaggggcttcctgatacccaagggcacagatgtcatcacgctccttaacaccgtgcactatgactccgaccaattcaagacccctcaggagttcaatcctgagcattttctggatgccaatcaatccttcaagaagagccccgccttcatgccattttcggcgggacgccgactgtgtctgggagagccactggcacgcatggagctgttcatatacctcacctccattctccagaacttcacgttgcatccgctggtggagcctgaggacatcgacctgaccccgctcagctcagggctgggcaatttgccaaggcctttccagttgtgtatgcgcattcgctgagtactgcaccaggggactgctctggccctcttccaggggtttcactgttgtgggcctccattgacgtctctctcacgttcccttccctaaacccggggcctgccacgtgtcggtactttacccttcctatcttaagcgcatcttcatggaaaaaatgacgtgacaaaggggaaatacccatcttatacgcacagaccctgttctgcgatgcacccttttcctggctgtttgtatcatttcctagtaaataccttactagtaaaaaaaaaaaaaaaaaaaa

SEQ ID NO: 2517 - DNA, 1786 bp, Rattus norvegicus
gaagaggtgtgctcccacacgcagggagagaagctacctaatttcagaacagaagcacagagaatcggaacgttgagcctattagggtctactgaaaattaccaaccgcaattaactgtaatttttgtgagactcagttctttccaagaaacatctaacaactgaggcaggcaaacgtcagctctgggcttttcagtgttgtgttgaggactcaacggttttcatcttcccacgctgtctcgggctgggtgcccagaaaggaaacccaggcaccccattcctggcctctgtctcccgcaccctatcccttcacagcctgtgctctaggggactggagatttccaaaacctgacccgatccctccccagttcagttccttctactgctttgggtggaaggctggtcgttgtgttaaaaggcaggaagggagaaagttgcatttaaactttaggagctgcgtcacggcagtctcctggagaaagctccgccgaacgggacagattctttttgcaacttggaggcgccgggcgtggggaggaggcggcgcgcggggcgggggcgcgcggggccggggtgcaggcggggacgcggggtgacgcgggcccgggccgctgtagcacacaggggctcggtctctcggcttcaggcggagtccggctgcactaggctgggagcgcggcgggacgcgaaccgggaggctggcagcccgcgggcgagccgcgctggggggccgaggccggggtcggggccggggagccccgagagctgccgcagcggggtcccggggccgcggaggggccatggctgccggcagcatcacttcgcttcccgcactgccggaggacggcggcggcgccttcccacccggccacttcaaggatcccaagcggctctactgcaagaacggcggcttcttcctgcgcatccatccagacggccgcgtggacggcgtccgggagaagagcgacccacacgtcaaactacagctccaagcagaagagagaggagttgtgtccatcaagggagtgtgtgcgaaccggtacctggctatgaaggaagatggacggctgctggcttctaagtgtgttacagaagagtgtttcttctttgaacgcctggagtccaataactacaacacttaccggtcacggaaatactccagttggtatgtggcactgaaacgaactgggcagtataaactcggatccaaaacggggcctggacagaaggccatacwgtwtstkmsrawgkctgctwmrakctgwctcyctttagacwytgtcactctcaggcagtcccctgtggtagagcttgtagaacaggcctgtgtatactgcagggagttcctccatgctgaggtcaatcttgtcaaaccyttccctgtgtccgtatagtagtagcctagccaccctgctggtgatgggggttgtgtgtttagtcctggccaggctttctagatccatccattcacacttcaagcattcytgctggcagaagttgatggtgaaggaacgcggctgcaggcggcagatcaggtmtcatgtctgacatcccaaaggccccagggctcytgtgttgctgccggatgctcaacagagacytgaattctgacttgacaccagtctcttcaaacacctctcggactgctgtgtctccaatatcttctccaggctctgacaggcytcctggaaacttccacatgtttttcaatttatttcgatcttgtacaaccagtactttcctggtgctaacatcaaatacggcacctgcaacccctaccctcgtg

SEQ ID NO: 2518 - DNA, 4734 bp, Rattus norvegicus
cggaggtagtggtggtagtggtggcagcagctccgagcgggctccgggactcaagcgcagcggctagcggacgcgagactgggaggatcccctccgccccccacaccacctcggctgcaggcgcgagaagagctctcgcggcgccatcaggagcaggaggggaccggctcgggcggctgctccgtcggcctccggagagcgcgggcaccgggccagcaggccgcgtcgcgctcaccatggtcagctgctgggacaccgcggtcctgccttgcgcgctgctcgggtgtctgcttctcacaggatattgttcagggtcgaagttaaaaggaccagaactgagtttaaaaggcacccagcacgtcatgcaagcgggccagactctctttctcaagtgcagaggggaggcagcccactcctggtctctgcctactacagtgagccaggaggacaaaaagctgagcgtcactagatcggcctgtggaaggaataacagacaattctgcagcaccttgaccttgaacatggcgcaggccaaccacacgggcctctactcctgcagatacctgcctaaatccacctcgaaggaaaagaaaatggaatctgcaatctacatatttgttagtgatgcagggagtcctttcatagagatgcacagtgacatacccaaactcgtgcacatgacagaaggaagagagctcatcatcccctgccgggtgacgtctcccaacatcacagtcactctaaaaaagtttccatttgacgctcttacccctgacgggcaaagaatagcgtgggacagtaggagaggctttataatagcaaatgcaacgtacaaagagataggactgctgacctgcgaagccacagttaacgggcacctgtaccagacaagttatctgacccatcggcagaccaatacaatcctagatgtccaaataagcccgccgagccccgtgagattcctccgtggtcaaactcttgtcctcaactgcaccgtcaccacggacctcaatacaagggtgcagatgagctggaattaccctggtaaagcaactaagagagcatctatcaggcagcggattgaccaaagcaatccccacagcaatgtgttccacagcgttcttaagatcaacaacgtggagagccgggacaagggactctacacttgtcgtgtgaagagtgggtcgtcattccggactttcaacacctctgtgcatgtgtatgaaaagggatttatcagcgtgaagcatcggaagcaacaggtgcaggaaaccatagcaggaaaacggtcccatcggctgtccatgaaagtgaaggccttcccctcgccagaagtcgtatggttaaaagatggcgtacccgcaacggagaaatctgctcgctattcggtgcatggctactcgttaattatcaaagatgtaactgccgaggacgcaggggactayacraksttgctgggcataaaacagtcaaagctatttagaaacctcacagccactctcatcgtaaatgtgaaacctcagatctacgaaaagtccgtgtcgtcccttccaagcccacctctctacccactgggcagcagacaagtcctcacttgcaccgtgtatggcatccctcagcctaccatcaagtggstgtggcacccctgtcactacaaccactccaaagaaaggaatgacttctgctttgggagtgaagaatccttcatcctggattccagcagcaacataggaaacagaatcgagggcatcactcagcgcatgatggtcatagaaggaaccaataagacggttagcacattggtggtggctgactctcggacccctggaagctacagctgcaaggccttcaataaaatagggactgtggrgagagacataaggttttacgtcacasatgtgccaaacggctttcacgtttccttggaaaagataccaaccgaaggagaggacctgaaactgtcctgtgtggtcagtaaattcctgtacagagacattacctggatcctgctacggacagttaacaacaggaccatgcaccatagcatcagtaagcaaaaaatggccaccactcaggactactccatcactctgaaccttgtcatcaagaatgtgtctctggaagactcgggcacctatgcctgcagagccaggaacatatacacaggggaagasaysmkkcggaagacagaagttctcgttagagatttggaagcgccactcctgcttcaaaacctcagtgaccacgaggtgtccatcagtggctccacgaccttakactgtcaagctagaggtgtccctgcgcctcagatcacttggttcaaaaacaaccacaaaatacaacaagaaccgggaattattttaggaccaggaaacagcacgctgtttattgaaagagtcacagaakaggatgagggtgtctataggtgccgagccaccaaccagaagggggtcgtggaaagctcagcgtacctcaccgtgcaaggaacctcagacaagtcaaacctggagctgatyaccctcacgtgcacgtgtgtggctgcgacactcttttggctccttctaactctcttcatccgaaaactgaagcggtcttcttccgaagtaaagacggactacctgtcaatcatcatggacccagatgaagtccccctggatgagcagtgtgaacggctgccctatgatgccagcaagtgggagtttgcgcgggagagacttaaactaggcaaatcactcgrgagaggggcttttgggaaggtggttcaggcytcggcatttggcattaagaaatcacccacctgccrgactgtggctgtgaagatgttgaaagagggggccacagccagtgagtacaaagctctgatgaccgaactcaagatcttgacccacatcggccatcatctgaatgtggttaacctcmtgggagcmtgcaccaagcawggmggkcckctgatggtgatcgtggaatactgcaaatatggaaacctgtccaactaccttaagagcaaacgtgacttcttctgtctcaacaaggatgcagccttgcatatggagcccaagaaagaaaagctggagccagacctggagcaggaccagaaaccccgcctagacagtgtcagcagcagcgagagtttcaccagctccggcttccaggaagataagagtgtgagcgatgtggaaggaggcgaggattacagtgagatctccaagcagcccctcaccatggaagacctgatctcctacagtttccaagtggccagaggcatggagtttctgtcctccagaaagtgcattcatcgcgacctggcagcacggaacatccttttatctgagaacaatgttgtgaagatttgcgactttggcctggcccgggatatttataagaaccctgattacgtgaggagaggagatactcgacttcccctaaaatggatggctcccgaatccatctttgacaaggtctacagcaccaagagtgacgtgtggtcctacggagtgttgctgtgggagatcttttccttagggggttctccatacccaggagtgcaaatggatgaagacttctgtagccggctgaaggaaggcatgcgcatgagaacaccagagtatgccacacctgaaatctaccaaatcatgctggattgctggcacaaagaccccaaagaaaggccccggtttgctgaacttgtggagaagctcggtgacctgcttcaagccaatgtccaacaggatggtaaagactacatccccctcaacgccatactgactagaaacagtggcttcacatactcagtccccaccttctcagaggactttttcaaggatggtttcacagatccaaagtttcattctggaagctctgatgatgtgagatacgtaaacgctttcaaattcatgagcctggaaagaatcaaaacctttgaggagctttcaccaaatgccacctccatgtttgaagactatcatctggataccagcagtctgctgacctcccccttgctgaagcgattcacctggactgagaccaagcccaaggcctcaatgaaaatagacctgagaattactagtaaaagcaaggaggcggggctttccgatctgcccggacccagcttctgcttttccagctgtggccacatcaggcctgtgcgccaggaggatgaagacgaccctgagctggggaaggaatcctgctgctctccgcccccagactacaactccgtggtgttgtactcctccccgcctgcttagtgcttctcacaagccccagacaacagcctctgacagtattatacatatatgagtttacacctattccgctcctcgggagccagctgcttctcgtgacttttaatcgtgctttttgttttgtttgttgtcgctgttttgactaacaagaatgtaacccccagatagagccacgtgaggaaaacactattgttcaatcctcctgtgactccacgttagagaaatcctttctaagtcccaacggctcggctcacctgcttcatccccccaaagcctcagggtaacttggacaggaaggtgctggtgccgccccgcccacgctggccatggccccacccaccctccctgcagctgtgggaccagacccagtaagtcattagctcagggcagcgtgctctgggtccctttctgaggaaagggagaacagcaaacgagagaggcacaggaaaaggccgtgggctgcatcctgtggagccggtgcaggagaggg

SEQ ID NO: 2519 - DNA, 4949 bp, Rattus norvegicus
  misc_feature (4277)..(4277): n is a, c, g, or t
  misc_feature (4284)..(4284): n is a, c, g, or t
  misc_feature (4299)..(4299): n is a, c, g, or t
gcggccgcggaagttctctgcagctcagtttcctctccctcgctgagcgcctgaaacaggaagtcagtcagttaagctggtagtagcagcagaggcagcttctgagaggccacaggcggcaggtctcagcctagggcccttaactgctttgctggagtgtccgtcctgggagtggttgctgacccagcccaggagacccatgcctgccatggtccctgggtggaaccatggtaacatcacccgatccaaggcagaggagctactttccagagctggcaaggacgggagcttccttgtgcgtgccagcgagtccatcccccgggcctacgcgctctgcgtgctgttccggaattgcgtttacacttacaggattctgcccaatgaggacgataaattcactgttcaggcatccgaaggtgtgcccatgaggttcttcacgaagttggaccagctcatcgagttttacaagaaagaaaacatggggctggtgacccacctgcagttccctgtgcctctggaggaggaggatgctattgatgagcctgaagaggacacagaaagtgtcatgtcaccacctgagctgcctcccagaaacatccctgtgtctggtgggccctgcgaggccaaggaccttcctcttccaacagagaacccccgagctcctgaggtcacccggctgagtctctccgagacactgtttcagcgtctacagagtatggataccagtgggctcccggaggagcacctgaaagccatccaggattatctgagcactcagctcatgctggactctgactttctgaagacaggctccagcaacctccctcacctgaagaagctgacttcactcctctgcaaggaactccatggagaagtcatcaggaccctcccgtccctggagtctctgcagaggttgtttgaccagcagctctccccaggccttcgcccacgacctcaggtgcccggagaggccaatcccatcaccatggtggccaaactgagtcaattgacaagtctgctgtcttccattgaagataaggtcaaggccttgctgcatgagggctctgagtctaccaacaggcgttcccttatccctccggtcacctttgaggtgaagtcagagtccctgggcattcctcagaaaatgcatctcaaagtagacgtcgagtctgggaaactgatcattaagaagtccagagatggttctgaggacaagttctacagccacaaaaaaawwmwrmarmtcattaagtcccagaagtttctgaacaagctggtgattttggtggagacggagaaggagaaaatcctgaggaaggagtatgtgttttctgactctaaaaagagagaaggcttctgccagctcctgcagcagatgaagaacaagcactcggagcagtcagagcctgacatgatcaccatcttcattggcacttggaacatgggtaatgcaccccctcccaagaagatcacgtcctggtttctctccaaggggcagggaaagacacgggacgactctgctgactatatcccccatgacatctacgtgattggcacccaggaggaccccctgggagagaaggagtggctggagatactcaggcactccctgcaagaagtcaccagcatgacatttaaaacagttgccatccacaccctctggaacattcgcatagtggtgctcgccaagccggagcatgagaaccggatcagccacatctgcactgacaatgtgaagacaggcatcgcgaacaccctgggaaacaaaggagctgtgggagtgtccttcatgttcaatggaacctccttggggttcgtcaacagtcacttgacttctggaagtgaaaaaaaactcaggcgaaatcaaaactatatgaacatcctgcggttcctggccctgggagacaagaagctaagcccatttaacatcacccaccgcttcacccacctcttctggcttggggatctcaactaccgtgtggagctgcccacctgggaggcagaggccatcatccagaagattaagcagcagcagtactcagatcttctggcccacgaccaactgctcctggagaggaaggagcaggaagtcttcctgcactttgaggaggaggagatcaccttcgcccccacctatcgatttgaaagactgacccgggacaagtacgcttacacgaagcagaaagccacagggatgaagtacaatttgccatcctggtgcgaccgagtcctctggaagtcttacccgctggtgcatgtggtctgtcagtcctacggcagtaccagtgacatcatgacgagtgaccacagccctgtctttgccacgtttgaagcaggagtcacatcgcagttcgtctccaagaatggtcctggcgccgtggacagccaagggcagattgagtttcttgcatgctacgccacactgaagaccaagtcccagactaagttctacttggagctccactcaagctgcttagagagttttgtcaaaagtcaggaaggagaaaacgaagagggagatgaaggagaactggtggtacggtttggagagactcttcccaagctaaagcccattatctctgaccctgagtacttactggaccagcacattctgatcagcattaaatcttctgacagtgacgagtcctatggtgaaggctgcattgcccttcgtctggagaccacagagagtcagcttcccatctacacacctctcacccaccacggggagatgactggccacttcaggggagagattaagctgcagacctctgagggcaagatgagagagaagctctatgactttgtgaagacagagcgggatgagtccagtggaatgaagtgcttgaagaacctcaccagccatgaccccatgaggcagtgggagcctgctggcagggtccctgcatgtggtatctccagcctcaatgagatcatcaatccaaactatattggtatggggccttttggacagcccctgcatgggaaatcaaccctgtccccagaccagcaactcacagcctggagttatgaccagctccccaaggactcctccctggggcccgggaggggagagggtcctcccacccctccctcccagccacctctgtcaccaaagaagttttcatcctctacagccaaccgaggttcctgccccagggtgcaagaaacaagacctggcgatctgggaaaggtggaagccctgccgcaggaggacctgccgctgacgaagcccgagatgtttgagaacccactgtatgggtccgtgagtcccttccctaagctggtgcccaggaaagagcaggagtctcccaagatgatgcgcaaggagcccccgccctgcccagacccaggagtctcttcacccagcatcatgctccccaaagcccaagaggtggagaatgtcaaggggacgagcaaacaggcccctgtgcctgtctttggccccacaccccggatccgttcctttacctgttcctcctctgctgagggcaggatgcccagtggggacaagagccaagggaagcccaaggccccagccagttcccaagccccagtgccagtcaagaggcccgtcaagccttccaggtcagaaatgagccagcagacaacgcccatcccagctccacggccacccctgccagtcaagagtcctgcagtcttgcagctgcagcattccaaaggcagagactaccgtgacaacacagaactcccccaccatggcaagcaccgccaggaggagagtctgcttggcagaactgccatgcagtgaagtcctcagggagccgctggtgatgggagcctggaggaacagcacaaagcagatctacgcctctctggggatgcctcttggaggacctcctgctagctcttcttgcctagcctagcttcaagtccaaggctgtgcatttcttcaggaaacggcctcccctctctgtggtccaaggagtgtgctggctgccatactgtgtggctgatgctgaagctgaatgggaagcacaagccgtgtggacaacagagagccgcaccggggtctcagaactcggactccagagcctccttccagtcgccgtttaaaagaaaggaactgagctgctcatccatggatgaagatataaataataatattattaataataataatggtcaggtgccatgtgctgtattaagtgctttatgaacatttgttaggctggcctccggagctgaggttccagtcaacctgaaccctaagcccagacccaccgatcccaaatggcgggtcctgagatgtttanacaaagnattaaggaaaccagnagtctcctagagctagccggatggactytaatgcagggacctgaacagamtgcacagytaatggcacaggaggccgscagmttcagagatataagctgctttagctggggttctgtcacaggcctgagcctcttggtttctactgggttttgaatctaccagagtcasagaksagctccaacttggcagtgcagagatctggcctcaatytaagccakccacttcakacccctgctgatcctgtggaccaattaayactccctgtgccactagaggtggcaccataccctgggttgggccaagcccaccccamtaacctgcagcacttytgatgtactgaggaagaatatccaccatcgtccccagtgactgagctctytgggcctgctctcasggaaggcgggccttggtcccaggctctcaaaaatagtgtaccctcttcttctcaagctctgtggtgcagccctgtgtccttggttactaggagactagtgtggtgatgtckttaattgtcttgctttttgatatataaggattaatgtaggaaactagacctaggttattcaggagggcaggtatataccctgtgtttcctagtatgtgtgaccaataaattgtggctttctaamwrraaaaaaaaaaaaaaaaaa

SEQ ID NO: 2520 - DNA, 3342 bp, Rattus norvegicus
gcggccgccgggcctccaggactaagccgggagccgcgggaggaggaggcgccggcggyggagsskgamkagtagcmgcggcggcgggcggacccagtactatggctgtgtactgctatgccctcaatagcctggtgatcatgaacagcaccaacgagctgaagagtggcagccccctgcccagcggcagcgaaacgcctcagccctccgggagggccgcgctgagccccggcagcgtcttcagccctgggagaggcgcctcctttctcttccccccagcagagtcgcygkcrmygraggwrscmtgggggagtgctgggggttggcgcagcggccgacggaggctgaatagtagcagcggtagcggaggtggcagcagcagcagcaacagcagcagcagcagtggcgtgggcagtcccagttgggctggccgcctgcgaggggacgcgcagcargtggtggcgacccgcatcctctccccacctgggccggaggaggcccagaggaagctgaggattctgcagcgcgaattgcaaaatgtgcaggtgaaccagaaagtgggcatgttcgaggcgcaaatccaggcacagacctctgctattcaagcgccccgaagcccgcgtttgggtgagggctcgttcgccctccccgtgtcccttccgaagcagcagccagcctcctgaaagggtcttggctccatgttccccaagtgaggaacggagaacaaagtcctggggagaacaatgtacagagaccccagatgccaactccaggaggagaagcagactcagcacacacccctcgaaggacaaggagggagtggcccctcttttaggcccagccagcccgaccaggttagggactcagagtccatctacttcagtgagaatggaaagaggttccccggccagtccccgctgtggctcacccacacccatggaaattgacaagaggactgctccctcactggagcactttgggactagcttaacgttggccactaaagtggcagcttcggccgcatccgctggaccacaccctggacatgattctgttctcatggaggcagactgtgagctaggggccatgcgcccctgggaggcccacctggagagacgggggcagtttctgggcagggagaccggctcagccccagagcctatccggacccacattagagaaccccctggaagggtggaaagagttcattctgttggtggccagggctcctggacacctgaagtcatcaaaagaccagaagagggaactgtggatgcccaaagctcagagctctcagagaacccgagatggtctagactgcctggagacccgggttccgtagggcctgagaagggaggtagtaggatcccaggaatccgaggaccccagcagaccctggacagcatgagagaagggtcttcagcactgggcttgcttgggggcagccaggcagcacagccagggagcatggatgtggagacaggcattagttgtggcagaatgctggaacccttaccacctggggaagtaacaacaaatttgaaagaaccccagtgcctccctggggacaggatggggatgcagcctgagagttccatagtttggcccagtgctgtggaggaagctcccctgatctggacgtgtgacacagggatacagttaaaggggacttggagaagccaagatggagatgctcatcctagctgccaagagaagtccccagaccagaaggacaaggcctgcagccccagcaacatcccggccatccctgcagtcatcattacagatatgggtgctcaggaggatggagggttagaggagatccaaggaagccctcggggtcccctgcctctgaggaagctgtcgtcctcctcagcctcctccactggcttctcctcttcctatgaggactcggaggaggacatctccagtgaccctgagcgcactctggaccccaactcagcctttttgcataccttggaccagcagaagcccagagtgagcaagtcatggaggaagataaagaacatggtgcagtggtccccctttgtcatgtccttcaagaagaagtacccctggatccagctggcaggacatgcagggagcttcaaggcagctgcgaatggccgtatccttaagaagcattgtgagtctgaacagcgatgcctggaccggttaatggcggatgtgctgaggcccttcgtgccagcctaccatggcgacgtggtgaaggacggggaacgctacaaccagatggacgacctgctggctgacttcgattcaccctgcgtgatggactgcaagatgggcatcaggacatacctggaggaagaactcaccaaggcccggaagaagcctagcttgcggaaggacatgtaccagaagatggtggaggtggaccctgaggcccccactgaagaggagaaagcccagagagctgtgaccaagccacgttatatgcagtggcgggaaaccatcagttccacagctaccttaggcttcaggatcgagggcatcaagaaggaagatggctctgtgaaccgtgacttcaagaagaccaaaacaagggagcaggtcactgaggccttcagagaattcactaaaggaaaccagaacatcctgattgcctaccgggaccggttgaaggccattcgagaaaccctggaagtctctcccttcttcaagtgccatgaggtcattggcagctctctcctcttcatccacgacaagaaggagcaagccaaggtgtggatgattgactttgggaaaaccacgccccttccggaaggccagaccctacaacacgatgtcccctggcaggaggggaaccgggaggatggctacctctcagggctgaacaacctcatcgacatcctgacagaaatgtcccagggcagcccactcacctgaggccaccagcaccttgcatagccatgccaccttgcccgccacctctgcctgtcgcagcatctctcttcccctgattcttcttccttttcctgtctgagcgcctacctagaacagagcctcccatctgcactacaggacactttggagaagagaagagagatttttttttctaggtctttatctcccgccttcctacacaggggcctggaggtggcgtttctaattctctctaaatagaactaccttctagaagagaattgcacagagctaggcccccgcatcccgttacacttagagcctgcacgggtctagaaggctgtgggatcccaggaatccgaggaccccagcagaccctggacagcatgagagaagggtcttcagcactgggcttgcttgggggcagccaggcagcacagccaggggggatccgtc

SEQ ID NO: 2521 - DNA, 2039 bp, Rattus norvegicus
atgagtagccgcagccacaatggcagtgtggggcggcctctgggcagtgggcctggattcctgggctgggaacctgtggaccccgaggcaggccgcccccgacagcccacccaaggccccggcctgcagatgatggccaagggtcagcctgctgggctgtcacccagtggccccaggggccactcccaggcgcaggaggaggaagaggaagaggaagacgaggacaggccaggctcagggaagcccccgaccgtcagtcaccgcctgggccaccgtagggccctcttcgagaagcgtaaacgactcagtgactatgcactcatctttggcatgttcgggattgtcgtcatggtgacagaaacagagctgtcctggggtgtgtacaccaaggagtctctgtgctcattcgccctgaaatgcctaatcagcctctccactgtcatcctgcttggccttgtcatcctctaccacgcccgagagatccagctgttcctggtggacaatggtgccgatgactggcgcattgccatgacgtgggagcgagtgtccctgatctcgctggagttggctgtgtgtgccatccacccagtgcctggccactaccgcttcacatggacggcgcggctggccttctccctggtgccgtcagcagccgaggcggatgtggatgtgcttctgtccatccccatgtttctgcgcctctatctgctggctcgggtcatgctcctgcacagccgcatcttcacggacgcatccagtcgcagcatcggagccctgaaccgtgtcaccttcaacacacgctttgtcaccaagacactcatgaccatctgccctggcaccgtgctgttggtcttcagcatctcctcctggatcgtcgctgcatggacagtgcgcgtgtgtgagaggtaccatgataaacaggaagtgaccagcaacttcctgggggccatgtggctcatctccattaccttcctgtccatcggctacggggacatggtgccgcacacctactgtgggaagggcgtgtgtctgctcaccggcatcatgggagcaggctgcactgcactcgtggtggccgtcgtggcccgsaagttggaactcaccaaggctgagaaacacgtgcacaacttcatgatggacacacagctcaccaagcgggttaaaaacgccgctgcaaacgttctcagggagacatggctcatctacaaacacaccaggctagtgaagaagccagaccaaagccgggttcggaaacaccagcgtaagttccttcaggccatccatcaggcgcagaagctccggactgtgaagattgaacaasrsraggtgaatgatcaggccaacacgctggctgacctggccaaggcacagagcatcgcatatgaggtggtgtcggagctgcaggcccagcaggaggagttggaggcccgtctggctgccctggagagccgcctggatgtcctargcgcctccctgcaggccctaccaagtctcatagcccaagccatatgccctctaccaccaccctggcccgggcccagtcacctgaccacagccgcccagagcccacaaagccactggctgcccaccacggcatcagactgtgggtgagggcctgctggtcactaractgcttaatcttggccattgtgtggccacagctagctcctcactgttytggacctccggacgactgagtttgcaagcttgggtggaaytgaactgactggactggcattcattcctctgaggytggaccatgagatccatggccccttagytgtcccaagccccaggagggcaaggagtagtagaaggggggcctcgacatttctaagtaaatcagaagcctccarmmmamwwmmwrwwwacatggcagggggggccatgaccatctccccagaggaggtggatgacccagcctgtgggttcctgaatgggcaaggacaggggtggaaagtcactgcccatgcattgagtacttgctgtatacagggactgatacaatgacttttcttcggaaaaaaaaaaaaaaaaaa

SEQ ID NO: 2522 - DNA, 2074 bp, Rattus norvegicus
atgagcagctgcaggtacaacgggggcgtcatgcgtccgctcagcaacttgagctcgtcccgccggaacctgcacgagatggactcagaggctcagcccctgcagcccccagcgtcggttgtaggaggaggtggtggtgcgtcctccccgtctgctgccgccgccgcctcatcctcagccccagagatcgtggtgtctaagccggagcacaacaattctaacaacctggcgctctacggaactggcggcggaggcagcaccggaggcggcggcggcggcggcggcggcggcggcggcagcgggcatggcagcagcagcggcactaagtccagcaaaaagaagaaccagaacatcggctataagctgggccatcggcgtgccctgtttgagaagcgcaagcggctcagcgactatgcgctcatcttcggcatgttcggcatcgtggtcatggtcatcgagaccgagctgtcgtggggcgcctacgacaaggcgtcgctgtattctttagctctgaaatgccttatcagtctctccacgatcatcctgcttggtctgatcatcgtataccacgccagggaaatacagttattcatggtggacaatggagcagatgactggagaatagccatgacttatgaacgtattttcttcatctgcttggaaatactggtgtgtgctattcatcccatccctgggaattatacgttcacatggacagcccggcttgccttctcctatgccccttccacaaccactgcagacgtggatattattttatctataccaatgttcttaagactctatctgattgccagagtcatgctattacatagcaaacttttcaccgatgcctcctctagaagcattggggcacttaataagataaacttcaatacgcgttttgttatgaagactttaatgactatctgcccaggaactgtgctcttggtttttagtatctcgttatggataattgccgcatggactgtccgagcttgtgaaaggtaccatgatcaacaggatgtcactagcaacttccttggagcaatgtggttgatatcaataacttttctctccattggttatggtgacatggtacctaacacatactgtgggaaaggagtctgcttgcttaccggaataatgggtgcaggttgcacagccttggtggtagccgtagtggcaaggaagctagaacttaccaaagcagaaaagcatgtgcacaatttcatgatggatactcagctgaccaaaagagtaaaaaacgcagccgccaatgtactcagggaaacgtggttaatctacaaaaacacaaagctagtgaaaaagatcgaccatgcaaaagtaaggaagcatcaacggaaattcttacaagctattcatcaattaagaagtgtgaagatggaacagaggaaactgaatgaccaagcgaatacgctagtggatctggcaaagacccagaatatcatgtatgatatgatttccgacttaaatgaaaggagtgaagactttsasrarrggatcgtcaccctggaaacaaaattagaaactttgattggtagcattcatgccctccctgggcttatcagccagaccatcagacagcagcaaagggacttcatagagacacagatggagaactatgacaagcatgtcacctacaatgctgagcgttcccggtcctcgtccaggaggcggcggtcctcctccacagcgccaccaacttcatctgagagtagctagaagagaataagttaaccacaaaataagactttttgccatcatatggtcaatattttagcttttattgtaaagcccctatggttctaatcagcgttatccgggttctgatgtcagaatcatgggaacctgaacactaagttttaggccaaaatatgagtgaaaactctttttttttctttcagatgcacagggaatgcaccaattattgctatatagattgttcctcctgtaatttcactaactttttattcatgcacttcaaacaaactttactactacattatatgatatataataaaaaagttaatttctgcacaaaaaaaaaaaaaaa

SEQ ID NO: 2523 - DNA, 2539 bp, Rattus norvegicus
ggcacgaggtgaagctgagtctgcctcattcactcctagaggaccgccttcagaatagagttcttttcgccccttcctccttctcccagctcctctcctggcttttctatccgcccaatacaatgcacactcgagtggcagccccagagaactgaagcaaaccaaagagagaggactggagccaagacacttctggtggggaagcttggatgcctggctttctttgaggtcatctttggaacgagggtggctttggggtggagggtcgtgctgcagggaacccagccaggccccaasatggacacttctgggcacttccatgastcgggggtgggggatctggatgaagaccccaagtgtccctgtccatcttctggggacgagcaacagcagcaacagcaaccgccaccaccgtcagcgccaccagcagtcccccagcagcctccgggacccttgctgcagcctcagcctccgcagcttcagcagcagcagcagcagcagcagcagcagcagcagcagcagcagcagcagcagcaggctccactgcaccccctgcctcagcttgcccaactccagagccagsttgtccatcctggtctgttgcactcttctcccacggctttcagggctcccaattcagccaactccaccgccatcctccacccttcctccaggcaaggcagccagctaaatctcaatgaccacttgsttggccactctccaagttccacagccacaagtgggcctggtggaggcagccggcaccggcaggccagccccstggtgcaccggcgggacagcaatcccttcacggagatagctatgagctcctgcaaatacagcggtggggtcatgaagcccctcarccgcctcagcgcctctcggagaaaccttatcgaggccgarcctgagggccaacccctmcagctcttcagtcccagcaaccccccagagattatcatctcctccagggaggataaccatgcccaccagactctgctccatcaccccaacgctacccacaaccaccagcatgccggcaccactgctggcagcaccaccttccccaaagccaacaagcggaaaaaccaaaacattggctataagctggggcacaggagggccctgtttgaaaagagaaagcgactgagtgactatgctctgatttttgggatgtttggaattgttgttatggtgatagagaccgaactgtcttggggtttgtactcaaaggattccatgttttcgttggccctgaaatgccttatcagtttatccaccatcatcctgcttggtttgatcatcgcctaccacacaagggaagtacagctctttgtgatcgacaatggtgcagatgactggcggatagccatgacctatgagcgcatcctctacatcagcctggagatgctggtgtgcgccatccaccccattcctggagagtacaagttcttctggacggcacgcctggccttctcctacaccccctctcgggcagaggctgacgtggacattattctgtccatccccatgttcttgcgcctatacctgatcgcccgagtcatgctgctacatagcaagctcttcacggatgcctcatcccgaagcatcggggccctcaacaagatcaacttcaacacccgattcgtcatgaagacgctcatgaccatctgcccgggcacggtgctgctggtgttcagcatctctctgtggatcatcgctgcctggactgtgagagtctgtgaaaggtaccatgaccagcaggacgtaactagtaactttctgggtgccatgtggctcatctccatcacgttcctttccattggctatggggacatggtgccccacacatactgtgggaaaggtgtctgtcttctcactggcatcatgggtgcaggctgcactgccctcgtggtagctgtggttgcccgraagctcgaactcaccaaagcagagaagcatgtgcacaacttcaygatggacactcagctcaccaaacggatcaagaacgctgccgccaatgtcctccgggaaacatggctgatctacaaacacacaaagctgctaaagaagattgaccacgccaaagtcaggaaacaccagaggaagttcctccaagctattcaccaactgaggggtgtcaagatggaacaaaggaagctgagtgaccaagccaacaccytggtggacctttccaagatgcagaacgtcatgtatgacttgatcacggagctcaacgaccggagtgaagacctggaaaagcagattggcagcctggaatccaagctggagcacctcacagccagcttcaattccctgcccctgctcatcgcagacaccctgcgccaacagcagcagcagctgctcactgccttcgtggaggsccggggcatcagtgtggctgtgggaactagccacgcccctccctctgacagccctatcgggatcagctccacctctttcccaaccccatacacaagttcaagcagttgctaaataaaactccccactccagaarmawwaaaaaaaaaaaaaaaaa

SEQ ID NO: 2524 - DNA, 1387 bp, Rattus norvegicus
gacagagamasgcakggagcccatcctggccctcctgctggccctgggacccttccagctcagcagaggccagtccttccaggtgaatcctcctgagcctgaggtagctgtagccatgggcacatccctccagatcaactgcagcatgtcctgtgacaaggatatagcccgggtgcactggcatggcctggacaccaacctgggcaatgtgcagaccctcccaggcagcagggtcctctccgtacgaggcatgctgtcagacacgggcactcgtgtatgcgtgggttcctgtgggagtcgaagctttcagcactctgtgaagatccttgtgtatgcctttccagaccagctggaggtaaccccggagttccttgtacctggacgggaccaggtagtgtcctgcacagcccacaacatctggsctgcaggcccggacagtctttcctttgscttgctccgaggagagcagagcctggagggtgctcaggccctggaaacagagcaagaggaggagatgcaagagactgagggcactccactcttccaagtgacacaacgctggttgctgccctccctggggacccccgcccttcccgccctttattgccaggtcaccatgcagctgcccaaactggtgctgacacatagaaggaagattccagtcctacagagccagacctcaccagagccccccagcaccacctctgctaagccatacatcctgacctcatcacatactactaaggcagtctccactgggctcagcagtgtagccctgccttctacgcctctgagctccgaggggccctgctaccccgaaatccaccagaacccagaggcagactgggaacttctctgcgaagcctcctgtgggtctggagtgacggtgcattggaccctggctcctggtgacctggcagcctaccacaagagagaagctggggcccaggcatggctaagcgtgctgcccctgggccccattcctgagggctggttccagtgtcgcatggaccctggcgggcaggtgaccagtctgtatgttactggccaggtgatcccaaacccctcctccatggtcgccctgtggattggcagcttggtgctggggctgcttgcactcgccttccttgcctamtgcctgtggaaamgmtaccggccgggtcctytcccagamtccagctcgtgtamgctcctatgaagttccattatgccagactaagggaggcaaaggattaccagatgtaggtttggggcatcaagatgatagtgtggcccctttccttggcggtcagcaaattgacaagttcctcccaaataatggaccttcctgcccgttggcccagaggtaaataaaggccccatattttgcgaaaaaaaaaaaaaaaaa

SEQ ID NO: 2525 - DNA, 1843 bp, Rattus norvegicus
gaattcggcacgagctctctgaggcaccatgctgacccgcctgttcagcgagcccggcctcctctcggacgtgcccaagttcgccagctggggcgacggcgacgacgacgagccgaggagcgacaagggcgacgcgccgccgcagcctcctcctgctccagggtcaggggctccaggacccgctcgggccaccaagccagtgtctcttcgtggagaagaggtccctgaacccacgttggctgaggtcaaggaggaaggagagctgggcggcgaggaggaggaggaagaggaggaggaggaaggactagacgaggcggaaggcgagcggcccaagaagcgcgggccgaagaaacgcaagatgaccaaggcgcgcctggagcgctccaagctgcggcgacagaaggccaacgcgcgggagcgcaaccgcatgcacgacctgaacgcggcgctggacaacctgcgcaaggtggtgccctgctactccaagacgcagaagctgtccaagatcgaaacgctgcgcctggccaagaactacatctgggctctctcggagatcttgcgctccgggaagcggccggatctggtgtcctacgtgcagactctgtgcaaggggctgtcacagcccaccacgaatctggtggccggctgcctgcagctgaactctcgtaacttcctcacggagcagggcgcggacggcgcggccgctttcacggctcgggtggcccgttccgccatgcatccgtacccgtacccgtgctcgcgcctagcaggcgacagtgccaggcggccggcggctgggcggaggcgcggcgcacgcctgcggacccacggctactgcgccgcctacgagacgctgtacgcggcggcgggtggcggcggcgccagcccggactacaacagctccgagtacgagggtccgctcagtcccccgctctgtctcaacggcaacttctcgctcaagcaggactcgtcccccgatcacgagaagagctaccactactctatgcactactcggcgctgcccggctcccggcccgcgggccacgggctggtcttcggctcgtcggccgtgcgcgggggcgtccactcggagaatctcttgtcttacgatatgcaccttcaccacgatcggggccccatgtacgaggagctcaacgcgtttttccataactgagacctcgcgccgacctctctttttctttgcctttgtccggccccctagccccagccccacgagctcaggggctcccacggactccagcgccggggccggggcgcgggccgccggttctgcagctctccagagcggcgtggtctcttacctgtgggtggcccgtcccaggggcctcgtttgcctctggggactcgccttctctctctccccagcgggcttcctcctcccttctctcctggagagcatctctggggacctcccgccaggccctcccaggagactccctccacattcccaaacttgggttttctctccccgcctcccagcaggccagaggcagttggtaaggggctgctgagtttcggggatagtgtctcctccacttatggttactttaaaaaaacaggcacagagctgcccaggccgaaaagagttggtatctcttccttctcgaagaggccaaagccagggcgcccaaacgccttcaccccaacacgaatctccgcgttttttattttttattttggtgggaggggatgtggattgagaggaaagagagaggccaagccaatttgtaactagaaccatttttccttttccctttttaaaaaaaagaatccaaacatacaaaaggaaaaaaatagaaaaaaaaaaaaaaaaaaactcgag

SEQ ID NO: 2526 - DNA, 2802 bp, Rattus norvegicus
cggcacgagccagggccagtccgccccgcgctccgcacggctctgcgtccctctctcctgcccagccggctgcctccctctcctgcggccgggctggctgcgtgtggctctccgcgccccgctcccgcagcgctccagcggaccccggctcctctgctcccggaggaactgcacttcggcggagttgaatgaatgaagagagcggagaaggagatctgacgggctggatccccaaattgctttttaaaaaatatcttggaaactttgtcctttgctgaattacgacactgtccmcctttaatttcctcgaaaactccaatcactcggctgaagccatgccttgtgttcaggcgcagtatgggtcctcgcctcaaggagccagccccgcttctcagagctacagttaccactcttcgggagaatacagctccgatttcttaactccagagtttgtcaagtttagcatggacctcaccaacactgaaattactgccaccacttctctccccagcttcagtacctttatggacaactacagcacaggctacgacgtcaagccaccttgcttgtaccaaatgcccctgtccggacagcagtcctccattaaggtagaagacattcagatgcacaactaccagcaacacagccacctgccccctcagtccgaggagatgatgccacacagcgggtcggtttactacaagccctcttcgcccccgacacccagcaccccgggcttccaggtrcagcatagcccgatgtgggacgatccgggctcccttcacaacttccaccagaactacgtggccactacgcatatgatcgagcagaggaagacacctgtctcccgcctttcactcttctcctttaagcagtcssscccgggcactcctgtgtctagctgccagatgcgctttgacgggcctctgcacgtccccatgaacccggagcccgcgggcagccaccacgtagtggatgggcagaccttcgccgtgcccaatcccattcgcaagccggcatccatgggcttcccgggcctgcagatcggccacgcgtcgcagttgcttgacacgcaggtgcccycgycgscgtcccggggctctccctccaatgagggtctgtgcgctgtttgcggtgacaacgcggcctgtcagcattacggtgttcgcacttgtgagggctgcaaaggtttctttaagcgcacggtgcaaaaaaacgcgaaatatgtgtgtttagcaaataaaaattgcccagtggayaagcgccgccgaaatcgttgtcagtactgtcggtttcagaagtgcctggctgttgggatggttaaagaagtggttcgcacggacagtttaaaaggccggagaggtcgtctaccctcaaaaccgaagagcccacaggatccctctcccccctcacctccggtgagtctgatcagtgccctcgtcagagcccacgtcgactccaatccggcaatgaccagcctggactattccaggttccaggcaaaccctgactatcagatgagtggagatgatactcaacatatccagcagttctacgatctcctgactggctctatggagatcatcagagggtgggcagagaagattcctggctttgctgacctgcccaaagccrrtcaggacctgctttttgaatcagctttcttagaattatttgttctacgcttagcatacaggtcmaacccagtggagggtaaactcatcttttgcaatggggtggtcytgcacaggttgcaatgcgtgcgtggctttggggaatggattgattccattgttgaattctcctccaacttgcagaatatgaacatcgacatttctgccttctcctgcattgctgccctggctatggtcacagagagacacgggctcaaggaacccaagagagtggaagagctacaaaacaaaattgtaaattgtcttaaagaccatgtgactttcaataatgggggattgaaccgacccaactayctgtccaaactgttggggaagctcccagaacttcgcaccctttgcacacaggggctccagcgcattttctacctgaaattggaagacttggtaccaccaccagcaataattgacaaacttttcctggacaccttacctttctaagactttctcccatgcacgtcaaagaactggaaagaaaaaaaaaatccagagggggctggtcaagatgggtagagagctggctgaagtgtccggttcatgtctcccttctgtagacccctagccctcacccctaaagtaaacaaacaaacaagcaaacaaacrracacaaattaaaaactgttgctatttcctaacctgcaggcagaacgtgaaagggcattttggctccggggcatcctggatttagaaaacggacaacatacacagtacagtggtataaacttttttattatcagttcaaaatcagtttattgttcagaaggaagattgcaaatgtatgatgggaaatgtttggccatgcktgcttgttgcagttaagacaaatgtaaggcaaatgtaacacacacacacacacacacacacacacacacacacacctcttaatgggaccctcatattttgccctttaacaagacttcaaagttttctgctgtaaagaaagctgtaatatatagtaaaactaaatgttgcgtgggtggcatgaattgaaggcagaggcttgtaaattttatccaatgcagtttggctttttaaattattttgtgcctatttatgaataaatattacaaattctaaaaagtaagtgtgtttgcaaaaaaaaaaaaaaaaa

SEQ ID NO: 2527 - DNA, 4277 bp, Rattus norvegicus
aaaaaagaggattccgtggcttaaaaaaaaagtttgaaagcctctgacttaatagtttccaccaccaaggaaactgaggcccagagagaggaaatgacctgggtaagatctccgagggaccagtagttgaacagggactaggagttaaaatttcatgggaggtgcctgtaacaggacctgccttggggtctctgctggaaagagagacctgattgggtttcccagcagtcttcagtggcttgctccgtggctgcctcagccaggtctccagcagccacacctggggatctggcccccgtcctgtcctccagccccacccacctcggctccatgccccccccagtcagcttcgggaccctggcagtgagcaggcacgtggcagccaaggccctgtgaccaggccagggagacggagctctggggtcccagtcacctgcccccccatggagctgagaccctggttgctatgggtggtagcagcagcaggagccttggtcctgctagcagctgaagctcgcggccagaagatcttcaccaacacgtgggctgtgcacatttctggaggcccagctgtggctgatagtgtggcacggaagcatgggttccacaacctgggccagatcttcggtgactattaccacttctggcacagagcagtgacaaagcggtccctgtcgcctcaccgcccgcggcacagccggctacagagggtgcctcaagtgaagtggctggagcagcaggtagccaagcaaagggccaagagggacgtgtatcaggagcccacagaccccaagttccctcagcagtggtacctgtctggggtcactcagcgagacctgaatgtgaaggaagcctgggcccagggcttcacagggcgtggcattgtggtctccatcctggatgacggcattgaaaagaaccatcctgacttggcaggcaattatgacccgggagccagctttgatgtcaatgaccaggaccctgacccacagcctcggtacacgcagatgaatgacaacaggcacggcactcggtgtgccggggaagtggcagcggtggccaacaatggtgtctgtggtgtaggtgtagcttacaatgcccggattggaggggtgcgtatgttggatggcgaggtgactgacgcggtagaggcacgttcgctgggcctgaatcccaaccacatccacatctacagcgccagctggggccccgaggacgacggcaagaccgtggatgggccagcccggctcgccgaggaggccttctttcggggagttagccagggccgcggagggctgggctccatctttgtctgggcctcagggaatgggggccgggaacatgacagctgtaactgtgacggctacaccaacagtatctacacgctgtccatcagcagtgccacacaattcggcaacgtgccctggtacagtgaggcctgctcctccacactggccaccacctacagcagtggcaaccagaatgagaagcagattgtgacaactgacttgaggcagaagtgcactgagtctcacacaggcacctcagcctccgcccctttggcagctggtatcattgctctcaccctggaggccaacaagaacctcacctggcgggacatgcagcacctggtggtgcagacctcaaagccagcacatctcaacgctaacgattgggccaccaatggcgtgggccggaaagtgagccattcctatggctacgggctgttggatgcaggtgccatggtggccctggccsagrrytsswcaacagtggccccccagcggaagtgcatcattgaaatcctggcagagcccaaggacattggcaaacggctagaggtgcgcaagaccgtgacagcgtgcctgggtgagcccaaccacatctccagactggracacgttcakgcacggctcaccctgtcttacaatcgccgtggtgacctggctatccacctcatcagccccatgggcacccgttccaccctattagctgccagaccacatgactactctgctgatggatttaatgactgggctttcatgacaactcattcctgggatgaggacccctctggcgagtgggtcctasagattgaaaataccagcgaggccaacaactatgggacgctgaccaagttcactctcgtcctatatggcacagcctctgagggtctctctgcacctccagagagyagcggctgcaagaccctcacatccagccaggcctgcgtggtgtgtgaggaaggtttctcactgcaccagaaaagctgtgtccagcgttgcccaccaggcttcacaccccaagtccttgatacacactacagcactgagaatgatgtggagatcatccgtgccagcgtctgcaccccctgccacgcctcatgtgccacttgccagggcccagctcccacagactgcctcagctgccccagccatgcctccctggaccctgtggagcaaacctgctcccggcaaagccagagcagccgagagtcccgacctcagcagccacctcccgcactgcgcccagaggtggaagtggagccccggttgcgggctgggctggcctctcacctgccggaggtcctggccggcctcagctgccttatcatcgctctcatctttggcatcgtcttcctcttcctgcatcggtgttcaggcttcagcttccggggagtgaaagtgtacaccatggaccgtggcctcatctcctacaaggggctgcctcctgaggcctggcaggaggagtgcccatctgactcagaagaggatgagggccggggcgagaggaccgcctttatcaaagaccagagcgccctttgatgagcccactgcccaccctatcaaatcgatcccttcctcggcactttttaattcaccaaagtatttttttatcttgggactgggtttggaccctagctgggaggtgagaggggcagagacccttgggcctacctgtttgcctgaggtggggtcccgggagcctcaccccccaccaaccctccatgtggaggaaggagtaaatctttagggcagcttcctgcagagtgaagaggggcagcctttctgactccctggccagctgcagccttgcccctcccctgcccctcagaaagcaataatggtccccatccaggcaacagggaggctggccaggaggtacttgaagaaggtggccacctctccaagggcttttgcatcccctgaccctctctggctcaggatgagcctctgaagaagcttgcagtcacaggaagggaccaaagcaaacgaggcactctccagtgtgcctgcactcttgctctcagcctgcctctgcactccaggtctccacctcagctggtagccaggctgagctagacctgcacaggtcaggctctggggccttatgctggtgtcctgaccatcctctatggcaccccccccccaagccagggccttgttttctgagcccggggctgcctgggcagttggcgctcacagtccaggagcccctgggtgggtggtggggagggacggtggctcctcccacctcccacccgatgctgctttcccctgtggggatctcaggagctgtttgaggatatattttcactttgtgattattcactttagatgctgatttttttttttttgtatttttaatgggggtagcagctggaccakkcacckwskcctacccatgtccaccctgcctttcccatggctgcccagctctgaggcagagggaatcactaagccccaagtcctgaagaggcagsccagccasctgggctccaggaaaggggktcatggtgggaggggtaggctgacatcatctgtttcaaatggggttgtgccacaggcttttgggtwkyyggcwckscaagtrccaggggtggrcaggtggcaccaccaagcccwwwmtaacamtgtgccstggtggagaaagcwttgrcstatgatgccccscaaaccccctgttstgatgtgcctktcgcacccstcccattaggacaatcagtcccctccmwswtgggcctmmtmtkttmwtttwmytagccyttbtcggtacccawcytacctgtccagggtgccccttgctctcytgcccacccytagcggscatvcaggctggttttgtaagatgctgggttggtgcacagtcatttttttttccttgtaatttaaacaggcctggcattgttggttctatttaatggacacgagataatgttagaggttttaaagtgattaaacgtgcagactatgcaaammaaaaaaaaaaaaaaaaaa

SEQ ID NO: 2528 - DNA, 5331 bp, Rattus norvegicus
aacatttcaagacaaaaagcccagtagcatcgtgcattccttgagacatggagtctatggaatagtgggacatgcgaccagccttgacagtacaccacgatgtacagggctggggagccagggaagcggcagtctggccctgcgccccctcgggtgcggagtgtggaagtggcccgaggcagagctggctacggcttcaccctgtcaggacaggcaccctgtgtgctcagctgcgtcatgaggggcagccctgcagatttcgtgggcctccgggctggggaccagatacttgccatcaacgaaatcaatgtgaagaaagcctcacatgaagatgtggtgaaactcatcgggaaatgctctggagtgctgcgcatggtgatctccgagggcagcagccatgtggagccctcttccagcgatgaagaaggcggcctgtgtgaggggaaaggctggctgaggccgaaacttgactctaaggctttgggtataaacagggcagagagggttgtggaagaggtgcagtctggtgggattttcaacatgatctttgaaagcccaagtctttgtgccagtggctctgagcccctgaaactgaagcagaggtccttgtcagagtcagctgctttgcggcttgatgttggccaggacagtctctgtacaccacatcccagcatgctttccaaggaagagatatcaaaggttatcaatgacgattctgtgttcactgtagggctggacaatcacgatgactttggactagatgcaagtattttaaatgttgccatggttgtgggctatttgggctccatcgagctcccttccacaagttccaacctggagcatgacagtttacaggctattcgtggctgcatgcgccgcctgcgggctgagcagaagatccactcactagtgaccatgaaggtcatgcacgactgtgtgcagctggtcactgacagggctggtgtggtggcagagtaccctgccgagaagctggcgttcagtgcagtgtgcccagacgacaggcggttcttcgggctggtgaccatgcagaccaatgatgatgggtgcttggcacaggaagatgaaggtgccctgaggacatcctgccatgtcttcatggtggacccagacttatttcatcacaagatccaccaaggcatcgcgagaagatttggatttgcatgcacggcagatccagacacgagtggctgtttggaattcccagcatcttccctccctgtgcttcagttcatctccgttctgtaccgagacatgggtgaactgattgagggtgtgcgggcccgtgcctttctagatggggatgccgatgcccaccagaataatagcaccagcagcaacagtgacagcggcattggcaatttcaaccaggaagagaagagcaacagggtgcttgtagttgacctgggtgggggctcgagcaggcatggccagggcagtagtccggggtgggagagtgtaagtggaagaggctcacagccttggagtgcaccctggaatggaactttctgccacgactcagaggcgggctccccactggaaaccagccccaacactgacaggttctgggacttaacaaagcattcagggcctgtttttcacatggaggtccctccagccaccttgaggagttctatacccccttccaagaggggtgctacaggttccagctgtggtttcaaccagaggtggctccctgtccatgtgctacaagagtggcagtgtggacatgccagtgaccaggagtcttacacagactctacggacgggtggtccagtgtgaactgtggcacactgccccctcccatgagcaagattcctgcagaccgataccgggtggagggcagctttgctcaggccccactgagtacccagaagagggactggtctcggaaggctttcggaatgcaaaacctatttggaccccatcgaaatgttagaaagaccaaagaggacaaaaagagttccaaattggggcggggagttgccctggcccagacttctcagcgcacttcagctcgcagatcctttggacgatctaggagattcagcctcacgcgctcccttgatgatctcgagtctgcaactgtgtctgatggtgagttgacgggagctgacctgaaggactgcatcagcaacaacagcctgagcagcaatgccagcctccccagtgtgcagagctgccggcgcctaagagagaggagagttgcaagctgggcagtgtcatttgagcgtctgctgcaggatcctgtcggcgtccgctacttctccgattttctacggaaggaattcagtgaagagaacattttattctggcaggcctgtgaatgtttcagtcatgtccctgcacatgacaaaaaagagctctcttacagggcccgggagattttcagtaaattcctgtgcagcaaagccaccactcctgtcaacattgacagccaggcccagctggcagacgatattctcaatgcaccccaccccgacatgttcaaggaacagcagctccagattttcaacctgatgaagtttgacagctatactcgatttctgaaatcccagctgtaccaagaatgcgtcctggcagaggtggaggggcgtaccctcccggactcccagcaggtccccagcagcccagcttccaagcacagcatcagctctgaccactccaatgtatccacaccgaaaaagttaagtggaaaatcaaaatcaggacgatccctgaatgaagatgttggggaagaggatagtgagaaaaagcgcaaaggggcctttttctcttggtcaaggagcaggagcacggggcgatcccagaagaagaaggaccatggtgatcatgcccatgatgcccttcatgccaatggaggactctgccgtcgggagtcccaaggctctgtctcttctgcggggagcctagacctgtcagaggcctgtaggacctcagcactcgagagagataaggctgccaaacactgctgtgtccacctcccagacgggacatcctgtgtggttgctgtcaagtccgggttttccatcaaagagatcctgtctggattgtgtgaacggcatggcatcaatggggctgctgtggacctcttcctggtgggcggagacaagcctctggtgctgcatcaggacagcagcatcctggccaccagggacctacggttgggaaagcgtactttgtttcggctggatctcgttccaattaaccggtcagtgggactcaaggccaagcccaccaagccagtcacggaagtgttgcggcccgtggtggccaagtacggcctggatctgggtagcctgctggtgaggctgagtggggagaaggagcccctggaccttggtgcccctatatcaagtctggatggacagcgggtcatcctagaggagagggatccttctagagggaaagtgtccacagagaaacagaaaggtgctcctgtcaaacaaagctcagctgtgaactccagccccagaaaccactcggctatgggagaggagagaacactaggcaagtctaactctattaaaataagaggagaaaatggaaaaagtgctagggatccccggctttcaaagagagaagaatctattgcaaarawwrrraaaaaaaaawawmaraaaattaatttggacgaagcagaggagttttttgagctcatttccaaagctcagagcaacagagccgatgaccagcgtgggctgctaagaaaggaagacctggtactgcctgagtttcttcgcttacctcctggttcctcagaacttgccctgtccagcccacccccagtcaagggctttagcaagagagcggttacaagccatggccaggagggagcagttcagacagaggagagctacagcgacagcccagctaccagccctgcctcagcccagagcccctgctcagcctacagccctggctccgcccacagccccggctctgcccacagccctggctccgcccacagcacccctgggcctcctgggaccgcccaacctggagagaagcctacaaagccctcctgcatctccacagttcaagagggcactacacaggcctggaggaggctatcaccagaactggaggctgggggcatccagactgtggaggaggagcaggtggctgacctgaccctgatgggggagggggacatcagcagccccaacagcacgctgctaccaccaccaccccttccccaagacacaccaggacctacaagaccaggtacctccaggttctgactctacacccttgatctgtcctgctgactgcccatggcctgctccacctcatgttaataaagggaacactgagcaggcagccctgctttacttctgtgctttgacatgtcctgagagacagcctccttctctcatatttatggggcctcctttgccttttctgaaaggaaagcaggtggcagccaaggctcagtgtcccagggagagggtcactgaggctcagatagacagaccacgttgagctggtcctgtgaaggtgccatgggaatggtgacccacatccagtgactccttgtgaaggcttgggtctctgagtgtggatctcacctttaaaacctgcttgctgccactttagtgttttagactcamgatggaaagagaaaatagtatttgttttgagcaaatcagcaagggtcccatgctgacaaggatcaggctgtcagggtcagcctctctctccagccaggacttgctgactgccctccataggcaagccttgcacttgcactaggcagtgttcaccgactggcctcaacagtgtccaggcatttctcttagtggaagcatgaagtccagtgtgtgtggatgcgagcagtgtgagcgagtggtagggatgctactctcgtcccacctaagacactccctatcccacacgggtgacagggcwcscgcgtgytcagtgtcctcacagtgwcagtgatgagcctttcagtgcatgctgcctgttgttcctgtmtaggccttggctgtgatatgcagcaggcaatgtgggtgctctgggtcctgcttcctgggcctggcggtgtcgggcctcatgcatgtttcatgtactctcacacaccatgggctggacttcacagccccacccgtggggatacactcgatgaggaggcacaggcaccatgaagcggccytgcgtgcatgcttgggcacctctgtcaggccacaccctcctttctgctcctttgtagctgcctgtttacagttmtatctgtgttctgactctgttyttccaagagaaataaactytagagctcrwmaaaaaaaaaaaaaaaaaaaaaaaaaaaa

SEQ ID NO: 2529 - DNA, 1811 bp, Rattus norvegicus
ggcacgagctttacttgttcgtctgttgagaggttcgtgctcaagttgaggacctgagccgcgcgccaaaatgtgtaagggactggcagctctgccacactcatgcctggaaagggccaaagagatcaagatcaaattgggtattcttctccagaagccagactctgctgttgaccttgtcattccatataatgagaagccagagaagcctgccaaggcgcacaagccctcgctggaggaggtcctgcaatggcgccaatccctggacaaamttctccagagcaactacggatttgccagcttcaaaagtttcytgaagtctgaattcagtgagraaaaccttgagttctgggttgcctgtgagaattacaagaagatcaagtcccccwtcaaaatggcaragaaggcaaagcaaatcwatkmrgmaykcakscagacagaggcccytaaagaggtraacattgmccacttcactaaagacatcaccatgaagaacytggtggamccttcccctcacagytttgacytggcccagaaaagratstacgccctgatggagaaggattctctgccccgcttcgtgcgctctgagttttataaggagttaatcaaytmgtaattgggtcaggcatcaaaaagtcaccctgtgrgttgagttacatcytytagwgcagtacagcatcccmtaggcacstgyayatttctyyatagcagctttgstccaagacacccaaacataggcgaaccacaggccgtgttgctaactctttcactcatgttggtttggktgtgtggatytgttgtctaaggcccttcactttcttttgwtctttctgactgctttgtartaaagwtttkaccaagwwamwrwmarwmwaarwmamaraaawrmmmwgttaaacataaagktgtctgtgcaaagaataggtgatagactgctcttgaaactagactgtaaagaaaaaaacatgcgagtgtsccctttcatggggatttgactggtctkgyttattgkkttaattcttatmctctaatgacttcagaatttgggtagtaaagagcagcaagctggktatwaggcagccaccaatkgtgtttttaagcaaatacawtatttgrcattactgacttctcctttctagagtacacgctktgktagawggaccytctyarkaagacskacaatggatatattgtgcktytagacagaagtcatttmaawtccgcccttatgcttctgaatmmcgagggaaaaagkcaaccyttgrctytytykracaatcagaaatgstwaataccccmaaatcttcttgagctgktccttwaacaatggraaaaawtttaaawtgarawattttattcacatwagttggakatccaaacgtctgaaaatacccaaggaaccagccggctattatacactcacccagatgactcttgctgtggagacctcaaacgactgtgcttacaaactgactgagtgagtgactagtcttgtcagtgcavggtgargarggtgggaagggcgcctymagagcagtctgtgaggccacaaaagaatgcasgaaggtatgcttctgcagtctaatggctgcattatwtwtccagacwttyactgtatctctatataattttaagtttaaagcaatatatatatacacacacacacatatatatattcttctagcatataagacagccaatgggaggtaagtattctagatccaaaggagaagccaaatgtattaaaattggactagaagcattttggagggaaaaaaaaaaaaaaaaaaaaaaaaagttgtgcggcc

SEQ ID NO: 2530 - DNA, 2235 bp, Rattus norvegicus
tgaggccgccttggccgaggagggcagactgatcatccttgtatctgagctaccaagttctgtgtgaaatggctcaggggaataattatggccagaccagcaatggggtggcagaggaatcaccgaacatgctggtgtacagaaagatggaagatgtcatagcacgtatgcaagatgaaaaaaatggaattcccatccgtaccgtcaaaagcttcctttccaagatccccagtgttttctctgggtcagacattgttcagtggttaataaagaacttaactatagaagatccagtggaggctctccatttgggaacgctaatggctgcccatggctacttctttcccatctcagatcatgtcctcacactcaaggatgatggcaccttctaccggtttcaaacaccctatttttggccgtcaaattgttgggagccagaaaacacagactatgctgtttacctctgcaagagaacaatgcaaaacaaggcaaggctagagctagcagactacgaagccgagagcctggccaggctgcagagggcatttgcccggaagtgggagttcatttttatgcaagcagaagcacaagctaaagtggacaagaagagggacaaaattgaaaggaagatcctcgatagtcaggagagagcattctgggatgtccacaggcctgtgcctgggtgtgtaaatactacagaagtggacatcaagaaatcatcccggatgagaaacccacacaaaacacgcaagtctgtctatggtttacaaaatgacatccgaagtcacartyccacccacacwymmamammaraaammaarmctccaacagaagatgagttgcaccgacagataaaatactggcaaatacagttagatagacatcggttaaaaatgtcaaaagttgctgatagtctactaagttatacggaacagtatgtagagtatgacccatttcttgtaccgcctgacccttccaacccatggctctcagatgatacgacattctgggaacttgaagcaagcaaagaaccaagtcaacagagggtaaaacgatggggttttggcatggatgaggcactgaaagacccagttgggagagagcagttccttaagtttctagaatcagaattcagctcagagaacttaaggttctggttggcagtggaggacctgaagaaaaggcctatccgagaggtcccctctcgagtacaggaaatatggcaagaatttctggctccgggggcccccagtgccattaacttggattcgaagagttatgacaagaccacacagaatgtgaaggaaccaggacgatacacattcgaagatgctcaggagcacatttacaagctgatgaagagtgactcatacccccgctttataagatctagtgcctaccaggaacttctacaggcaaagagaaagggcagaaacatccctattttcccatgccataaaaactgtacaccaacactgagggccagcactaacctgttatgaaaagaggggaaatctctcacatccaagaggttaacaagccttgttcagtcttactaaaaggatcgtcttcgtcacatgagagctggacggagccatcgcccataccttgtagcccatcgcgctgttacctggagccaaggatgttagmccaagatgttgcatgaatgaaggacytgagttgttctgtgtgcacataaaggcatcacatttgccaagggacactgtcatctcattgcctccatcttcccgtgccgtttgcttccctctctcctsgtamtaagctggatctgtgtccttttctttttaacgagttcaagtgaaggaaaactttatttgtccccccttcctctctttttcttaaagcttctgctagatgcacagttcactgaaaattcagtcagtcacaaactggaagaattgtaaawgaaaaaaaagtatacatcastaagtacacacgtggcttcacatctattaaataataaattggcatggaaggaaggtgtcatttcacccgtgtatccacagtyttaagcaagcgccsatcttcatctgttctctggacattgtctgttcatgtttcttgcatttatttttataccatatttaaatgagaaaacaccttttactccagatgtatcaaagttgacctyttytctgtaaatttgkgtawgtttawawtgktgktttatctttcattaaaagatgcagaatytcvwaaaaaaaaaaaaaaaaa

SEQ ID NO: 2531 - DNA, 3494 bp, Rattus norvegicus
tgcggccgcgggaggtgtgtttgtccgtgcatgctcatgtctatgtgtatgcatgcgtgagcctatgtgtccctgccaacatgccttccacctgccaaggatttcactgctaaaagaaagatctactctttcctcagagctccttaaccagaagcatctctgaccatccacttggcaaaaacctgcaggccatgaggaccggccaacaacagtgagaggacgtgagagggtaaatccctgaacccagcagtcttatttcctaccctgacgtccctgcaaacaagcccaaggggtaaccataagcggatgcctgtatggctgccttactgatgccacgcaggaacaaaggcatgaggactcgactgggatgcctgtcgcacaaatcggactcctgtagtgacttcacagccatccttcctgacaaacccaaccgcgctctcaagagactctccacagaagaagcgacgaggtgggcagattcctttgatgtgcttctctctcacaagtatggggtggcagccttccgtgccttcctgaagacagagttcagcgaggagaacctggagttctggctggcctgtgaggagttcaagaagaccaggtcgactgcaaagctagtcmccaaggcccacaggatctttgaggagtttgtggatgtgcaggctccacgggaggtgaatatcgatttccagacccgagaggccacgaggaagaacatgcaggagccgtccctgacttgttttgatcaagcccagggaaaagtccacagcctcatggagaaagactcttatcctaggttcctgaggtccaaaatgtacttagatctgctgtcccaaagccagaggaggctcagctagacctcagatggggactcttgaaagtcactggctttcttttgcccttgctgccgagaccacattctaacgtgaagtgtcatagatatccaaaggcgctggggtttggggtggaaggctggggggtgacaagggaatgaagggcttttccaaagtatgacccagmwamwrrarmmarramwmwmttccttctacccagacttgtgttttggttagaggcagcactgctgctgtcacccttctctgggtgggccagtaactggccctacataatgccttccgtcatctctactgagaaggcagattcactgtgccgggctaatttgtaaatagtgcaaacacagttcccatcacctccacamcacacccyctwcmstarramwmmwrawwwwmacmttgtcctttccccaagggaggagtacctagacgccacagatcctcagtcatgatggattgtcacaccccagtggcccaacctgagtgagtaccgggacctcagagtttagaagagaggtctctttggawttcagttccctagcaatgttgacgggtaacctctgacaaaggacatattccctggagttggctgtgtcatccattyccaccggaccaagacrgagtctgagatctctttttagactttagacygaggaattcactgaacttccgtactcttgcaatyccagaaagtgtcttggtagatttctcccatggcttctgagcggagctgtcctttttgaaagataagagtcttctycaattctattaagaacttttctagaagtggagtgaccagggaatgtagcatcagtagacttttgtgcaatgcggctccatawaammwrwmwrwwrcctaatgtattccgtgccgtcacctccccatggcatcacatagcactgatctcttaggatgaaagcggcttggcagagggaggtaaattcccatagcatgacagctttcttagtgcctgatgctttccctgtctctccacctcctccttccatgccggccatgtaactctgatgggggacactgggtacctaggctgacactctcattgcagcttgcttcctggacatactttcttagaaagggtccacttttggctgtcgagaaatagctgccttcttggtctctagcctttgggactgaccttggaagatcactgtgaataccaggctacggaaattctcctgcaatgcttgtgcggtgccccaggggaactctcggaaatgcaccgcgatattctttcttagaggagtcaggaacatcatggaacctctacagctgcccaggagaaagctgtccctgccatctcctgcagggacaggaagatgatgaatcttcagtacagcaagcagaagatagaagacgaatctagaagctgctggtctctgggtgaaccgaggatgtggtgaagacactgctacgacaatttacaaccagtcaacgtgggctcattgaagggctgtgaacgttcagcttgartgaatgaaaaagtctgtggccaggctgccmtagaaagtcggtggtggaaggctgggctgacactctccttttgtggggtgctagcccttctgaagtattctagggtttgtattctggtcttggggaatcagttccttccttggttgtagccagacaaggccaagaaggcccttgagtcctactgtgttagtgccagctgccctccaagtggtacaccgtcatctgtgagtgggcgttagtgtctggatgtgaagagagagaacatctactttctaggcctcacactgaagggacctgtggcagtcacatttaataagacctctgaagcttcaaatggttcctagttatagcacataagatttttttccccaccctgatataaaaatattcttagctaaagctgccaraawwaawrwaawrawwaaawtcwmtyrcarrrwawwwwwwaaamattgtttacatatgaaatgtgcatctgctgccaatgctactgcccactctgtggtgcatgacactgggcctgcagcgatgggatcgtcctagaagggccttctcaccattggcactatcccaattcaaaatggctccacccgcgcggtgcggcaccctcacttggggcctagagttcagctcttgatgggatgaaggctgcagaaggtgatgtcatgcaccctggtgactcctttccgcgtgggaggtatgaaggagcaagttggagtatcctgagttctgtagctagacgaggacatggagtttgtgtctgtgtcgaggagcagatagctctatgggactcccgtggagcatctggtgtgtgtgtgtgtgtgtgtgtgtgtgtgtgtgtaactgtgagtcttgggcagtataccacagacatgctcttcccatgtaaatagcttttcacataccgtatctcccctgcttctcatagaaggtgcagagcttctagccctggtacctcctcttaggcactttagtcatgctagcccagattctgatgtgtggtgaaacagagaaatgtttacaacatctagagcaatatccaagcatacctcatctctgagcttccatgtcccccagttccctccccttgtctcttccgctacgagcctcatctgcctcaccaggtcttcattaaagatgccactgcttcc

SEQ ID NO: 2532 - DNA, 4378 bp, Rattus norvegicus
cccggagccataatggcagagctacccgtgacagagatgccaggcgatgctctgtgcagtgggcgcttcaccatcagcacgctgctggggggtgacgagcccccaccagctgcctgtgacaatagccagcccagccatttgacccatggcagcaccttgtacctacgcacctttggttacaacactatagatgtggtacctgcctacgaacactacgctaacaggcctctgcccggcgagccccggaaggtgcggcccaccctggctgacctgcactcgttcctcaagcaggaaggtagccacctgcatgccctggcctttgatggacggccaggccatgagctgactgatggacttgtggaagacgagacaggcgccaacagcgagaagagccctggagaacctgtgcgtttcggctgggtcaagggagtgatgatccgatgcatgctcaacatatggggtgtgatcctctatctgcggctgccctggattacggcgcaggcgggcattgtcctgacctggctcatcatcctgctgtcagtcatggtgacatctatcaccggcctctctatctcggccatctccaccaatggcaaggtcaagtcgggtggtacctatttcctaatttctcggagtctgggacctgagctggggggctccattggcctcatcttcgcctttgccaatgccgtgggtgtggccatgcacactgtgggctttgcagagaccgtacgagacctacttcaggagaacggcacacccattgtagaccccatcaatgacatccgcatcatcggtgtggtcacggtcactgtgctgctggccatctcgctggctgggatggagtgggagtccaaggcccaggtgctgttctttcttgtcatcatggtctcttttgccaactacctggtgggcacgctgatcccagcatctaaggacaaagcctccaaaggtttctacagctaccatggggacatttttgttcagaacctggtacccgactggagaggcatcgatggtagcttcttcgggatgttctccatcttcttcccttcagccacaggcattctggcaggggccaacatctctggggacctcaaggaccctgctgtcgctattcccaagggaacactcatggccattttctggaccaccatttcctaccttgccatctcggccaccatcgggtcctgtgtggtgagggatgcctctggggacgtgaacgacaccataactcctggcccaggcctctgtgaagggctagcctgcgttatggctggaacttcacggaatgctccccagcagcacagctgccgctatggcctcatcaactactaccagaccatgagcatggtgtctgccttcgcacccctgatcacagccggcatctttggggccaccctgtcctcggccttggcctgtcttgtctcagctgccaaggtcttccagtgcctgtgcgaagaccagctgtaccctctgattggcttctttggcaagggctatgggaagaacaaggaacctgtgcgtggctacttgctggcctacgccatcgcggtggccttcatcatcattgctgagctcaacaccatcgctcccatcatttctaacttcttcctctgctcctacgccctcatcaacttcagctgcttccatgcctccatcaccaactcacctggatggagaccctccttccgatactacagcaagtgggcggcgctgtttggggcagtgatctccgtggtcatcatgttcctgcttacctggtgggcagctctcattgccattggagtcgttctcttcctcctgctctatgtgatctacaagaagccagaggtaaactggggctcctcagtgcaggctggctcctacaacctggccctgagctactccgtgggcctcaatgaggtggaagaccacatcaagaactatcgcccccagtgcctggtgcttacaggaccccccaacttccgcccagctcttgtggactttgtgagcacgtttacccagaacctaagcctgatgatctgtggccacgtgctcattgcacccggcaaacagagagtgccggagctccggctcatcgccagcggacacaccaagtggctgaacaagaggaagatcaaggccttctactctgacgtcatagctgaggacttgcgcagtggcgtccagatcctcatgcaggcctcgggtctgggaagaatgaaacctaacattctggtggttggcttcaagaagaactggcagtctgcccacccagccacactggaggactacattggcatcctgcacgatgcctttgacttcaactacggggtgtgcatcatgaggatgcgtgaggggctcaatgtctctgaggcgctgcagacgcacacagccccagaggcactggtacaggaggagcagaccagcaccatcttccagtcggagcaaggcaagaagaccattgacatctactggctgtttgacgatggaggcctcaccctccwcrwsscttatctcctgcaccgcaagaagagatggggcaaatgcaagatccgcgtgttcgttgggggccagatcaacaggatggatgaagagagaaaggcgatcatttctctgttgagcaagttcagactgggattccatgaagtccacgtccttcctgacatcaaccagaagccccaggtggagcacaccaagcggtttgaggacatgattgcccccttccgtctcaatgacggcttcaaggacgaggccactgttgccgagatgaggagggactatccctggaagatytcagacgaggagattaataagaacagaattaagtcccttcggcaggtgaggctgaatgarattctcctggattactcccgggatgctgctctgatcatccttaccttgcccattggaaggaaggggaagtgccccagttcactgtacatggcctggctggagaccctgtcccaggacctcagtcctcccgttctcctcatccgaggtaaccaggagaacgtgctcaccttttactgccagtgatgtccagtgtggcagttcctgccgagagctgagcgcgtgggatagagtcggaactcacgctctccagctggagaagaggcttcaattcctgctgtgtcatcacatctaccggctgtgtttccaagctggctgcaccccatcagacacaccttctagaccttgaagttgcacggaaaagcttctggaagagtcttatctctttttaaaaagcwwwwmwwwwwwwwwwwwttttgtcttgatgaccgaaatattagtcattgattcagtctttgatttgtatacaaatcgagtcccagtattgggtgtgcaacttgacaatctctctcgggaccttccctgtgaccacccccaaagctgtctcatcccccccagacaggagagcaggagcccatcctgaggacccatgtggagttctgatgaccacaggaccctttgagctacacagcaacacacatttctcctcctgttccctttcagtgatggatcctgggtgctcctactagttatttagaccagggtcctctgggttctttgattacaaattctatggtttcctcagagactcagaacacacagaacaatggtagggaagcatcacaaactggtcctcactctcgagggtgcttctctcccctctctcccctctccccccccctccctctctctctcctttttccttctgacagagtcttatgtggtccaggctggccttgaacttgttctgtagtcaagaatagcttcaaacatctgatcccctgcctccattacagagcacagggattcsaggcacattcacataggcatgtttcacgaggtgatagggaccacacctacggttgatgggtgccggcaatcacctgctgactakgctaccmccgcccwgtctctagtgtgctcctttgaagttgattgcaaccttctaaatgatcttcaaacccactcgtgtgcagtgacccgtgctttgaaaaacaggtttaatttctggaggttgtgtgtagggtctgttgctggtwggtttctttgktgctcgggaatyttgttttgkcaactygacaggagytaggsccatctaagcagaaggamcctcaattgacaaatgcctcctgctgattggckgcctgwaatgattgacggggtggggccagcccactgtgttsccgtaccmccatgagcaggtggtcctggggtgtataagaaagcaggctgagcaagctatgggagcargccagtgaggagtgtctcttcatggcttctgcytyagttcctgcctggagktccttccctgacttctyttcattataamccgtaagccatgagatgaaataamcccttttctycccaaaaaaaaaaaaaaaaa

SEQ ID NO: 2533 - DNA, 1412 bp, Rattus norvegicus
ggtgcctcttctgcaccactctccagggcactgcacctcttaagagagcctggctgccctttatcagacactgccttctgccaccgggaagcccgctggagggagccagaggaagaaatggccatggaagatattcccactatggttaaagtagaccgaggtgaaagccagattttatcctgccgggggagaaggtgtggcctcaaagtacttggctatgtcacgggagatatgaaggaattcgccaactggcttaaagacaagcctgtggtgctccagttcatggactggatacttcgtggcatatcccaggtggtgtttgtcagcaaccccatcagtggaatcctgattctggcgggacttctggtccagaacccctggtgggcgctctgtggctgtgtaggaaccgtggtctccactctgaccgccctcttgcttagccaagacagatcagcgataacggccgggctccagggttacaatgccaccctggtgggaatactcatggctgtcttctcagacaagggcgactacttctggtggttgatattccctgtatctgctatgtctatgacttgcccggttttctcgagcgcgttgagctccctgttcagcaagtgggacctgcccgtcttcactcttcctttcaacatggctttgtcgctgtaccttccagccacaggacactacaatacgtttttcccaagtaaactcttcatgcctgtcagctccgtgcccaacatcacgtggtccgagctcagcgccctggagctgttgaagtctcttccggtgggagtcggtcagatatatggctgtgataacccgtggacaggggccattttcctgtgtgccatcctgctttcctccccactcatgtgcctgcacgctgctatcggatcgttgctgggagtcatcgcaggtctcagtcttgcagctccgtttaaagatatcttctctgggctctggggtttcaacagttccctggcttgcattgcgatcggagggatgttcatggcactcacctggcagacccatctcctggcccttgcctgtgccctgttcactgcctactttggagcctgtatgacacacctgatggctgcggttcacctgccagcttgtacctggtccttctgcttggccacactactctttctcctgctgaccacggaaaatcccaatatctacaggatgcccctcagcaaagttacctactccgaggagaaccgcatcttctacctacaaaacaagaaaagggtggtcgactctgtgtgtgtacatgtctgtgtgtgtggctgtatgtgtatcttgcctgtgtgtgtgcttctgcatgtgtatctatgtgtctctgtgtcttcgtgagtttgtgtgtatatgtgtctctgtatttctgtgggtgtgtgtgtgtgccg

SEQ ID NO: 2534 - DNA, 3974 bp, Rattus norvegicus
aaaaagaggaaagacagagccggcctagacagcagacatcaggacacccttctaggccagctctgttttctgccttaatgctcaaggaagactgcaagatcatctgaggtgggctctgtaacagcgtcagctccacaaagtcatcgctgcaaagttcaggagatgggagatctttcctgttttcttactgagtgtttccgggtgtgagtgcatcgcattgacatcttcctacctctgtggacaaacaaggacaaggctcgaatcccctcagtctacttcatcagccggacctgcatgactggctattttgaccacttgaagtcatctaaatagaagttctcaagaccaccaagaccaaggacacttcacatgacagatgagcgaccatcccctgaaggagatgtctgacaacaaccgcagcccccccttgccagagcctctttccagcagatacaagttgtatgagtcagagctaagcagccctacctggccttcaagctcccaggatacacacccagcccttcccctgctggaaatgcctgaagaaaaggatctccgatcatcggatgaagacagccacatagtgaagattgaaaagcccaacgagcggagtaaacggagagaaagcgagttgccccgcagggcttctgcaggccggggagcgttcagcctcttccaagctgtgagctacctcactggtgacatgaaggaatgcaagaactggctgaaagataagcccctggtccttcagttcctagactgggtcctgcggggagcagctcaggtgatgtttgtcaacaacccccttagtgggctcatcatcttcatagggctcctgatccagaatccctggtggacgattgctggggcactggggacagtggtctcaaccttggctgcccttgccttgagccaggacaggtcagccatcgcctctggactccatgggtacaacgggatgctggtgggactcctggtggctgtcttctcagagaagttagactactactggtggcttctgtttcctgtgaccttcgcatccatggcctgcccagttatttctagtgccttgagcaccgtcttcgccaagtgggacctgccagtcttcacactgcccttcaacatcgccttaacactgtacctggcagctacgggccactacaaccttttcttccccacgacgcttgtgaagcctgcgtcttcagcgcccaacatcacctggtcagagattgagatgcctttgctgttacaaaccatccccgttggggtgggccaggtctacggctgtgacaacccctggacaggcggcgtgatcctggtggctctgtttatctcctctcccctcatctgtttgcacgcagccataggatccattgtggggctgctggcagcactgacggtggccactcccttcgagacgatctacacgggcctttggagctacaactgtgtcctctcctgtgtcgccattggaggcatgttctacgtactcacctggcagacacacctgttggcacttgtctgtgccctgttctgtgcgtacacgggagcggccctctccaatatgatggcagtggttggtgtgccaccgggcacctgggccttctgtctctccaccctcaccttccttctcctcacaagcaacaaccctggcatccacaagctcccactcagcaaagtcacctacccagaggccaaccgcatctacttcctgacagcgaaacgcagtgacgagcagaagccccccaatggtggcggtggagaacagtcacacggaggaggccagcggaaggcagaggagggctccgagaccgtgttccccaggcgtaagagcgtgttccatatcgagtggtcatccatccggaggaggagcaaagtgtttggaaaaagtgaacaccaagagagacaaaccaaagagccactcccctacctgtatcggaagcccacagtggaactcttggacctgaacaccatggaggagagctctgagataaaggtagaaaccaacacaaccaggactacctggatccagagctccatgatcgctggggggaagagagtcagcaaagccctcagctacatcacaggagagatgaaggagtgcggcgagggacttaaagacaaatctccagtgttccagtttcttgactgggtgctccgaggcacgtctcaggtgatgtttgtgaacaaccctctcagtggcatcctcatcgttcttggcctcttcgtgcagaatccctggtgggccatctccggttgcttgggcaccatcatgtccaccttgactgccctcatcctgagccaggacaagtcggccattgcagcaggactccatggctacaatggggtgcttgtggggctcctgatggccgtgttctcagacaagggcaattactactggtggctgctgctcccggtcatcgtcatgtccatgacttgccccatcctctccagtgctctgagcaccgtcttcagcaaatgggacctcccagtcttcacactgcccttcaacatcgccgtgaccctgtacctggcagccacgggccactacaatctcttcttccccacgaagctgctgcagcctgcagttaccacacccaacatcacctggtcagatgtccaagtgcctttgcttctgagagccatccccgttggaatcggccaagtgtatggctgtgacaatccctggactggaggcatcttcctcgttgctctgttcgtctcttcacctctcatctgcttgcacgctgccatcggatccacgatagggatgttagcagcactcagcattgccacaccatttgactccatctactttggcctgtgtggcttcaatagcactctggcctgtatcgctattggtggcatgttctacgtcatcacctggcagacgcacctgctcgccattgcctgtgccctgtttgcagcctacctgggtgctgccctggccaacatgctgtctgtgtttggattaccaccctgcacctggcccttctgcctctcagcgctcaccttcctcctcctcacaaccaacaaccctggcatctacaagctcccgctcagcaaagtcacctacccagaggccaaccgcatctacttcctgtcccaggagaaaaacagaagggcatcgatgataacaaagtaccaggcctacgacgtctcctaagctgccctttctaagctcgtctggtaaatgcagcctccagaacccaccctgcaccccaggctaaatctaagtcactcaaccacccttcttcctaatatgcgagtggctgctatttggagccctcaatgagatgtgcagcgctcatcaaagccacgctagtttaaactaaatacccaccgatggctctttgggaactctctgtggggggaacttgctagtcacctctttcagttatttagtggcgcaaatcatgattccaggaaatgttcattagcctgccatgcaagagggctgggttcactaatgagttccaactgtctcaggccagtcttctccctaccccatccccacccctatccacacccaccccacccctcatctcagcctgggtgttttgttgccaaggatttctttaccatgacaaggaaggactccaaagtccttccacctcagaagcatttattcttttccatatcctgtaaactaaccaactcagcatggccagcaagtaattattctgacttgagttacttatggaatggctctcagaggagagaggaaaatgttagtgccctgtggaagtttattcttagatatctgggagatgctctaaggcttgggaccggacacctgaattcattgaaaatgccaatgtatcttctttgcaccatagaaatatttccagaaacatcatctggtaaggagtgaccttttccaacatccaatcatagtgtaagcaaacgtctttgcttgtgtaatattcaaaatcagtagtcattaaacttgaaatttgcaaaaaaaaaaaaaa

SEQ ID NO: 2535 - DNA, 1575 bp, Rattus norvegicus
atcgcttgcttcttgggcagccaccgccgccgtcggacctagccgtctgcactcctgtgttctcctgtgtattctcctgcggtccggacacaatagtatgatctttaagtgtttcgtctcccagacattttctatgggaaatcaaggggatcaggccatgatagccactggcagctttgaagaacgggacacctttagagaagcttgatcttggaggcctcagcgtgagacctcaaagcaccctcccgactccggcagagttcctctgtctcgtcttgacgattgaaggtcmcsactgcttcagtttttctccatcttctgggaggtagcaggaagtcagaatcatggttggtttcaaggccaccgatktgccccccacagccaccgtgaagttcctgggggctgggacagcagcctgtattgcagatctcatcactttccctctagacaccgccaaagtccggctgcagatccaaggrgagagtcaagggctagcgcgcaccgccgccagcgcccagtaccgcggcgtgctgggcaccatcctaaccatggtgcgcactgagggtccgcgcagcctctacaatgggctggtcgccggcctacagcgccagatgagctttgcctccgtccgcattggcctctacgactctgtaaagcagttctacaccaagggctcagagcatgcaggcatygggagccgcctcctggcaggtagcaccacaggtgccctggctgtggctgtggcccaacctacagatgtggtaaaggtccgcttccaggcccaggcccgggctggcggtggtcggagataccagagcactgtcgaagcctacaagaccattgcacgagaggaagggatccggggcctctggaaagggacctctcccaatgttgcccgaaatgccattgtcaactgtactgagctggtgacctatgacctcatcaaagatactctcctgaaagccaacctcatgacagacgacctcccttgccacttcacttctgccttcggggcgggcttctgcaccaccgtcattgcctcccccgttgatgtggtcaagacgagatatatgaactctgccttgggccagtaccacagcgccggccactgtgccctgaccatgctccggaaggaggggccccgarccttctacaaggggttcatgccttccttyctccgcttgggatcctggaacgtagtaatgtttgtcacctatgagcagctcaaaagggccctgatggctgcctatgaatcccgggaggcaccyttttgagcctctccagctgatgacctggaccctgctccccattcctgccctgtcttttccttcatcctctgcccagccccaacctcttcccatttcccacactccaactcccttcccagctcatctccctatacctcctcagcaaggaggccttaccctagcacatctcactatgcctcctcagcgaggaggcctgaccccggaccctgcaccctcagtcctgctaacagttaagcccaaatcttttgtcctcattcccagcccagcttagccagccttcgcccataaagcaagctccaatgtwaaa

SEQ ID NO: 2536 - DNA, 2271 bp, Rattus norvegicus
  misc_feature (1941)..(1941): n is a, c, g, or t
cggccgcagcccgctgaccagccggtgaggaggggcgccgaggtcttcggtggagtgagggcggggccaggggctgggacccgcgggagggagcgccgcgcccgccgcgctgccattggcggggaagccccggagcaggcgagggggaggaggcggcactccattggtccggctcgctggccaatccctagaggcccgggtgcgggggggtggggacctggctggggccagagcgtgcggagcggcagagcgagcagctagcagrgcagycggtcccactccagtgcgacccggagcctcygcgggactcgagtccgagcgaacctcgaagcatcatccgcgtccgtctgccgcgttccggcttctgcgccgcgcagagtagcgagcttgtgcatcacccgcgcggccacagctgggggctaagagcagggacaccgagggtgactgaccccgactccgagcgcagccccttcctgtggtccgaacagccatgacccacttcaacaagggcccttcctacgggctctccgccgaggtcaagaacaagrtcgcryscrrgkatgascmscrggccgaggrggwkskgsgsaactggatagaagaggtgacaggcatgggcattgggaccaacttccagctgggcctgaaggacggyatcatcctctgcgaactcataaacaagctacagccaggctctgtgaagaaagtcaacgagtcctcactaaactggccgcagttggagaacatcggmaactttattaaagccatccaggcttacggtatgaagccccatgacatatttgaggcaaacgacctttttgagaatggcaacatgacccaggttcagactacgctggtggctctagcaggtctggcgaaaacaaaaggattccatacaaccattgacatcggcgttaagtacgcagaaaaacagacacgacgcttcgatgaaggcaagctaaaggctggccaaagtgtaatcggtttacagatggggaccaacaaatgtgccagccaggcgggtatgacagcctatgggactcggaggcatctttatgatcccaaaatgcagactgacaaaccctttgaccagaccaccatcagtctgcagatgggcaccaacaaaggagccagccaggctggcatgtcggcaccgggtaccagaagagacatctatgaccagaagctaacattacagccggtggacaactcgaccatttctctacagatgggcaccaacaaagttgcttcccagaaaggaatgagcrygtakgggcttgggcggcaagtgtatgaccccaagtactgtgccgcacccacagaacctgtcattcacaacggaagccagggcacgggaacaaatgggtcagaaatcagtgatagcgattaccaggcmkmrtmcccckatgagtakcatggcgagtacccagatgagtaccctcgagagtaccagwatsgksacgaccagggcatcgattactagagtcacacacaggagtgcagtattttagtccattgtttatccagtgagacccaagctagccttgagtaattcktatctcgtcttcctaaacactattacgcwtmctgtacctttaaagaatgccttacgtacattcctttctcmctttcstgcytcctccctaaattgcyttctagtkcwskagbgagggaagcctacagcctaaccagtamctcgcgttggaagaagtgagaaggaacgctgtgcgagggcagccagctytttcgytgrrgatctatrmawttttttacacttacacktaarctgrtdttkkmrrrchryarrrrwbtwtttttttyttwkttacagtttrdyaygwrkctggcttgtacmcggwarmctaaraagttgatttgctamgtgtggymwwwrmmmarwwawhwwamatkcagctttaraacytgacacgtggatgcttntgcmcagksttgtctkstaagttttaaataaagkcgkgatcagkgkgawwmrhrawhahawrwrwamwmawwmwttyccgaagctgacaaggtctytcccgagtggcgctstaaaggcscgtytacagaaatgrccgcaracatgtaggtgtgggtggcgtgcctgcaracttcatttgkrccawtgtattactktaragwcgctgktcccttcaactgtatttattgstgcatttytcagcataracttatcccattgkatktttkataartaaatatttwttwtgrmcwttawahrraaaaawaaaaaaaaaaacaagttcggccgca

SEQ ID NO: 2537 - DNA, 472 bp, Rattus norvegicus
  misc_feature (40)..(40): n is a, c, g, or t
  misc_feature (45)..(45): n is a, c, g, or t
attcctccatcggmtyckgcrcakgcgtgcygchadrrknhttcnshbkmkvgwkammsrkgahagvrghkgyarasgacattggctaccatsagttccggtgctctgttgccgaaaccacagatgcgtggtcttctggccaagcgtctgcgggttcatattgttggcgcattcgytgtggccctargagttgctgctgcctataagtwtggcktggctgaaccaagaaagaaggcttatgcagatttctacaggaattatgactccatgaaagattttgaagagatgaggcargctggtgtctttyakagtgcgaagtgatttcwgaatgcaaagaattctttggattgtgctccatagaagttcactgctgacctgtgttcctgaactatgaaacgtgaatatgtgggctaargagtartttctctcaataaacattaattatatggacarwaaaaaaaaaaaaaaaaaa

SEQ ID NO: 2538 - DNA, 4104 bp, Rattus norvegicus
cacgaggggatcttaaagggttaatgtggccgtttatgtattcatttgtgcttggtatcgaaccaaggactttaagtgtattaggctggcactttaccactgagcatgtttttaagctcataaaaggtgctgtgggggtagggagttggtagaatcaagaacctttttgcatgcataccctcctttctcctctccactacttgtaacttcactgcccctgacagacatcaccttcctgggatccaagtgactttgaacaagagagaaagtcagggatttatggagtccagtttcatttcagagcagcacagcgattacattaggcaaggtgcgaaagggctcctaccaggtaaagcaccggaaagttacaagttgggttattttttaaccggcgtcctacaaaaccgacgccgtgtaggtgtctcactcgctaacttgtaaaagaactccaggttctttagctcggggagagttagcaggcagagaatctggcagccgttcaacgaccccgccctcggagtcccaggggggcttcttctggagagtgcgattgtctagggcggaggcgcggctgggtaggaagggagcctggcgatccccgaaagcacccctgaagccgccaggctccgagcgcgtggaaacttccctggcggcaagcagggcgggagggggcggcggttccccccagcgctgagagcaccgcgcgcgcgaggatcggggcgcgcggcgggcgcggcggccgccgcctcctcccgtccccgcctccgcggcgcagcctcctccctccgccmggctcggcctcgggctccctcccctcgtggcaggctccggcggcggcggcggcggcggctgcggcggacggggagggcgtgcgccggtcgagaggtgtgggcgacgaggctagggaagtttcaagtggaaggtcgtccgccggccggcgcgtcccctcactctcctcccgcagcatcatggcggagccgagcggctcgcccgtgcacrtccagcttccccagcaggcggccccggtgacagccgcggcggcggctccggcggccgcgacatcakcaccggccccggccccggccccggcggcgcccgcagccccggycccggctccagctgcggctccagccccggccccggcagctcaggcggtcggctggcccatctgcagggacgcgtacgagctccaggaggttatcggcagtggagcgaccgccgtggttcaggcagccctgtgcaaacccaggcaagaacgcgtagccataaagcggatcaacttggmaaagtgccasacgagtatggatgaactcttaraagaaattcaagccatgagccagtgcagccatcccaacgtagtgacttattatacttcctttgtggtcaaagatgaactttggctggtcatgawattactaagtggmggttccatgttggrtatcatcaaatacatcgtcaatcggggagagcataagaatggtgtcctggaagaggcaataatcgcaacaatccttaaggaggttttggaaggattagactatctgcatagaaatggtcagatccatagggatttgaaagctggcaatattcttctgggtgaggatggatcagtacagatagcagattttggagtaagtgcattcttagcaacagggggtgatgtcacaaggaataaagtcagaaaaacatttgttggtaccccatgttggatggcccctgaggtcatrgaacaggtgagaggctatgacttcaaggctgacatgtggagttttggaataacagccattgaattagcaacgggagcagcgccttaccacaaataccctccaatgaaagtgctaatgttgactttgcaaaatgacccgcccactttagaaaccggcgtagaggataaagaaatgatgaaaaaatacggcaagtccttcagaaagttactttcactgtgtctccagaaagatccttccaaaaggcccacagcagcagaacttttaaaatgcaaattcttccagaaagccaagaacagagagtacctgatcgagaagttgctgacacgaacaccagacatagcccaaagagccaagaaggtcaggcgagttcctgggtcaagcggtcaccttywywwkwytkwwkwtggsgrcwrskagtgkaktkatkrtgwkatggawgagmagagtsaggaggggaaagcggctgcctctcaagagaagtcacgaagagtaaaagaagagaacccagagatctcggtgaacgctggtggcatccccgagcaaatacagtccctctccgwgsacgactctcagggccaaccaaatgctaatgaagactacagakaaggtccttgtgcggtcaaccttgttttaagattamgaaactccagaaaggaacttaatgacatacgatytgagtttactccaggamgagatacagcagatggtswskmksaggagctmttctmtgctggcwtsgttgacggtcatsatgtakttatagtggctgctaatttacagaagattgtagatgaccccaaagctttaaaaackttgacatytaagttggmttctggytrygatggggcggagattcctgacgaagtgaagctgatcgggttcgcccagttgagtgtgagctgatgtatgtcccttgctgtcaccstcatctgtcgtgcsmtccccccyttccagccccctctttgcctccttcctctcaccccctcactcccaaatcccagcaaatargaagattgtgaagaggctggcttcgatgaagtgggataaaaaaaataataatttwaaaaaaaaamwmmrarmactctgagttctkctttattctccagcaatccacagtgtgagcacakgcaagtgctgcaatagtgcattgctgatttctttccagagagctatttactattcttagcagtcaatttggatagcccttaagtgaggagtctgaaacacactcaggtggtcctatctcttggcaacaaaaggaatcttctaccagaagccttttctcctcttactgttgtatttctgtttaataattaataataattaattgtacatctgahawwamwrmmwmwwwwatgttgtcttakaaattaatatacttataaaattaagatttattagccagacttgaattctagttttaaaactgactgtgaattttatttttcatatatttatgctttacacaccttagctatgagggaaaaagttttgattataatgctttccgcgrkwgatctcttgttatttaaacaaatggtttcaggwcaatctttggagwatwtgtagcttctaatttttgaaatgactgaattgaaaatttgaatgcwttctcttttgrwtggtwkgcctaaaatccaktccacaatccagkcgwctywygrraraggraggkgcctkgtaaactttyatacttygaatgkgcctgagactgcttaaccctggactagtytcagatctcaaaccsgmactacacatggaggcawacgtwkgyttmatmtgrmcattwagaatactgkamctgkgctgccgttctgktagawygstkaytacatccccgtgtctgattcggctctccttargtgataggattcattgtttgtaaggcgataaacttgaccacaccagaatctgagttttacttgaaactctgcagaatacacagggggtatgaaaaacaaaacaaaacaaaacagaaagatttttttgtgcaatggcaaaaggtaaaaatgctgtaaacgttcgagaataaatatttccaacccaagaammwmmwrmwwractatgtattatgaacctaacaaaccttaggattttcaaatttggagtcaaaaccctcaagaaggtggctccggggatggcaccattgctccttacaagctaaccctagatgcggcagctytttaacgtactttaaaaagcaaatatatattactaaggaaagaagttatttataattgccttgtcataatygttaaggtgttytagaaccatttgcatacaatttaatgtaattccattccattytattgtttacacaattamtcaaagatggctgcaaaggtaaaaggaaaaataaaagcgtcttgcacagtgg

SEQ ID NO: 2539 - DNA, 4342 bp, Rattus norvegicus
  misc_feature (7)..(7): n is a, c, g, or t
  misc_feature (14)..(14): n is a, c, g, or t
dramrmnarysstncbgagggacccgctagggatctactagggacctgctagggacctcgtcgtcatggatcccccgcagctgctcttctacgtgaatggccagaaggtggtagaaaacaatgttgatcctgagatgatgcttttaccrtacctgaggaagaacctccgactcacgggaactaagtatggctgtggaggcggcggctgcggtgcctgcacagtgatgatctcacggtacaaccccagcaccaagagcatcaggcatcatcctgtcaatgcctgtctgacccccatctgctctctgtacggtacagcagtcaccacagtagagggcataggcaacaccaggaccagacttcatcctgttcaggagaggatcgccaagtgtcacagcacccagtgtgggttctgtacccctgsgakggtgatgtccatgtatgctctgctcaggaaccacccagagccctctctagatcagttaactgatgcccttggggggaatctgtgccgctgtaccggatacaggcccataattgacgcttgcaagactttctgtagagcttctggttgctgtgaaagtaaagaaaatggggtgtgctgtttggatcaaggaataaatggatcggcagaatttcaggaaggagatgagacaagtccagaactgttctcggaaaaggaatttcagccactggacccaacccaagagctgatatttcctccagagctaatgagaatagccgagaaacagccaccaaagaccagagtgttctacagtaatagaatgacatggatctccccggtgaccctggaggaacttgtggaagctaagttcaagtatcctggggcccccattgtcatggggtacacctctgtggggcctgaagtaaagtttaaaggtgtcttccaccccatcataatttctcctgacagaattgaagagctgagtatcataaaccagactggggatgggctgaccctgggtgctggcctcagcctggaccaggtgaaggacattctcactgacgtggtccagaagcttccagaagagacgacacagacataccgtgcgctcctgaagcacctgagaactctggctggctctcagatcaggaatatggcttctttagggggccacatcgtgagcagacatctggactcggatctgaatccccttctggctgtgggtaattgtaccctcaacttactatccaaagatggaaaacggcagatccctttaagtgagcagtttctccgcaagtgtcctgactcggatcttaagcctcaggaagtcttggtctcagtgaacatcccctgttccaggaagtgggagtttgtgtcagccttccgacaagcccagagacagcagaatgcactagcgattgtcaactctggaatgagagtcctttttagagaaggaggtggcgtcattaaagagttatccattttgtatggaggtgtcggtccaaccaccatcggtgccaagaactcctgtcagaaactcattggaaggccctggaatgaagagatgctggacacagcatgcaggctggttttggatgaagtcacccttgcaggttcagctcctggtgggaaggtggagttcaagaggaccctcatcatcagcttccttttcaagttctacctggaggtgctgcagggtctgaagagggaggacccaggtcactatcctagcytgacaaacaattatgagagtgctttagaagatctccattcaaaacatcactggagaacattaacccaccagaacgtggattcgatgcagcttcctcaggacccaattggccgtcccatcatgcacctttctggtattaagcacgctaccggcgaggccatctactgtgacgacatgcctgcagtagaccgggagcttttcctgacttttgtaacaagttcaagagcacacgctaagattgtgtccattgatctgtcagaagctctcagcctgccaggcgtggtggacatcattactgcggatcatcttcaggacrcaaccaccttcggcacagagacgcttctggccacagataaggtccactgcgtgggccaacttgtctgtgccgtgattgcggattctgagacacgggcaaagcaagcggcgaagcacgtgaaggtggtctaccgagacttggagcctctgatcctaactattgaggaagctatacaacacaagtccttcttcgagtcagaacggaagctggagtgtggaaatgttgatgaagcgtttaaaattgctgatcaaattcttgaaggtgagatacacataggcggccaggaacatttttatatggaaacccaaagcatgcttgttgtccccaaaggagaggacggagagattgacatctatgtgtccacacagttccccaagcatatacaggatatagttgctgcaaccttgaagctttcagtcaacaaggtcatgtgtcatgtaaggcgtgttggtggggcgttcggagggaaggtaggcaagaccagcatcatggcggccatcactgcattcgctgccagcaaacacggtcgcgcggtccgctgcactctggaacgaggggaagacatgttrataactgggggccgccatccttaccttggaaagtataaagttggattcatgagggacggcagaatcgtggccctggatgtggagcactattgcaatggagggagctccctggatgagtccttatgggtgatagaaatggggcttctgaagatggacaacgcttacaagtttcccaatctacgctgccggggctgggcctgcagaaccaacctcccgtcccacactgctctgcgtgggtttggctttcctcaggcagggctggtcaccgaagcctgtgtcacagaagtggcaatcagatgtggcctgtcycctgagcaggttcgaaccataaatatgtacaagcaaattgataatacccattacaagcaagaattcagcgccaagaccctctttgagtgctggagagaatgcatggccaagtgttcctactctgagaggaaaacggctgtaggaaaattcaatgcagagaattcctggaagaagaggggaatggccgtgattccattgaagtttcctgtgggtgttggctcagtagccatgggacaggcggctgccctggtccatatttatcttgatggctctgcactggtctctcacggtgggattgagatggggcagggtgtccacactaaaatgatccaggtggtcagccgggaattaaagatgccaatgtcgagtgtccacctgcgtgggacaagcacagaaaccgtccccaacaccaatgcatctggaggctctgtggtggcagatctcaatggattggcagtaaaggatgcttgccagacccttctaaaacgccttgagcccatcatcagcaagaacccccagggaacttggaaggattgggcccagactgcttttgaccagagcgtcagtctctcggctgttggatatttcaggggctacgagtcgaatataaactgggagaaaggggaaggccatcccttcgaatactttgtgtatggagctgcctgctcagaggttgaaatagactgcctgaccggggaccataagaatatcagaacagacatcgtgatggatgttggccacagcataaacccagcccttgacataggccaggttgaaggtgcatttattcaaggaatgggactttacacgatagaggagctgagctactctcctcagggcattctgtacagtcgtggtccaaaccartacaagatccctgccatctgcgacatccccaccgagatgcacatttcttttttgcccccatccgaacactcaaacaccctgtattcatctaagggtctgggagagtctggggtgttcctgggctgttcggtatttytygscatcsakgacrcaswgagggcagcgcggcargagagaggcatctctggaccatggaagctcactagtcctctgactccagagaaaatcagaatggcttgtgaagataagttcasaaaaatgattccaagagatgaacctggatcctatgttccctggaacatacctgtgtgagtgaaatatgaacttctgaaaggattggctcaacaactacagaacgcacctcccggtctctctgctctaagatgctaaatatgaaagccagagtttcacagcccagaatcatccacagcactgctttactgattcggaagtttctcttgaggatactccagatacacctgagacattataaatcatatatcaaattgcacaaatattaaatcgtttgctcaswaaaaaaaaaaaaaaaaaaaaaaaarwrarmggccgcaagcttattcccttta

SEQ ID NO: 2540 - DNA, 2516 bp, Rattus norvegicus
aatccgggctgagagaaggacgcgcacggagtggtgcggccgccacccggggcagacagcagcgggtgctctactgtgcccggaatcccggtcagaacatccagtctaccactgttctctgatgccatgccagcaccaactcaactgttttttcctctcgtccgtaactgtgaactgagcagaatctatggcactgcatgttactgccaccacaaacatctctgctgttcaccaccgtacattcctcagaatcgtctgagatacacaccccatccagcatatgctaccttttgtaggccaagggagaactggtggcagtatactcaaggaaggagatatgcttctacgcctcagaaattttacctcacacctccacaagtcaacagcatccttaaagctaatgaatacagcttcaaagtaccagaatttgatggcaaaaatgtcagttccattcttggatttgacagcaatcgtctgcctgcaaatgcacccatagaagaccggagaagtgcaacaacctgcttgcagaccagagggatgcttttgggcgtttttgatggtcatgcaggctgtgcttgctcccaggcagtcagtgaaagactcttctattatattgctgtttccttgttaccccatgagactttgctagagattgaaaatgcagtggagagtggtcgggcactgctacctatccttcagtggcacaagcaccccaatgattacttcagtaaggaggcatccaaattgtatttcaacggcttgaggacttactggcaagagcttatagacctcaatactggagaatcagctgatattgatgttaaggaggctttaattaatgctttcaagagacttgataatgacatttcattggaggctcaagtcggtgatcctaattcttttctcaattacctggtgcttcgggtagcattttctggggctactgcttgtgtggcccatgtagatggtgttgacctccatgtggctaacactggcgatagtagagccatgctaggtgtgcaagaagaagatggctcctggtcagcagtcacgctctctaatgaccacaatgctcagaatgaaagagaactacaacgtctaaaactggaacacccaaaaaatgaggccaagagcgtggtaaagcaggatcggctgcttggcttgctgatgccctttagggcttttggggatgtaaagttcaaatggagcattgaccttcaaaagagagtgatagagtctggcccagaccagttgaatgacaatgaatacaccaagtttatccctcctaactatcatacacctccttatctcactgctgagccagaggtaacttatcaccgattaaggccacaggataaattcctagtgttagcaactgatggattgtgggagactatgcatagacaggatgtggttaggattgtgggtgagtacttaactggtatgcatcaccaacagccaatagcggttggggggtacaaggtgactctgggacagatgcatggccttttaacagaaaggagagcaaagatgtcatcagtctttgaggatcagaatgcagcaacccatctcattcgccatgctgtaggcaataatgaatttggagctgttgatcatgaacgactctctaaaatgcttagccttcctgaagagcttgctcggatgtatagagatgacattrcaatcaykrkrgttcagttcaattytcatgttgtaggagcatatcaaamccaggaacagtaagtgatactatcctggcagttcttcaktttgaagggcagatcaatgttcaaaagaaactaatacagtaaatatcccagtgggtcattctaaacacatcatgtttagtactctagctagcccagtcttcatatctactgcatcagatgatagcatcatgagtgtctgttctgtcctgttggacctcagggtacctgcacttgaggcagcttgtttccttacccaggtgtcttttaacaatgactcaccaactaagaatatggataggtagatacgatcttgaataggtcaaaagcaaggaacttctgggagtattagtaaaggtagaaaacatcaccatgcccacctgcagactccttccatcataagactcctaatgtacatgagaatagttatttactgcatttttcagatgaacagttcaggtattcacatacatttatgttagcctaaagtgcaggtccagtattttcagccatttatgaccatgaacaaagaaatctggatttgtaagtttttgtgattskgtgctaaagtatgcttyctgaacggaaagaattmtaaaccgttcttccttcctcacccatgatttcctcagtgtaaccgaaatattttgttttgctacacctaaaagacaataaagattcttagtttaaatcyatctttctagtgmatgytaaataaagggaaaatgtgtttttctgsytygtattcatgaaaagctttatttagtttgaaataaagatatmtgcmgamtgaaaaaaaaaaaaaaaaaa

SEQ ID NO: 2541 - DNA, 812 bp, Rattus norvegicus
ttgtccactccagatacacttcaccatcttgtccttctctctctccaacagaagggtgatacagaatggcgtggtccaggctgatgctggcagcttgcctccttgtgatcccctctgaggttgcagcggactgcctgtccttgtgttccctgtgtgcagtgaggacgcaggatgggccccatcccatcaaccccctgrtwkgytycmtgsartgmcwkswccwkgtkmykcymtykswggagtgggagmcmtgccggggcttttggtcttttctcaccctgactgcctctgggctccatggcaaggatgacttggagaatgaggttgctttggaagaaggctacacggcactgaccaagctcttggagcccctcctgaaggagctggagaaaggccaactccttaccagcgtctcagaggaaaagctcaggggtctctccagcaggtttggcaacggaagagaatctgagctactgggcactgacctgatgaatgatgaagccgcacaggctggcacgctccatttcaacgaggaggacttgagaaaacaggccaaacgctatggcggctttttgcgcaaataccccaagaggagctccgagatgactggggacgaggacaggggccaggatggggatcaggtagggcatgaggacctgtacaaacgctatgggggcttcctgcggcgcattcgccccaagcttaagtgggacaaccagaaacgctatggtggttttctgcggcgtcagttcaaggtggtgactcggtcccaggagaaccccaatacctattccgaagatttagatgtttga

SEQ ID NO: 2542 - DNA, 2756 bp, Rattus norvegicus
cgggccgggtagccactgccgctggccgccgccactgcatctactgtcgccgccaccgccgctgccgccagcatcgcctgaggagtgagtccgggaaggacgtagtcgctgcccttcgatcttcccggaagcgcctttgctccctacagtcctccgcgaaaatgaccatggacaaaagtgagctggtacagaaagccaaacttgctgagcaagctgagcgttatgatgatatggccgcagctatgaaggctgtaacagagcagggacatgaactctccaatgaagagaggaatctactctctgttgcctacaagaatgtggtaggtgcccgcsgttcttcctggcgagtcatctccagcatcgamcagaaamcagagaggaatgagaagaagcagcagatgggcaaggagtaccgtgagaagatagagsccgagctgcaggacatctgcagtgacgttctggagctgttggacaaatatctcattctcaatgctacccatgcagaaagcaaagtrttckrcttamrarkgaaaggagactattttaggtatctttctgaagttgcatctggagataataamcaaaccactgtgtcaaactcccagcaggcgtaccaagaagcatttgaaatcagcaagaaagaaatgcagcytacacaccsgattcgccttggcctggctctgaatttctcagtcttttmctatgagattctaaactctcctgaaaaggcctgtagcctggccaaaacggcgtktgatgaagccatwgctgagttggacaccctgaatgaagagtcttacaaagacagcaccctgatcatgcagctgctaagggacaatctcaccctgtggacgtcagaaaaccagggggatgaaggagatgctggagagggagagaactaatgtctattgagctctgtgatctgtttggtgtcactgtatcctccacattatgtccctttgtgcgataamcaaawmcaaaaaaamwmmaawrwrramwwwmrawmtttcacagcctaagccttgcagaaacggtccctgggatgaacagctggtatttgtatctaaaactcagactggtcccttaaatgccatggtattttgaagtcttgatttgatcaacattgacaaggattactgtgtgtttaatttttacaaactgaacactgtgattacagggctttataacttagcagagctcttcctggtaggaaaaattgacctgaattatgtgtaactttttggaaagtttaatctgatatcaaaatgswcaskgaaatacaattctgttgtaaagttgtacagaaagttctagagattctcttgtgatgctgggacttgggcgagatgcttacccttggcatcctgagtgtggtaactcacagtaattctgcctgtggttgagggcctgttaacccttgatcactttgggctgttaccactcaaaagttcatgaccgyaaatatctgcagtgtcttctgaggaaattcaaaacctgaaastgaacttctttggctgataattgggctgtaacaccacaaaaaggtcccgtgttcataccacatgtgtgactaaacctttttattatagcaacgtgttcctgattagctccatrtgaaaacggggctgttaccccctakctgaaggagaggggaaararararaaartagtgtatcatataaacggccataccagttttttggatgattcttcaatgttctgtggatgcggcctcttgcctgaggagcattcctagccttggggtgggagctgtgacacgtaacattcttctcaccctgtccttttgacttttgactttttcctctttaaatgtacagctttctgcttccttgggtggttttcttgggaagcctttattagtcagtactgtgtggacagggcggggcattgagcacatggtgagagctgtgctttaaaggttgagaaagaccttccagcaccacaccctgtctccctccaggtctcagcacagttgttcttcatagtatgacccaaatcgggaaaaaataaaggacttttaagtatttgtgatttcccccattgcacccagccctgacagtgctttgtctgtgcctgtgacagaccctcccctccagtggactcatccagcttcgtcctcagacacgcctcaagaagacttagaacacagggaagttgcatggacactacagtagagagaaccaagaacagccaggccttcagtctcacagtatcacccctctaccttgacattccgtgtacccatagctgtagagttcatccgtttgtccatctgctgaaatatgaaaagaattcatgcactgatttaaacaaaaacaaaaaacccacaaaaaaatttcttctttctagctgaacagaaaacgtgcagttaatactcggcgcttgacaagcagcagcgagtgtggaccaagcctgtctgtatctggtagctcttcgctctgttttctttccttaccagtattctgcctaatgtttgcttccgtggtggttctttgcctagcaagcacacctgtggttgtgaaaatagtatagcaaaaagaaaaagaccccctccccacccccagttactgatgtgctagatccgtgtatgtcttttaaacattctagtttctccttacacagagtaatcaggacgatgtaaaaactcaaaactgaaataaaacatcttatcagttaaaaaaaaaaaaaaaaaaaaaaaaaaaaaaaaaaaaaaaaaaaaaaaaaaaaaaaaaaaa

SEQ ID NO: 2543 - DNA, 2398 bp, Rattus norvegicus
  misc_feature (2384)..(2384): n is a, c, g, or t
  misc_feature (2386)..(2388): n is a, c, g, or t
gggacgggggaaggacggagctcggccgctgctgcctccctcgttcactccctcgcgctctcgcccgccccctccctccctcccctcccttccccgggcccgggcccggaccattcgctgctcgctctccggctagggaggatgtcgggctcgtcgctccccggcgccctggccctctcgctcttgctggtctctggctcgctcctcccagggccaggcgctgctcagaacgctgggtttgtcaagtcgcccatgtcagaaactaagctcacaggggacgcctttgagctgtactgtgatgtggtcgggagtcccacgccagagatccagtggtggtacgcagaagtcaaccgggcagagtctttcagacagctgtgggacggtgctcggaagcgccgtgtcaccgtaaacaccgcctacgggtcaaacggcgtgagtgtgctgagaataacccggctcaccttggaggactctgggacttacgagtgcagggcaagcaacgaccccaaacggaatgacttgaggcaaaacccttccataacatggattcgagcccaggccaccataagcgtccttcagaaaccaagaattgtcaccagcgaagaggtcattattcgagacagcctccttcctgtcaccctgcagtgtaacctcacttccagctctcacacccttatgtacagctactggacaaagaatggggtagaactcactgccacccgtaagaatgccagcaacatggaatacaggatcaataagccaagagctgaggattcaggcgaataccactgtgtatatcattttgtcagcgctcctaaagcaaatgccaccattgaagtgaaagctgctcctgacatcactggccataaacgcagtgaaaacaaaaatgaagggcaggatgctatgatgtattgcaagtctgttggctacccccacccggaatggatgtggcgcaagaaggagaatggtgtgtttgaggagatttccaatagctctggtcgcttcttcatcatcaacaaggagaattacactgaattgaatattgtgaatctccaaatcacagaagatcctggagagtatgaatgtaatgccaccaactccattggctctgcctccgtttccacagtcctcagggtacggagccaccttgccccactttggcctttcttgggaattctggctgaaatcatcatccttgtggtgatcattgttgtgtatgagaagaggaagaggccagatgaggttcctgatgccgggccaatgaaaaccaactctaccaacaatcacaaagataaaaacttgcgccagagaaacacaaattaagtactgcttttaatctctttaggttcctgaaaaatgatggcaacatgacctgctaagttttctgcttggacctctttggtctctccctttcaagtgagcaacaccacaatgaccgtctaaagcatgccttatttagcctctcctataagggtgacctagccaggtacattttaaacaatgcttcagtgtagaaggtgtaaactattttggggcttgatgtgctgtgaatgttgctttccctccctttgttaaaatatttaaatagaagcgaaaggtcctttgaggatcagatcatgcatgcgccatttttttacttatacagctgttaamwygrsraagctctaaatgcactgctgccatctagtgatcattttgtaaagtacagcaaaacytacagatatatmcagtatataaatatatatatattyatatytytgggggtgggagaaatccaaaataaagtcaaagcttgtttcatttttragctgctgatactcattccytattatttgktktcrgatgaggaagctgcagttytggtacaaaaagatgagagtataaacttargtytgtcattywaagggcttacttacmmkakractttaagaacctggammagtccmctgaacggstrgaatgaattgcagtatatatgtatgawtgctttttaagtgactatttttccttttgtcaaatcatgtaaattctgamatcttttgcactgatgtgtcgaaccttattyttgtatattcaatcaaggcaacttttataatttcccatttgttttcaatgaccctgaaatgttaatagcatggtgatattctatgcaactctagttataccttttggtttgacactgtattttcacattgatttcatgactgatgatagattttataacctgactgggttytcatgcggtactaactgtaratgcatgkacttgtgttctgtgtaattattgaagtgcaatggtgtacaaaaaaagtgaattcacctgtttttaacaataaaacattgataaaarrwrmwwrraawaawamwmwwwawwmaaaaaaaanannnaaaaaaaaaa

SEQ ID NO: 2544 - DNA, 2928 bp, Rattus norvegicus
cagctccgaaagagggagcgcccgcggcgtcggtccggagtggggtcgccatggggcgaggcagcggcaccttcgagcgtctcctagacaaagccaccagccagcttctattggagacagactgggagtccattctacagatctgcgacctgatccgtcagggggacacacaagcaaaatatgctgtaaactccatcaagaagaaggtcaatgataagaacccacatgtggctttgtatgctctggaggtgatggagtctgtggtaaagaactgtggccagacagtccatgatgaagtggccaacaaacagaccatggaagaactgaaggagctgctgaagaggcaagtggaagttaatgttcggaacaagatcttgtacctgatccaggcctgggcacatgccttccggaatgaacccaagtacaaggtggtccaggacacataccagatcatgaaggtagaaggacatgtcttccctgagtttaaggagagcgacgccatgttygctgctgaaagagcccctgactgggtggatgctgaggaatgccatcggtgcagagtacagtttggagtggtgacccgcaagcatcactgccgagcgtgtgggcagatcttttgtggcaagtgttcctccaagtactccaccatccccaagttcggcattgagaaggaagtgcgcgtgtgtgagccctgctatgagcagctgaacaagaaggcagaagggaaagctgcctctaccactgagctgcccccagagtacctgaccagccccctgtcacagcagtctcagctgcccccaaagcgggatgagacagcgctgcaggaagaggaggagctacagctggckctggccmtatcacagtcagaggctgaggagaaggaaaggatgagacagaagtcaacatacacagcgcatccaaagtcagagcctgcgcccttggcttcctctgcacccccagctggtagcctgtactcctcgcctgtgaactcatcagcacctctggctgaggacatcgaccctgagcttgcaagatacctcaaccggaactactgggagaagaaacaggaagaagctcggaagagccccacaccatctgcacctgtgcccctgaccgagccagctgcccagcccggagaaggacatacagcccccaacagcatggtagaggcccctcttccagagacagactctcagcccataacttcctgcagtggcccctttagtgagcagtaccagaacggggagtcggaggagagccacgagcagttcctcaaggccctgcagaatgcagtcagcacttttgtcaaccgcatgaagagcaaccacatgaggggccgcagtatcaccaatgactcggctgtgctgtccctcttccagtccatcaatagcacacacccacagctgctcgagctgctcaaccggctggatgagcgcaggctgtactacgaggggcttcaggacaagctggcacagatacgtgatgcccgaggggccctgagtgccctgcgtgaagagcacagggagaagctgcgccgggcagctgaggaggcggagcgtcaacgtcagatccagctggcacagaagctggagatcatgagacaaaagaagcaggagtatctggaggtgcagagacagctagctatccagcgtctgcaggaacaggagaaggaacggcagatgcgcctggagcaacagaagcagactgtccagatgcgtgcccagatgcctgccttccccttgccttatgcccagctccaggctatgcccacagctgggggtgtactctaccagccctcaggcccaaccagctttcctggcacctttagcccagcaggctcagtagagggctctccgatgcatggtgtgtatatgagccagccagccccagccactggcccctaccccagcatgcctggcaccacagcagatcccagcatggtcagcgmctacatgtacccagcaggtgcccctggggcacaggcagcccctcaggcccaggccgggcccaccaccaaccctgcctactcctcgtaccagcctactccaaccccaggctaccagaatgtggcttctcaggccccacagagcctcccagccatctcccagcctccacagaccagcaacattggctacatggggagccagccaatgtccatgggctaccagccatacaacatgcagaatctcatgaccacccttccaggccaggatgcgtctctgccagcccagcasccstacatcrcagggcagcagcccatgtaccagcagatggcacccagcactggccctccccagcagcagccccctgtggcccaaccgccacctacacagggaccgccagcacagggcaatgagacccagctcatctccttcgactgacyttgagtctggcgctcaccatccagagtaacabtacagttcwccagaaaccacttatatgtctaactagccatttcskccsakdmctgscckgtagtgtcccttctgtgagcaaggggtgggcmttcacccwtggccctcctccctgtcmtmagtggtctggctcctgtcactggttccctgmtttggtcctgatgcagtccraccttcccgggactgggactctgcakgacragkaggaccttttctggagaatgcccagctgtgtcggggcctgccagaggtgactgctgtggggatggttagcctggcccagartccgatgtraamtgtgtggtgtccaggcatggccmtggtacccagaagaacgatgtgacccatgcacagcaagggtrgaagtttcaggcatctmtgtctcccstactcmttggatgtcatmtckccagtgcagaacagtgaaaataaaatgtatktcaaaawwmwmwraaraaraaaaaaaaaaaaaaaaaaatactctagcggccgcaagcttattctatttagtgag

SEQ ID NO: 2545 - DNA, 8571 bp, Rattus norvegicus
ggcacgagcggcacgaggcggtagctgaggcggtggccgaagccgcgcgaacctcagggcaagatgcttgggacaggccctgccacggccaccgccggtgccgccacatctagcaacgtgagcgttctgcagcagttcgccagtgggctgaagagccggaatgaggagaccagggccaaagcagccaaggagctccagcactatgtcaccatggaacttcgagagatgagtcaggaggagtctactcgcttctatgaccagctgaaccatcacatttttgaactggtttccagctcagacgccaatgagaggaagggtggcatcttggccattgccagcctcattggagtggaaggtgggaattccaccaggattggcagatttgccaactaccttcggaacctcctcccctcaagtgatccagttgtcatggagatggcatccaaggccattggccgccttgcaatggcaggggacactttcactgctgagtatgtggagtttgaagtgaagcgagccttggagtggctgggtgctgaccgaaatgagggccggagacatgcagctgtcctcgttctccgtgagctggccatcagcgtccccaccttcttcttccagcaagttcagcccttctttgacaacatttttgtggctgtgtgggaccccaagcaggccatccgtgaaggagctgtggctgcccttcgtgcctgtctgattcttaccacgcagcgggagccgaaggagatgcagaagcctcagtggtacaggcacacatttgaagaagcagagaaaggttttgatgagaccctggccaaagagaagggtatgaaccgagatgatcgaatccacggggccttgctgatcctcaacgagctcgtccgaatcagcagcatggagggagagcgtctgagagaggagatggaggaaatcacccagcagcagctggtacatgacaagtactgcaaagacctaatgggctttgggacaaagcctcggcacatcactcccttcaccagcttccaggctgtgcagccccagcagtcaaacgccttggtgggactgctggggtacagctcccaccaaggcctaatggggtttggggcttcccccagccctacaaagtccactctggtggaaagccgttgttgcagagacttgatggaagagaaatttgatcaggtgtgccagtgggtgctgaaatgtaggagcagcaagaactcactgatccaaatgacaatccttaatctgttgccccgcttggctgcattccgaccgtctgccttcacagatacccagtacctgcaagacaccatgaaccatgtcctgagctgtgtcaagaaggaaaaggaacggaccgcagcgttccaggccctagggctgctttctgtggcggtgaggtccgagtttaaggtctacctgccccgagtacttgacatcatccgagcagccctgcctccaaaggactttgcccacaagaggcagaaaactgtgcaggtggatgccacagtgttcacgtgcatcagcatgctggcgcgggccatggggccaggcatccagcaggacatcaaggagctgctggagcccatgttggcagtgggcctgagccctgcgctcactgctgtgctctatgacctgagccggcagattccgcagctgaagaaagatattcaggacgggcttctgaagatgctgtccctggtccttatgcacaaacccctgcggcacccgggcatgcccaaaggcctggcccaccagctggcctccccaggtcttaccaccctccctgaggccagcgacgtggccagcatcactcttgcccttcgaactctcggcagctttgaatttgaaggccactctctgacccagttcgtccgacactgcgcagatcatttcctgaacagtgagcacaaggagatccgcatggaagcagcccgcacctgctcccgcctgctcacaccctccatccacctcatcagcggccatgcccatgtggttagccagaccgcagtgcaagtggtagcagatgtgctcagcaagctgcttgtggtcggcataacagatcctgatcctgatatccgctactgtgtcttggcctccctggatgagcgcttcgatgcccacttggcccaggcagaaaacttacaagctctgtttgtggctctgaatgaccaggtctttgagatccgagagctggccatctgcactgtgggccgactcagtagcatgaacccagcctttgtcatgcctttcctgcgcaagatgctcatccagattttgacagagctggagcacagtggcattgggagaatcaaggagcagagtgcccgcatgctggggcacctggtctccaatgccccccgcctcatccgcccctatatggagcctattctgaaggctttaattttgaaactcaaagatccagaccctgacccaaacccgggcgtgatcaataacgtgttggccactataggagaactggctcaggttagcggcctggagatgaggaagtgggtggacgagctctttgtcatcatcatggacatgctgcaggactcctctcttctggccaaaagacaggtggctttgtggaccctgggacagttggtggccagtactggctacgtggtggagccctacaggaagtaccccactctgcttgaagtgctgctgaattttctgaagacggagcagaaccagggcactcggagagaggccatccgagtgttagggctcctcggggctttggacccctacaagcacaaagtgaacatcggcatgattgaccagtcccgagatgcttctgctgtcagcctgtcagaatccaagtcaagtcaagattcctctgactacagcaccagtgaaatgctggtcaacatgggaaacctgccactggacgagttctaccccgccgtgtccatggtggccttgatgcggatcttccgagaccagtccctctctcaccaccacaccatggtggttcaggccatcaccttcatcttcaagtccctggggctcaagtgtgtgcagttcctgccccaggtcatgcccacgttccttaacgtcatccgagtctgtgatggggccatccgggaatttctgttccagcagctgggaatgctggtgtcctttgtgaagagccacatccgtccctacatggatgaaatagtcaccctcatgagagaattttgggtcatgaacacctcaatccagagcacaatcattcttctcattgagcaaatcgtggtggctcttggaggtgaatttaagctctacctgccccagctgatcccacacatgctgcgtgtcttcatgcatgacaacagccagggccgcatagtctccatcaagctgttagcagcgatccagctgtttggcgccaacctggatgactatctgcacttgttgttgcctccgatcgtgaaattgtttgatgcccctgaagttccactgccgtcgagaaaggcagcgttggagacagtggaccgcctgacagagtccctggatttcactgactatgcctcccgcatcattcacccgattgttcgcacgctagaccagagcccagagctgcgctccacagccatggacaccctgtcttcacttgtgtttcaactagggaagaagtaccagatcttcattccaatggtgaataaagtccttgtgcgacaccggatcaatcaccagcgctacgacgtgctgatctgcagaatcgtcaaggggtacacgcttgctgatgaagaagaagaccctttgatttaccagcatcgaatgctaaggagcagccagggagatgccctggccagtggaccagttgaaacaggacccatgaagaaactgcatgtcagcaccatcaacctccaaaaggcctggggagctgccagaagggtctccaaggacgactggctggagtggctgcgacgcttgagtctggagctgctgaaggattcctcatcaccttccctgcgctcatgctgggccctggcccaggcctacaaccccatggccagggatctcttcaacgctgcgtttgtgtcctgctggtctgaactgaatgaagaccaacaagatgagctcatcaggagcattgagttggctctcacttctcaagacattgctgaagtcacacaaaccctcttgaacttggctgagttcatggagcacagtgacaagggccccctaccactgagagatgacaatggcatcgtgctgttgggtgagagagctgccaagtgccgggcatatgccaaagcactacactacaaagagctggagttccagaaggggcccacgcctgccatacttgagtccctcatcagcattaataataaactgcagcagcctgaggcagcgtccggggtgttagagtacgccatgaaacacttcggagagctggagatccaggccacctggtatgagaagttgcatgagtgggaggacgcccttgtggcctacgacaagaagatggacacgaacaaggatgacccagagctgatgctgggccgcatgcgctgtctcgaggccttgggagaatggggccagcttcatcagcagtgctgtgaaaagtggactctggttaatgacgagacccaggctaagatggcccggatggctgctgcagcagcatggggtttaggtcagtgggacagcatggaggagtacacctgtatgattcctcgggatactcacgatggagcattctacagagcagtgttggcactgcatcaggatctcttctccttggctcaacagtgcattgacaaggccagggacctgctggacgccgagctgactgccatggcaggggagagctacagccgagcctatggggccatggtttcttgccacatgctgtccgagctggaggaggttatccagtacaaactcgtcccggagcgacgggagatcatccgccagatctggtgggagagactgcagggctgccagcgtattgtagaggactggcagaaaatcctcatggtccggtcccttgtggtcagccctcacgaggacatgagaacctggctcaagtacgcaagcctgtgtggcaagagcggcagactggctcttgctcataaaaccttagtgttgctcttgggagttgatccatctcggcaacttgaccatcctctgccaacagttcaccctcaagtgacctatgcctacatgaaaaacatgtggaaaagcgctcggaagattgatgccttccagcacatgcagcactttgtgcagaccatgcagcagcaggcccagcacgccattgccacagaggaccagcagcacaagcaggagctgcataagctcatggccaggtgttttctgaaacttggggagtggcagctgaacctccagggcatcaacgagagcaccatccccaaggtgctacagtactacagtgctgccacagagcatgaccgcagctggtataaggcttggcacgcatgggcagtgatgaactttgaagccgtgctacactacaaacatcagaaccaagcccgcgatgagaagaagaaactgcgccatgccagcggggccaacatcaccaatgccaccaccactgccaccaccgctgcctccgctgccgctgccaccagcacagagggcagcaacagtgaaagtgaagccgagagcaatgagagcagccccaccccgtcccctctgcagaagaaggtcactgaggatttgtccaaaaccctcttgttgtacactgtccctgctgtccaaggcttcttccgttctatctccttgtcgagaggcaacaacctccaggatacactcagagtcctcaccttgtggtttgattatggtcactggccagatgtcaatgaagccctggtggaaggggtgaaggccatacagattgacacttggttacaggttatacctcagctcattgcaagaattgacacgcccagacccttggtgggccggctcattcaccagctcctcacagatattggtcggtaccacccacaggccctcatctaccccctgacggtggcttctaagtctaccaccacagcccgtcacaatgcagccaacaagatcctgaagaacatgtgcgagcacagcaacacgctagtccagcaggccatgatggtgagtgaagagctgattcgagtagccatcctctggcatgagatgtggcatgaaggcctagaagaggcctctcgcttgtactttggggagaggaacgtcaaaggcatgtttgaggtgctggagcccctgcatgctatgatggaacgcggtccccagaccctgaaggaaacgtcctttaatcaggcatatggtcgagatttaatggaggcacaagaatggtgccgaaagtacatgaaatcagggaacgtcaaggacctcacccaagcctgggacctctactatcacgtgttcagacggatctccaagcagctaccacagctcacatccctggagctgcagtatgtgtcccccaaacttttgatgtgcagagaccttgaattggctgtgccaggaacatatgaccccaaccagccaatcattcgcattcagtccatagccccgtctttgcaagtcatcacatccaagcagaggcctcggaagctgaccctgatgggcagcaatgggcacgagtttgttttcctcctgaaaggccatgaagatctgcggcaggacgagcgagtgatgcagctctttggcctggtgaacacactcctagccaatgacccaacttctcttcgaaagaacctcagcatccagagatacgccgtcattcctctgtccaccaactcgggcctgattggctgggtgccccactgtgacacgctgcatgccctcatccgggactacagagagaagaagaagatcctgctgaacatcgagcaccgcatcatgctgcggatggctcctgactatgaccacctgactctgatgcagaaggtggaggtgtttgagcatgctgtcaacaacacagccggggatgacctggccaagctgctgtggctgaaaagccccagctcagaggtgtggtttgaccgaagaaccaattatactcgctccctggctgtcatgtccatggttggatacattttaggccttggagacaggcacccatccaacctgatgctggaccggctgagtggaaagatcctgcacattgactttggggactgctttgaggttgctatgaccagagagaaatttccagaaaagattccatttagactaacaagaatgttgaccaatgctatggaggttaccggtctcgatggcaactatagaaccacatgccacacagtgatggaggtgcttcgggagcacaaggacagtgtcatggctgtgctagaagcctttgtctatgaccctctgctgaattggaggctgatggacacaaatgccaaaggcaacaagcggtcccgaaccaggacagactcctattctgcaggccagtcagtagaaattttggacggtgtagaacttggagaaccagcccataagaaaacagggaccactgtgccagarkccatccattctttcattggagatggtttggtgaaaccagaagccttaaacaagaaagctattcwgattattaacagggttcgagataagctcactggtcgggatttctctcatgatgacactttggatgttccaacccaagtggaactgcttatcaagcaagcgacatctcatgagaacctctgccagtgctacattggctggtgtcctttctggtaaccaaggcytggcaaagaaaatcatctcctccgatgcttttgtaccttggtctgtgcttccagtggactgaaaccatggtcataaagttggactttgttaayakwkkgaaatgtatatgaaaagaactactgtatattcaaagttggcttatgccaacctcctagctgctgttgaaaagacactgtcagaaacacaaggcttgattcagttcccaggacagtgaaacacagtaatcctacagaaaccaagcctttgattttgggagaacagaagatgagtaactgactaagaaatacgggtttkgacttaacttacagaagaactcatcatacgcatttgctgaccgaataatctagttgatcctctcarccaggggcttcaacagcaaggacacagmtgtcagcactccaccatcytgttacctcacccgtccctggatgcagtggcaacatctgcaggatggrccaccgtgtgtgtaagaagatctgtcttccacctgatcccatgatgctgaacctcacagagccggccttccaggaaggacgtttgctcagacgcctggccaccgaggatgagcakgtgtgccaggatctcagtgcagggtccacgctggccctgctgctgtgttcagtgagggatggatatgttgtgtttgcagcagsgactcagaacacaaatgcttktgtggaagtgctgatctcagagggacaytagcgcaggttkkgaattwagrgcaaagtaaatrkccaactaaacacaaagtataagtgaagccacatctagacaccattgtatctgagtaatttttgtgccaataaatgrcatcagaattttwaargtaaaaaaaaaaaaaaaaaa

SEQ ID NO: 2546 - DNA, 1465 bp, Rattus norvegicus
  misc_feature (772)..(772): n is a, c, g, or t
tgatgtattttggcagctgctcctgctttgcgggttgagggggacaggacgacccgtggaaggatggtgtgtgaaaagtgtgaaaagaaactcggcagggttatcactccagacacatggaaggacggggcccggaacaccacagaaagtggtggaaggaagctgaacgaaaacaaagctctgacttcgaagaaagcaaggtttgatccatatggaaaaaataagttctccacttgcagaatttgtaaaagttctgtacaccagccaggttctcattactgtcaaggctgtgcctacaagaaaggcatctgtgckatgtgtggcamraaggttttggatactaaaaactacaagcwgacttccgtctagkctgttkaagattccaactcyacggttgtatttgtgcttcakcttttcaagcgtwacacggatgtccatctcacaaaatgacctgtttgaggatgaatgattcagtctkaarcagggacgttgatcagtattgatctgtctgctctcatgaagttgwgaatgaagtttckgcckyarrtggttwttttccttgwgagcattttactgaactwgayamghgrcaaaattwatgwacgaggtttcccaacttgtgtacgcactgtctactcgacattatctwattaatgwgtacgcactgtctactcgacattatctgkataattaatgagtaaggtgttccctacttctgtackcactgtctactagacattatccatatwawwmmwawmwrammmamvmdwwnhmhwhrtrsmkattgcaaatgtgwaatcactgattctttgctctgaacttgacatccagacttgagatttctcactttctcacaaacattgcagttcttagaacaaacagggccttagttactgcattytcatgagctataatgtctsagaccatttttgcagagtggttccttggtgaccagtcctgccacaagtctaagataagttgcatttttwyttaaagttgctgttgctgctaaarwrarwwwmwwwwacgtgtgactgagtgccatggggcccgatstccaggcagacactgaagttcagagacgtgcgttctgtcagcattatcttaaattcaamtgmgaatacatttattctgtttgggaatgttctttgaagaaggawacatagctttccttaacaccccccaacccccgctgccayttcctcagaaataaagcaggcctctggcctctgacattgctgcagcctsccagggggctgctgtgaatgaaggtttttcttgttgccttctttgggttgggccttccacctttaaaaccctcagcctacccakagaccaaaagcatattctctgtttttatctgcaggatcttaaatgcatatcactgtgtaatgtgagacctactataaacaatgaaaaaataramawwrawwawrrwwttaaaattaaaaaaaaaaaaaaaaaa

SEQ ID NO: 2547 - DNA, 2065 bp, Rattus norvegicus
ggcgggggccgcggcggcgagctcggaggccggcggcggctgccccgagggacgcggccctaggcggtggcgatgggggccgcccggatcgcacccagcctggcgctcctactctgctgcccagtgctcagctccgcatatgcgctggtggatgcggacgatgtctttaccaaagaggaacagattttcctgctgcaccgtgcccaggcgcaatgtgacaagctgctcaaggaagttctgcacacagcagccaacataatggagtcagacaagggctggacaccagcatctacgtcagggaagcccaggaaagagaaggcatcgggaaagttctaccctgagtctaaagagaacaaggacgtgcccaccggcagcaggcgcagagggcgtccctgtctgcccgagtgggacaacatcgtttgctggccattaggggcaccaggtgaagtggtggcagtaccttgtcccgattacatttatgacttcaatcacaaaggccatgcctacagacgctgtgaccgcaatggcagctgggaggtggttccagggcacaaccggacgtgggccaactacagcgagtgcctcaagttcatgaccaatgagacgcgggaacgggaggtatttgaccgcctaggcatgatctacaccgtgggatactccatgtctctcgcctccctcacggtggctgtgctcatcctggcctattttaggcggctgcactgcacgcgcaactacatccacatgcacatgttcctgtcgtttatgctgcgcgccgcgagcatcttcgtgaaggacgctgtgctctactctggcttcacgctggatgaggccgagcgcctcacagaggaagagttgcacatcatcgcgcaggtgccacctccgccggccgctgccgccgtaggctacgctggctgccgcgtggcggtgaccttcttcctctacttcctggctaccaactactactggattctggtggaggggctgtacttgcacagcctcatcttcatggcctttttctcagagaagaagtacctgtggggcttcaccatctttggctggggtctaccggctgtcttcgtggctgtgtgggtcggtgtcagagcaaccttggccaacactgggtgctgggatctgagctccgggcacaagaagtggatcatccaggtgcccatcctggcatctgttgtgctcaacttcatcctttttatcaacatcatccgggtgcttgccactaagcttcgggagaccaatgcgggccggtgtgacaccaggcagcagtaccggaagckgctcaggtccacgttggtgctcgtgccgctctttggtgyccamtacacygtcttcatgsccttgccgtacaccgaggtctcagggacattgtggcagatccagatgcattatgagatgctcttcaactcctkcmarggwttttktgttgccatcayatactgtttmtgcaatggtgaggtgcaggcagagattaggaagtcatggagccgctggacactggcgttggacttcaagcgcaaagcacgaagtgggagtagcagctacagctatggcccaatggtgtctcacacgagtgtgaccaatgtgggcccccgtgcaggactcagcctccccctcagccsccgcctgcctcctgccactaccaatggccactcccagctgcctggccatgccaagccaggggctccagccactgagactgaaaccctaccagtcactatggcggttcccaaggacgatggattccttaacggctcctgctcaggcctggatgaggaggcctccgggtctgcgcggccgcctccattgttgcaggaagaatgggaaacagtcatgtgactgggcactagggggctagactgctggcctgggcacatggacagatggaccaagaagccagtgtttggctggttgtctatcgggactggaccaggaagataacmaaaggaaaawrgaarwrramraarmarrgaagaaggaagaggttttgcaggaattaaatatgtttcctcagttggatgatgaggacacaaggaaggcctattataaggaattc

SEQ ID NO: 2548 - DNA, 1088 bp, Rattus norvegicus
tttttttttttgctaatcaagakgcyrcgaggggctgagctggtcagsatgcggcaggttcctgtgggmaccaggcttgtcctggctctcgccttcgtcctggtttggggmtcttcagttcaaggttatcctgctcggagagccaggtamcaatgggtccgctgtaaaccagatggcatttttgcaaactgcattgaggagaaaggaccacggttcgacctaatagcagaggamtccaacgtyggccccccgatgaccgatcctgttttgatgagaggattcccgaatgatttcttccccatttctgatgactattctggctccggctcyggctctggctctggctcyggctccggctctggctctggctctggmtcyggctcasgttccggctccggttccggttctggmtctggctcsggttctggctccggctcsggctctggctcaggargcggmtccctagctgmcatggaatgggaataccagccaacagatgaaaacaatattgtctatttcaactatggsccttttgataggatgctcaccgagcaaaaccargaacaaccaggagawtttattatatgaaagtaaccgtctswykmbscacctccacatgaaacaatgtgttcagtatactttgtgtaccacgtttaaatgagcagtctcaggataagttttacagaaaatttaaaatgcttggaaaagactcttgaatcctgttacccctttcctcattaattgataaggaattatgctttaatgctgttatctatcttattgttctggaaaatatccgcagctatatgtgtattgaatcataactttaaaagccatactggtttcgaaaactttawtttgatagcaagttgatgaacaatacttcatacctaaastgttccattgtgaattaaagatatattcctatgtgattaaaaagaaaataaaatgaaacacagtggcctcctammrwrrmwawrwrawrtggtttacatggtgaggggtataaattctgttatggccattggatatgacggggaagaccaaatgttgtttatctaaaaatgttgtgggttggggctggggat

SEQ ID NO: 2549 - DNA, 2431 bp, Rattus norvegicus
cccggggaatggccatgtggctcctcttgcttctgctgagtgggctgagtagacttggagggcttagcgagccccaaacagaaggcactcgtgagaaattacacgtgcaagtcacggtgccagagaaaatccggtccatcacaagtgaaggctacgaaacacaggtgacctacagtctcaaaatcgaagggaaaacatacatcctgaacctaatgcaaaaagcgttcttgcctcccaactttagagtctacagctatgacagcacagggatcatgaggcctcttgagcagaagtttcagaatatctgctacttccaaggatacattgaaggttatccaaattctatggtgattgttagcacatgtactggactcaggggagtacttcagtttggaaacgttagctacggaattgaacccctggaatcttccagtggttttgaacatgtaatctaccaagtggaacctaagaaaggagacacattactctatgccgagaaggatatggatttaagagacccgcagtataagatacgaagtatcaagcctcagcgaaccgtctcgcactatctggaaatacacattgtagttgaaaagcagatgtttgagcatattggggctgatacagctgttgtcactcaaaagattttccagttgattggactgacaaatgctatctttgccccctttaatcttacagtaattctgtcttccctggaattttggatggacgaaaacaaaatctcgaccacgggtgatgctaacaagttgctgtacaggttcctgaagtggaaacagtcgtacctcgttctgcgaccacatgacatggcgtttttactcgtctacagggacaccactgattatgttggcgccacctatcaagggaagatgtgtgacaagaactatgcaggaggcgttgctctgcaccccaaagccgtaactctggaatcacttgcaattattttagttcagctgctgagcctcagcatgggggtcgcatatgacgatgtgaacacgtgccagtgcggagtacccatctgcgtgatgaaccccgaagcacttcattccagcggtgtgaggtccttcagtaactgcagcatggaggacttctccaagtttatcgtaagtcaaagctcccactgtcttcagaaccagccacacctacagccgtcgtacaagatggcagtctgtgggaatggagagttggaagaaggagaagtttgcgactgtggacaggagggctgtgacgataagcctcctccatgctgtaatcccaccacctgtcagctgtcagagggctccacttgctccaccggaagttgctgcgacgcttcgtgcaatctgaaggcaaaaggggaactttgcaggcctgccaatcaggaatgtgacgtcacagagtactgcaacggcacttccgaagtgtgtgaagaagacttctttgttcaagacggtcacccatgtgcagaacagaagtggatctgtattaatggcacctgtcagagtggagcacagcagtgccgggatctgtttggcactgatgcagactatggtacaaaagaatgttactcggagctgaattccaaaagtgacatatctgggagctgcggtatcactcctacggggtacaaggactgcgcacctaatgaccggatgtgtggaaaactaatatgtatataccaaagtgaagacatacttaaaatgaggtctgccattgttatctatgccaatataagcgggcaaatctgcatctccctggaataccccccaggtcacaaagagagcaagaagatgtgtgtgagagatggaactgtctgcgggtcagggaaggtttgcttgaatcaagagtgtgtagaagatactttcttgaactatgattgcaccccagaaaaatgcaaccaccatggggtatgtaataacaagaagcattgccactgtgagcccacatacttacctccggattgtaaaaatacggaggatacatggcctggtgggagcgttgacagtggcaaccagcaacgggctgaatccatccctgcacggtcctatgttgcaagtgcctaccgctccaagtctgcaaggtggccatttttcctgatcatccctttctacgtggtgatccttgtcctgatcggcatgctggtaaaagtctattcccaaagaaaaaaatggagaatggatgacttctcaagtgaagaacaatttgaaagtgaaagtgaatccaaagactagtctggacagcaaagattccagtgtcatgtaattctcttcagtggacagaaaaaaaagtggaaaagaaaaacctatgcatcatctgtttgcctgaaagtcaagcctgcatgttgtggtttccatctggccagaaatcatatctctccatacacatgtgtgatacatatatgtgtatataattccataaatgatttacttgtaag

SEQ ID NO: 2550 - DNA, 2917 bp, Rattus norvegicus
gggctcgtctccatgagcgtcaaaggaacttaagccacactggagctcttccacttgacaaaagtccctgtgctgcacataaccaacgaggccaggagaaaaataagaccagagataccgcctgaggccagaggattcacgcaggggagcaccccttaagggacaggcttgggtctgggaaagcagtgagttgccactgatggacatagatcctacgctatccacagtttgtttgaaccatgtcagtggcagcatcagcgagcaggagtgcgtccacgctgtgttctccacagatccagcaaggagccttaaaagaagctaaggtgccccctcacatctgggctgcacggcattggaacctgggtctacgactagtgccaggacacgcatctgttagagcagggatcttggtgctactgatttttctcccgagcacgctctgtgacctaggatctgtatatgactcttcctatgagacggtcatccccgagagactgccaggccaggggagtgacgatcctggagggaaggtgtcctacgtgctgttgatgcaaggccaaaagcagctgcttcacctcgaggtaaagggacactactctgagaggaacttcccggtctacagctaccaccatggtatcctggggcaagaagtgcccctcctctcccaggcctgccactatgaaggccacatagaaggggtgccaggctcctttgtttctgtcagcatctgttcaggcctcaggggggtcttgatcaaagaggaaacagcctatggcatcgagcccctgctcttttccacagactttgagcacatcctctataccatggcgcaccagcctgtggtcctctgcaatgtcactcctacagacagcctgggggactccagccagcgacaagggagcagcaagaccgatgagctgctggctctgtctgacttgtggtcacacgccaagtatgtggagatgtttgtcgtggtcaaccaccagcgcttccagatgtggggcagtgatgtcaacacgacggtccaggcggtagtggacatcattgctctggccaacagcttcactaggggaataaacacagaggtggtgctggtgggcctggagatctggacagagggggacccgatagaggtcccagtggacctgcaggctacactgaggaatttcaacttgtggagacaggagaaactcatgggccgggtcaggcacgatgtggcacacttgatcgtcgggcatcgcccaggagcgaacgagggccaggcgtttctcgatggtgcctgttcaggcgggtttgcggcggccgtggaggccttccatcatgaggatgtcctcctgtttgcggcgctcatggcccacgagcttgggcacaacctgggtatccggcacgaccgtccaggctgcacctgtggtcctaagcacctctgcctcatgcatgagacgatcagtaagaccagtggcttcagcaactgcagctctgaccacttcctccgtttcctccatgaccacagaggggcctgcctgcttgaccggccttggcaccagagccacaagcgcagagatgcccattgtggaaacggtgtggtagaggagtcggaggagtgtgactgtggtaatgcctgtgacagtcacccatgctgtgagccaacatgtacactgaaggtgggtgcgcagtgcagtgagggactctgctgctacaaatgtacattcaagaagaaagggaccttatgtcgtcctgctgaggatgtatgtgaccttcccgagtactgcaatggcattactggagaatgccctgcaaacagctacatgcaggacggcacgcagtgcgataggatttattactgctctgggggtttgtgtaagaaccctgataagcaatgtgcaaggatctatgggtatcctgcaagatcggcccccgaggagtgttacatttcagttaatactaaagccaaccggtttggaaattgtggccatcccacctcggctaacctaaaatatgaagcatgttccaatgaggatatattttgtgggaagttggtatgcacggatgttagatacttgccccaagtcaagcccctacactcactcctccagattccttacggagatgactggtgttggagcatggatgcctataacgtcactgacatccctgattacggtgacgtgcagggcggtacctactgtgccccaaaaaaagtctgcatggagtccatctgcaccggtcatgccacgctccagtatgactgtcatccacaggaaatgtgtcatgggaatggagtgtgcaacaacttcaaacactgtcactgtgatgctggcttctcccctcctgactgcagcagtggaggaaatggggggagtgtggacagtggtcctgtcgggaagccagctgaccgaaacttgagtctttttggagttggggagagtccggattcgaggatggaggatgaggagatcaacctcaaagtggtggtgcttgtggtccccatcttccttattgtcctgctgtgctgtctaatgctcatcgcctacctctggtctgaagtacaagaggcagtgtctccagggtcttcaagcacaacctcgtcctcagagtccgagtccgactgacgtccgcagacctcctcgtgggctgttgctaccgaggccgtgtgtttgcggggcagtttttcctccgtggtttttagggcttgttgcatgcacactgtttactgtaatgtgttgtatatacacttgtgttgctcttctctaccgtaacaactggtattatcgtgtgaaagtttttatgggatctaaatgttctaacttgccctgtcagctactgttcataaaatacaagtcattttaaataaacatgaatamcaagrmmaaaaaaaaaaaaaaaaaaaaaaaaaaaaaaaaaaaaaaaaaaaaaaaaa

SEQ ID NO: 2551 - DNA, 942 bp, Rattus norvegicus
atgtatgtcgtcaagacatgtgtaacctgcaccatgtacttgggaatccttttctcggtgttggcctatctgctctcagatgctgttcctgtgaagaggcaagcttacttcaatagcactgcatacctgccgtgcccgttcacaaaggctcaaaacataagccygagtgagctcgtagtattttggcaggaccggaaaaagtcggttctgtacgaacactatttgggcgcagagaaacttgataacgtgaatgccaagtacctgggccgcacaagctttgatagggataaccaggctctacgacttcacaatgttcagatcaaggacacgggcttgtatgattgttttatacagcaaaagacacccacgggatcaattatcctccagcagtgggaaacagagctctcagtgatcgccaacttcagtgaacctgaaatagaggaggctcagaatgaaacaagaaacactggcataaatttgacctgctcatctaagcaaggatacccgaaacctacaaagatgtattttttgataactaattcaactaatgagtatggcgacaacatgcagatatcacaagacaatgtcacararctgttcagtgtctccatcagcctatctcttccattcccggatggggtgtacaatatgaccattgtgtgtattctggaaacggagtcaatgaatatttcctccaaacctcacaatatggttttttcgcagccccagtttgatcgaaagacttggatccagattgcaggtcccagttcacttctgtgctgtctctttctgctggtcgtctacaaagcagtcaaaaagtgtttgaagatgcagaaccagcccggcagacccagcagaaagacttgtgagtccaagcaggacagtggtgttgacgagtcgatcaacctggaggaagttgaaccccaattgcatcagcagtaa

SEQ ID NO: 2552 - DNA, 612 bp, Rattus norvegicus
ttgcccgagggckacctcacccaaatcggcgacgagattgcaaaggaaayytcatttcttytattcgsmattccgctawyagswaramkggtgmsarwcavacsgwsrwmwccwgkycmgctywkgcactttctaggtgacgatggacatacagaggacccaatccttgcttstgctcttgdtgctgaccctgctggggttagggcttgtacagccctcctatggccaagatagaatgtaccaacggttccttagacagcatgtggaccctgagggkacaggcggcagcgacaactactgcaacgygatgatgcagagacggaggatgacttctacccagtgcaaacgcttcaacaccttcatccacgaagacatctggaacattcgcagcatctgtgatactgccaatatcccatgcaagaatggcaatatgaactgtcacgaaggcatagtgagggtcactgactgcagagagacagggagctctgtgccccacaactgtaggtacagggcgagagccagcactaggcgagttgtcattgcctgtgagggtaccccagaggtcccagtgcactttgacagatagatgacatctgtagctgctactgctgg

SEQ ID NO: 2553 - DNA, 7319 bp, Rattus norvegicus
ggcacgagttggcggcgcggaggctggcccgggacgtgcccggagccctgggaaagagggaggagggaggagggagggtcgcggccggccgccatggggccgggggcccggggccgccgccgccgtcgtcgcctgatggccctgccaccgccaccaccgcccatgcgggcgctgcccctgctgctgctgctgctagcggggctgggggctgcagcacccccttgtctggatggaagcccatgtgcaaatggaggtcgttgcacccaccagcagccctcccgggaggctgcttgcctgtgcctgccaggctgggtgggtgagcggtgccagctggaagacccttgccactctggcccctgtgccggccgaggcgtttgccagagttcagtggtggcgggcgtcgcccggttctcctgtcgttgtctccgtggcttccgaggcccagactgctccctgccagacccctgcttcagcagcccctgtgctcacggtgccccctgctcagttgggtcggatggccgatatgcctgtgcctgcccacctggctaccagggtcgcaactgccgaagcgacatagatgagtgccgagctggtgcgtcttgccgtcacggtggtacctgcatcaatacacccggatccttccactgcctgtgtccacttggctatacagggctgctgtgtgaaaaccccatagtgccctgcgccccttccccatgccgtaatggtggcacctgtaggcagagtagtgatgtcacatatgactgtgcttgtcttcctggcttcgagggccagaactgtgaagtcaatgtggatgactgtcctggacatcggtgtctcaatgggggaacgtgtgtggatggtgtcaatacttataactgccagtgccctcctgagtggacaggccagttctgcacagaagatgtggatgagtgccagttgcagcccaacgcttgccacaatgggggcacctgcttcaacctactgggcggccacagctgcgtatgcgtcaacggctggacgggcgagagctgcagtcagaatattgatgactgtgctacagccgtttgcttccatggggccacttgccatgaccgtgtggcctctttctattgtgcctgccctatggggaagaccggcctcttgtgtcatctggatgatgcatgtgtcagcaacccctgccatgaagatgctatctgtgacacaaaccctgtgagtggtcgggccatctgcacctgtccacccggcttcaccggaggggcgtgtgaccaggatgtggatgagtgctctattggtgctaacccctgtgaacatttgggtcggtgtgtgaacacacagggctcattcttgtgccagtgtggccgtggctatactggacctcgctgtgagactgatgtcaatgagtgtctgtctgggccctgccgcaaccaggccacgtgtcttgaccgaattggccagttcacttgcatctgcatggcaggcttcacaggaaccttctgtgaggtggacattgatgaatgtcagagcagcccatgtgtcaatggtggtgtctgcaaggatagagtcaatggcttcagctgcacctgcccatcaggattcagtgggtccacgtgtcagctggatgtggatgaatgtgcaagcactccttgccggaacggtgccaagtgtgtggaccagcctgacggctatgagtgtcgctgtgcagagggctttgagggcaccctgtgtgagcgaaacgtggacgactgctctccggatccctgtcaccacgggcgctgtgtcgacggcattgctagcttctcatgcgcttgtgcgccaggctacacgggcatacgctgcgagagccaggtggatgagtgccgcagccagccctgccgatacgggggcaaatgtctagacttggtggacaagtacctctgccgctgtcctcccggaaccacaggtgtgaactgcgaagtcaacatcgatgattgcgccagcaacccctgtacctttggagtttgccgtgatggcatcaaccgctatgattgtgtctgtcagcctggattcacagggcccctctgcaacgtggagatcaatgagtgtgcatccagcccatgtggagagggtggctcctgtgtggacggggaaaatggcttccactgcctctgcccacctggctccctgcctccactctgcctacctgcgaaccacccctgtgcccacaagccctgtagtcatggagtctgccacgatgcaccaggcgggtttcaatgtgtgtgcgatcccggttggagtggccctcgttgcagccagagcctggctccagatgcctgtgagtcccagccctgccaggctggtggcacctgcaccagtgatggaataggcttccactgtacctgtgcccctggattccagggtcatcaatgtgaggtgctgtccccctgcactccaagtctctgtgagcacggaggccactgtgagtctgaccctgaccagctgactgtctgttcctgtcctccaggctggcaaggccctcgatgccagcaggatgtggatgaatgtgctggtgcctcaccttgtggcccccatggtacctgcaccaacctgccagggagcttcaggtgcatctgccatggaggatacactggccctttctgtgatcaggacattgacgactgtgaccccaacccgtgcctcaatggtggctcctgccaggatggtgtgggctccttttcctgttcttgcctcagtggctttgctggtcctcgctgtgctcgggatgtggatgaatgtctgagcagtccctgtggccctggcacctgcactgatcatgtagcctctttcacctgtacctgtccacctggctatggaggcttccactgtgagactgacttgctggactgcagccccagttcctgtttcaatggagggacctgtgtggatggcgtgaactccttcagctgtctgtgtcgtcctggctacacaggcacacattgccaatataaggttgacccctgcttctcccggccctgtctacatgggggcatctgcaaccccacccactcaggatttgaatgcacctgccgggagggcttcactgggaatcagtgtcagaacccagtggactggtgcagccaggcaccctgtcagaatgggggtcgctgtgtccagactggggcttactgcatctgtccgcctgaatggagtggccccctgtgcgacataccaagcctaccctgcacggaggctgcagcccacatgggggtgcggttggagcagctgtgtcaggcgggtggccagtgcatagacaaggaccactcccactactgtgtgtgtccggagggccgtatgggtagtcactgcgaacaggaggtggatccctgcacagcccagccttgccagcatgggggcacctgccgtggttacatgggcggctatgtgtgtgagtgtccaaccggctactctggtgacagttgtgaggatgatgtggatgagtgcgcttcccagccctgccagaatggaggctcctgtattgatcttgtggctcactatctctgctcctgtccccctggcacactgggagttctctgtgagatcaatgaggatgactgtggcccaggcccatccttggactcaggcctccggtgcctacacaacggcacctgtgtggacctggtgggtggcttccgctgtaactgtcccccagggtacacaggtctgcactgtgaggcggacatcaatgagtgccgacccggcacctgtcatgcagcacatacccgggactgcctacaagatccaggtgggcacttccgctgcatctgtctccctggcttcacagggcctcgatgtcagactgctctgttcccctgtgagtcccaaccgtgtcagcatggaggccagtgccgtcccagcctaggccgtggaggtgggctgaccttcacctgtcactgtgtccagccattctggggtctgcgttgcgagcgggtggcacgctcctgccgggagctgcagtgcccagtgggtatcccatgccagcagacagcccgtgggccgcgctgtgcttgtcctcccgggctgtctgggccctcctgccgggtttctagggcgtcaccctctggagctactaacaccagctgcgctgctactccttgtctgcatgggggctcctgcctacctgtacagagtgtccctttcttccgctgtgtatgcgctccgggctggggtggcccgcgttgcgagaccccttccgcagcccctgaggtccctgaggagccacggtgcccgcgagccgcctgtcaggccaagcgaggggaccagaactgcgaccgtgagtgcaacagcccaggctgtggctgggacggcggtgactgctcgctgaatgtggacgacccctggaggcagtgtgaggcactgcagtgctggcgtctcttcaacaacagccggtgcgatccagcctgcagctctcctgcctgcctctatgacaactttgactgctactctggtggccgcgaccgcacctgcaacccggtttataagaagtactgcgccgaccactttgcagatggccgttgtgaccagggctgtaacaccgaggagtgtggctgggatgggctggactgtgccagtgaggtcccggcccttttggcccggggggttctggtcctcacagttcttctgcctcctgaagagttgcttcgctctagtgctgacttcctgcagcgactcagcgctattctgcgcacctcgctgcgcttccgcctggatgcacgtggccaagccatggtctttccctaccaccggccaagtcctggctccgaatcccgggttcgtcgtgagcttggcccagaggtgatcggctctgtagtgatgctggagattgacaaccggctctgtctgaagtcagcggagaacgaccactgcttccctgacgcccagagtgctgccgactacctgggagccttgtcggcagtggagcggcttgatttcccatacccactacgggatgtgcgaggagagcccttggagcctccagagcagagcgtgccactgctgccgctgctggtggcaggggctgtctttctgctggtcatcttcgtcctgggtgtcatggttgccaggcgcaagcgagagcacagcaccctctggtttcctgagggttttgcattacacaaggacatagctgctggccacaagggccggagggagcccgtgggacaagacgcactgggcatgaagaacatgaccaagggtgagagtctgatgggggaggtggccacagactggaatgactcagaatgcccagaggccaagagactgaaggtagaggagccaggcatgggggccgaggagcccgtggactgtcgccagtggacccaacaccacctggttgctgccgatatccgtgtggcaccagccatggcactgactccacctcagggagatgcagatgccgatggcatggatgtcaacgtacgagggcctgatggcttcaccccacttatgctggcctcgttctgtgggggagccctggagccgatgccagctgaggaggatgaggccgatgacacgtcagccagcattatatcagatctgatctgccaaggagcccagctcggggcacgaactgaccgaactggcgagaccgccctgcatttggccgcccgatatgctcgagccgatgcggccaagcggctactggatgctggggcagacaccaacgcccaggatcattccggccgcacccctctgcacaccgcagtgacagctgatgcccagggtgtcttccagattctcatcaggaaccgctccactgacctggatgcccgaatggcagatggctctactgcattgatcctggcagcccgcctggcggtggagggaatggtggaagagctcatcgccagccacgcagatgtcaatgcagtggatgagctcgggaaatcggccttacactgggctgcagccgtgaacaatgtggaggctaccttggctctgctgaaaaatggagccaacaaggacatgcaggacagcaaggaggagactccactgttcttggccgcccgtgagggcagctatgaggctgccaagctgctgctggatcattttgccaaccgggagatcacagatcacttggacaggctgccccgggatgtggcccaggagcggctgcaccaggacattgtgcggttgctggaccagcccagtggcccccgaagtccctctggtccccatggcttggggccattgctctgcccaccaggagccttccttcctggcctcaaagcggtgcagtctgggaccaagaagagcaggaggccacctggcaagactgggctggggccccagggaactcggggtcggggcaagaagctgacactggcctgtccaggccctctggcagacagctctgtcacactgtcaccagtagactcgctggactcaccacggcctttcggtgggccccctgcttcccctggaggcttccccttggagggtccctatgccaccacagccaccacggtgtccttggcacagctgggtgcaagtcgggcgggtcctctggggcgccagcctcctgggggctgtgtgctcagccttggtttgctcaaccctgtggctgttccccttgactgggcccggctgcctccacctgcccctccagggccctcattcctgctgcccctggctccgggatcccagctgctcaacccggcaaccccagtttctccccatgagcggcccccaccctacctggctgctccaggacatggagaggaataccctgcagcagggacccacagcagccccacaaaggcccgcttcctgcgggttcccagcgagcatccttatttgaccccatctcctgagtccccagagcactgggccagcccgtcccctccctccctctcagactggtccgactcaacgcctagtccagcaactgctaccagtgccacagccgctggagccctgcctgctcaaccacaccccatatctgttccctccctccctcagtcccagactcagctggggccccagccagaagtaacccccaagaggcaggtgatggcctaagttcttggattttggaggggcgttgaagtggcacccctccctggcttctctctcccccccttttaatctcgctctcatccctttatctctgtaccagctttcctgaacctctctgtcttgaagtgtgacagagttggtcaccagcccagacccccagtcttcctttatttataatgggtaggggctgacctcccaccacctcggccctctaaggggtctgggacctcctctcgatccctcttccggcttccacttccttttttccc

SEQ ID NO: 2554 - DNA, 8689 bp, Rattus norvegicus
gtgagcattcccggaaacgcagctgagttgttggacaacagacgtccacccagtcggtgggtaaagtgacaggtgccacaactccagcctccccttttctgaaagtcgcggagttccatttcatctgcaataatggatgtgaaggatcggcgacatcgctctttgaccaggggacggtgtggcaaggagtgtcgctacaccagctcctctctggacagtgaggactgccgtgtgcccacgcagaagtcctacagttccagtgagaccctgaaggcttatgaccatgacagcagaatgcactatggaaaccgagtcacagacctggtgcaccgggagtccgatgagttttctagacaaggggctaatttcaccctggcagaattgggaatctgcgagccctccccacaccgaagtggttactgttccgacatggggatcctccaccagggctactccctgagcactgggtctgatgcggactcggacaccgagggagggatgtctccagaacatgccatcagactgtggggacgagggataaaatcgaggcgcagctctggcttgtccagccgcgagaactcagcccttactctgactgattctgacaatgaaaataaatcggatgacgacaatggtcgacccattccacctacatcctcgtctagcctcctcccatctgctcagctgcctagctcccataatcctccaccagttagctgccagatgccattgctagacagcaacacctcccatcagatcatggacaccaaccccgatgaggaattctcccctaattcatacctgctcagagcatgctcagggccccagcaagcctccagtagtggccctccgaaccaccacagccagtcaacgctgaggccccctctgccacctcctcataaccacaccctgtcccaccaccactcctctgccaactccctcaacagaaactcactgaccaatcggcggagtcaaatccacgccccagctcctgcacccaatgacctggccaccacgccggagtccgttcagctccaggacagctgggtgctgaacagtaacgtgccgctggagacgcggcacttcctcttcaagacgtcctccggaagcacacccctgttcagcagctcttctccaggataccccttgacctcagggaccgtttatacaccaccaccccgcctgctgccacggaatacattctctaggaaggccttcaagctgaagaaaccctccaaatactgcagttggaaatgcgccgccctgtctgccattgccgctgccctccttctggccattttgctggcctatttcatagcaatgcatctgctcggactcaattggcaactccagccggcagatggacacacctttaacaatggcgtaaggaccggcttaccaggaaacgatgatgtggcaacagtgccatctggaggcaaagtgccctggtcgttgaaaaacagcagcatagacagcggcgaggcagaagtcggtcgacgggtgacacaggaagtcccaccaggggtgttttggaggtcccagattcacatcagtcagcctcagttcttaaagttcaacatctccctggggaaggatgccctcttcggcgtctacataagaagaggactgccaccatctcatgcacagtatgacttcatggaacgcctggacggaaaggagaagtggagtgtggtcgagtcacccagggaacgccggagcatccagaccctggtgcagaacgaggctgtgttcgtgcagtacttggatgtgggcctgtggcacctcgccttctacaatgacggcaaggacaaggagatggtctccttcaatacggttgtcttagattcagtgcaggactgtccacgaaactgccacgggaacggcgaatgcgtgtctggactgtgtcactgtttcccaggattcctaggtgcagactgcgctaaagctgcctgccctgttctgtgcagtgggaatggacagtattccaaagggacatgccagtgctacagtggctggaaaggagcagaatgcgatgtgcccatgaaccagtgcatcgatccttcctgtgggggccacggctcctgcattgatgggaactgcgtgtgtgcagctggctacaagggcgagcactgcgargaagtggattgcttggatccaacctgctccagccatggtgtctgtgtgaacggagagtgtctatgcagccccggctggggcgggctcaactgcgagctggcgagggtccagtgcccagaccagtgtagtgggcatggcacttacctccctgactctggcctctgcaactgtgatccgaattggatgggtcccgactgctctgttgaagtgtgctcagtagactgtggcactcacggcgtctgcatcgggggagcctgccgctgtgaagagggctggacaggcgcggcttgtgaccagcgcgtgtgccacccccgctgcattgagcacgggacctgtaaagatggcaaatgtgaatgccgagagggctggaatggtgaacactgcaccattgatggctgccctgatttgtgcaacggtaacgggagatgcacactgggtcagaacagctggcagtgtgtctgccagaccggctggagagggcccggatgcaacgttgccatggaaacctcctgcgctgataacaaggataatgagggagatggcctggtggactgcctggaccctgactgctgcctccagtcagcctgtcagaacagcctgctctgtcgggggtctcgggaccccttggacatcattcagcaaggccagacagactggcctgcggtgaagtccttctatgatcgtatcaagctcttggcaggcaaggacagcacccacatcattcctggagacaaccccttcaatagcagcctggtgtctctgatccgaggccaagtagtaaccacggatgggacccccctggtgggtgtgaatgtgtcttttgtcaagtacccaaaatatggctacaccatcactcgccaggacggcacgtttgacctgattgccaatgggggctctgccttgactcttcactttgagcgagcccctttcatgagccgggagcgcacagtatggccgccgtggaacagcttctatgccatggacaccctggtaatgaagacggaggagaactccatccccagctgtgacctcagtggctttgtccggcctgatccgatcatcatctcctctcctctgtccaccttcttcagcgcttcccctgcggcgaaccccattgtgcctgagacccaggttcttcatgaggagatcgagctccctggcaccaacgtgaagctccgttacctcagctccagaacagcagggtacaagtcactgctgaagatcaccatgacccagtccacggtgcccttgaacctcatccgggttcacttgatggttgccgtggaggggcatctcttccagaagtcgttccaggcttctcccaacctggcctacacattcatctgggacaagacagacgcttatggccaaagggtttatggcctatcggatgctgttgtgtctgttggatttgaatatgagacctgccccagtctcatcctgtgggaaaaaaggacagccctacttcaaggattcgagctggacccttccaaccttggtggctggtccctggataagcaccacaccctcaatgtgaaaagcggaatactactcaaaggcacaggggagaaccagttcctgacccagcagcccgccatcatcaccagcatcatgggtaacggtcgccgcagaagcatctcctgtcccagctgcaatggccttgctgaaggcaacaaactgttggcccccgtggccctggctgtggggatcgatgggagcctctttgtcggtgacttcaattatatccggcgcatcttcccttctcgaaacgtgaccagtatcttggagttacgaaataaagagtttaaacatagcaacagcccaggacacaagtactacttggctgtggaccctgtgactggctcgctctatgtctctgacaccaacagtcgccggatctaccgagtcaagtctctaagcggagccaaagacctggctgggaattcggaagttgtggccgggactggcgaacaatgtctaccctttgatgaagcccgctgtggggatggcgggaaggctgtggatgccaccctgatgagccctagaggtattgcagtagacaagaacgggcttatgtattttgttgatgccaccatgatccggaaggtcgaccaaaatggaatcatctccaccctgctgggctccaatgacctcacagctgtccgaccactgagctgtgactctagcatggacgtggcccaggtccgtctagaatggccgacagaccttgcggtcaaccccatggacaattccctgtacgtcctggagaacaacgtcatcctgcggatcaccgagaatcaccaggtcagcatcatcgcgggacggcccatgcactgccaggttcccggcatcgactactcgctcagcaagctcgccatccactctgctctggagtcagccagcgccatcgccatttctcacaccggggtgctctacatcaccgagacggacgagaagaagatcaaccgcctacgccaggtcaccaccaacggagagatctgcctcttagccggggcagcctcagactgtgactgcaaaaatgacgtcaactgcatctgctattcgggagatgacgcatacgccacggatgccatcttgaactccccgtcctccttagctgtggctccggatggcaccatctacatcgcagacctcgggaatatccggatcagggcggtcagcaaaaacaaacctgttcttaacgcgttcaaccagtatgaggctgcgtctccgggagaacaggaactgtacgtgttcaacgccgatggtatccatcagtacaccgtgagcctggtgaccggggagtacttatacaatttcacctacagcgctgacaatgatgtcaccgagttgattgacaacaacgggaattccctaaagatccgccgggacagcagtggcatgccccgacacctgctcatgcctgataatcagatcatcacccttacggtgggcaccaacggaggcctcaaagccgtgtcaacgcagaacctggagctgggcctcatgacttatgatgggaacactggactcctagccaccaagagcgatgaaaccggatggacaactttttatgactatgaccacgagggccgtctgaccaatgtgactcgccccacgggggtggtgaccagcctgcaccgggaaatggagaaatccatcaccgttgacattgagaactccaaccgtgataacgatgtcactgtgattaccaacctctcttcagtggaggcctcctacaccgtggtacaagatcaagtgcggaacagctaccagctctgcagcaacgggaccctgcgcgtcatgtacgccaacggcatgggcgtcagcttccacagcgagccccacgtcctcgcaggcaccctcacccccaccatcgggcgctgtaacatctccctgcccatggagaacggcctgaactccatcgagtggcgcctgaggaaggaacagattaaaggcaaagtcaccatctttgggaggaagcttcgggtccacggaaggaacctcctgtccattgattatgaccgaaatatccgcactgagaagatctatgacgaccaccggaagttcaccctgaggatcatttatgaccaggtgggccgccccttcctgtggctccccagcagtggactggcggccgtcaatgtctcctacttcttcaacgggcgcctggccggcctccagcgcggggccatgagcgagaggacagacattgacaagcaaggccggattgtgtcccgaatgttcgccgacgggaaagtctggagctattcctaccttgacaagtccatggtcctcctgctgcagagccagcgtcagtacatatttgaatatgactcctctgaccgcctccacgcagtcaccatgcccagtgtcgcccggcacagcatgtccacgcacacctccattggctacatccggaacatttacaacccaccggaaagcaacgcctcggtcatctttgactacagtgatgacggccgcatcctgaagacgtctttcctgggcaccgggcgccaggtgttctataagtacggaaaactgtccaagttatcggagatcgtctacgacagcactgccgtcaccttcggctatgacgagaccactggcgtcctgaagatggtgaatctccaaagcgggggcttctcctgtaccatcaggtaccgaaaggtcgggcccctcgtggacaagcagatttacaggttctctgaggaaggcatgatcaacgccaggttcgattacacctaccacgacaacagcttccgcatcgccagcatcaagcccgtcatcagtgagactccccttcccgttgacctctaccgctacgatgagatttctggcaaggtggaacacttcggcaagttcggggtcatctactacgacatcaaccagatcatcaccactgccgtcatgacactcagcaagcactttgacacccatgggcgcatcaaggaagtgcagtatgagatgttccggtccctcatgtactggatgacggtgcaatatgacagtatgggcagggtcatcaagagggaactgaaactggggccctatgccaacaccacaaagtacacctatgactacgacggggacggccagctccagagtgtggccgtcaatgaccggcctacctggcgttatagctatgacctcaatgggaacctgcacctgctaaacccaggaaacagtgctcgcctcatgccgttacgctatgacctccgtgaccggataaccaggctaggggacgtgcagtacaaaatcgatgatgatggctatttatgccagagaggatctgacatctttgaatacaactccaagggccttctaacgagagcgtacaacaaggccagcgggtggagtgtgcagtaccgctatgatggcgtgagccgccgggcttcctacaagaccaacctgggccaccacctacagtacttctattccgacctccaccaccccacacgtatcacccatgtttacaaccactccaactctgagatcacctcactctactatgacctccagggccacctctttgccatggagagcagtagtggggaagagtactatgttgcctcagataacaccgggactcctctggctgtttttagtatcaatggcctcatgatcaagcaactccaatacacagcctatggggagatttactatgactccaatccagactttcagatggtcatcggcttccacggaggcctctacgaccccctcaccaagctcgttcactttacgcagcgtgattatgacgtgctggcaggacggtggacgtcccccgactacaccatgtggaggaatgtgggcaaggagccagcccccttcaacctgtacatgttcaagaacaacaatccactcagtaatgagctggatttaaagaactacgtgacagacgtgaagagctggctcgtgatgtttggatttcagctcagcaacatcattcctggattcccaagagccaaaatgtattttgtgcctcccccctatgaactgtcagagagccaagcaagtgagaatggacagctcattacaggtgtccagcagacaacagagaggcataaccaggcctttctggctctagaaggacaggtcatctctaaaaagctccatgcaggcatccgagagaaagcaggccactggtttgctacgaccacgcccatcatcggcaaaggcatcatgttcgccatcaaagaagggcgggtgaccacaggcgtgtctagcatcgccagtgaggacagccgcaaggtagcatccgtgttgaacaacgcctactacttggacaagatgcactacagcatcgagggcaaggacacacactacttcgtgaagatcggtgcagcggacggtgacctggttacgctggggaccaccattgggcgcaaggtgctggagagcggggtgaacgtgaccgtgtcacagcccacgctgctggtgaacggcaggactcgaaggttcaccaacattgaattccagtactccacgctgctgctcagcatacgctacggcctcacccccgacacactggatgaagagaaggcccgcgtcctggaccaagcgcgacagagggccctgggtactgcctgggccaaggagcagcagaaagccagggacgggagagagggcagccgtctgtggacggagggcgagaagcagcaactcctgagcacgggacgggtgcaaggttatgagggctattacgtgcttccggtggaacagtacccagagctggcagacagtagcagcaacatccagttcttaagacagaatgagatgggaaagaggtaacaaaataacctgctgccacctcttctctgggtggctcagcaggagcaactgtgacctcctctcctaaggagacgaagacctaacaggggcactgaggccgggctgctttaggaccccaagtggcaagaaagctcacattttttgagttcaaatgctactgtccaagcgcaaagtccctcatcctgaagtagactagagctcggccacaaattctgaggaaaacaaaactaaaggatgaacgaatgaaccaacgaacgaa

SEQ ID NO: 2555 - DNA, 3897 bp, Rattus norvegicus
cacgaggggggtgttccctggggttcagctcttcacccactcttctagaccctggattctgacaagtttactgaacttggaagacacagatgtcgaggtctgaaggtttgtggatacccccaggctgggcttcatggagaaatctttcctgattactaacatgaattccagagcagcctccacctctccctggacaggatgaactacggtaatcagacataactggccaycatggggaaaytgatcaggatggggacgcaggagaggcggttactccgaccaaagaggcttcattggagtcgcctccttttcttcctgggaatgttratcattggttccacttatcagcacctgaggagaccccagaatcccccttcaatgtggacaaaagtctcctcacagcagcctattaaactggccatcagggacctccccaatgatgagataacagtgacagacaaagaccctccagaggctagctctgaagtggagggtgagatgctagcaccccaagacacagtgatcataggtgaagcagcacctagcatagcaatggaggacacccccaatccacccataacaaccaagatcactccaacgtcactaaagaacaattatagccccacaacagctggcacgaggagacaaaaaraaaamawwmmacccacacctagcagagcaccgagtcacttcatctcaacttcaggcagacagagagtgaaaagctataccccaaaacccaggggaggaaggaagagctccagcccaactcacaccagggaagaaggaaggatgcataccccatccccagcaggtgcgccccgcaccatcagccccacatcaacagagaaagacagtgaaaccacggcaacctataggatgttggagcccagatctgagagaacagcaggaaaaacttctctcaagagaatggttccgaacacccggactttcttaacacgcgaagtagaaacagacctcgtgacttctccaagtttggtggggaagaacaccctgggaagtcctagaagaggagaaagaaacagctctaccactcccctgcgagcagtcctgcagcctacccctgccacctctgaggagcaagtgacggcaagcatcaggatgggtagcaccccagcaaccactgaaggttctactgctgcccagagaattggcaatcccttgtccggaactagtacaccagctgttagaattgcctcagtcacggacagggaaaagagaccttccacagcacacggcaccctagtaactccccaagtcaaggcagtcctgaccacacaggtccaccgctgtgtggttgtgaagccagccccagctgtacccatgaccccatctccgagcatgacagccatcctgttcccagaggcacctacttccggtccctcagccttgccgcctggctggccaaacctccaccccaaggcggagtatcccccagacctgttcagtgtggaggatcgacgccagggctgggtggtcctacacatcttcggtatgacgtacgtgtttgtggccttggccatcgtgtgtgatgagtactttgtcccagccctgggggtcatcacggacaagcttcagatctccgaggatgtggccggggccacattcatggctgccggaggctcagcccctgagctcttcacctctctcattggtgtctttatctcccatagcaatgtgggtattggtaccatcgtgggctctgctgtgttcaacatcctttttgtcatcggcacctgcgccctcttctcccgggagatcctcaacctcacctggtggcccctgttccgagatgtctccttctacatccttgacttgtctatgctcatagtctttttcctggatagtctcattgcctggtgggagagcctgctgctgctgctggcctacgctctctatgtgttcaccatgaagtggaacaagcagattgaacgctgggtgaaagagcagcttagcaggaggccagtagccaaagtcatggctctaggagacctcagcaagcccagtgatggtgccattgaggaaaatgaacaacaggataacaagaagctgaagctcccgtctgtgctgacccgagggagcagctcggcctccctgcacaacagcatcatccgcagcaccatctaccacctcatgctccacagcttggaccccctgggggaagcccgcccctccaaggacaagcaggaaagtttgaatcaggaagccagagtcctcccccagaccaaagcagaaagcagctcagacgaggaggagccagccgagctccctgcggtcacggtcactccagcccctgctccagaggacaagggagatcaggaggaggatccaggctgccaggaagatgtggatgaggctgaacacagaggagacatgacaggtgaagagggtgaaagggaaaccgaggcagaaggaaaaaaagatgaagaaggggaaactgaggcagaaaggaaagaagatggtcaagaagaagaaactgagacaaaagggaaagagaaacaagaaggggaaactgagtcagaaggaaaagatgaacaagaaggggaaactgaggcagaaggaaaagaagctgaccatgaaggggaaactgaggcagaaggaaaagaggttgaacatgaaggggaaactgaagcagaaggaacagaagatgaacaagaaggggaaactgaggcagaaggaaaagaagttgaacaagaaggggaaactgaggcagaaggaaaagaagttgaacatgaagtggaaactgaggcagaaagaaaagaaactaaccatgaaggggaaactgaggcagaaggaaaagaagctgaccatgaaggggaaacagaggcagaaggaaatgttgaacatcaaggggaaactgaggcagaaggaaaagttgaacatgagggggaaaccgaggcaggagaaaaagatgagcatgaagggcaaagtgagacccaagcagacgacactgaggtgaaagatggtgagggtgaagcagaagccaatgctgaagatcaatgtgagaccgcccaaggtgagaaaggtgcagacggtggagggggaagtgatggaggggacagtgaagaagaggaggatgaagaggatgaagaggaggaggaagaggaggaagaggaggaagaggaggaggaaagtgaggagcctctgtccttggaatggcctgagagcaggcagaagcaggctatctacctctttctcctgcccatcgtgttcccactgtggctgacaatacctgatgtacggaggcaggaggccaggaagttttttgtcatcaccttcctgggatccatcatctggatagccatgttctcatacctcatggtgtggtgggctcaccaggttggtgaaaccattgggatttctgaagagattatgggtttgacgatcctagcggcaggcacttcaattcctgacctcatcaccagtgtgatcgttgcccggaaaggcctgggagacatggccgtgtcaagctcggtgggcagtaacatatttgatatcacagtgggcctgcctgtcccctggctcctgttctccctcatcaatgcgctgcagcctatccctgtcagcagcaacggcctgttctgtgccattgtcttgctgtttctcatgctcctgtttgtgatcttctcaatcgcttcgtgtaaatggagaatgaacaagatcctgggcttcaccatgttccttctctactttgtgttcctggtgatcagtgtgatgttagaagatcgcatcatatcctgycctgtatctgtctgactcagtcacggctgctcgagatggacaaagagcagaagacctggctggaagttactgtccgtctcaccacaccaatcaaataataaacacaatcaagaatgtgaaaaaaaaaaaaaaaaa

SEQ ID NO: 2556 - DNA, 3198 bp, Rattus norvegicus
actcatgacaggctataccatgttgcggaatgggggagtggggaacggtggtcagacctgtatgctgcgctggtccaaccgcatccggctgacctggctgagtttcacgctgttcatcatcctggtcttcttccccctcattgcccactattacctcaccactctggatgaggcagatgaggccggcaagcgcatctttggcccccgggctggcaacgagctctgtgaggtaaagcacgtcctagatctttgtcggatccgcgagtctgtgagcgaagagcttctacagctagaagccaagcggcaggagctgaacagcgagattgccaagctaaacctcaagattgaagcctgtaagaagagtatagagaacgccaagcaggacctgctgcagctcaagaatgtcattagccagacagagcactcctacaaggagctgatggcccagaaccagcccaaactgtcactgcccatccggctgctccctgagaaggatgacgctggccttccaccccccaaggtcactcggggttgccggctacacaactgcttcgattactctcgttgccctctgacgtctggctttcctgtcttcgtctatgacagtgaccagtttgcctttgggagctacctggaccctttggtcaagcaggcttttcaggctacagtgagagccaacgtttatgttacagaaaatgcagccatcgcctgcctgtatgtggtgttagtgggagagatacaagagcccgctgtgctgcagcctgccgaccttgagaagcagctgcattctctgccacactggaggacagacggacacaaccatgtcatcatcaatctgtcccggaagtcagacacacaaaatttactgtacaatgtcagtacaggtcgggccatggtggcccagtctaccttctatgctgcccagtacagagctggctttgacttggttgtgtcaccacttgtccatgccatgtctgaacccaacttcatggaaatcccaccgcaggtgccagttaagcggaaatatctcttcactttccagggtgagaagattgagtctctaagatctagccttcaggaggcccgttcctttgaggaagaaatggagggtgaccctccggccgactatgatgatcgaatcattgccaccctcaaggccgtacaggacagcaagctagatcaggtgctggtagaatttacttgcaaaaaccagccaaagcccagtctgcctactgagtgggcactgtgtggggagcgggaggaccggctagagttactgaagctctccaccttcgccctcatcatcactcccggggacccgagcctgcttatctcatctggctgtgcaacacggctctttgaagccttggaggtgggagctgtgcctgttgtccttggggagcaggtgcagcttccgtaccacgacatgctacaatggaatgaggccgccctagtggtgcccaagcctcgtgttacagaggttcacttcctgttacgaagtctgtcagacagtgatctgttggctatgaggcggcaaggccgctttctctgggagacctacttctccaccgctgacagtatttttaataccgtgctggccatgattaggactcgaattcagatcccagctgctcccatccgggaagaggtagcagctgagatcccccatcgttcaggcaaggcagctggtactgaccccaacatggctgacaatggggacctggacctggggccggtagagacagagccgccctatgcctcacctaaatacctccgtaatttcactctgactgtcactgactgttaccgcagctggaactccgcacccggacctttccatctttttccacacacaccctttgaccctgtgctgccctctgaggccaaattcctgggctcagggactggatttcggcccatcggtggtggggctgggggctctggcaaggagttccaggcagcgcttggaggcaatgtccagcgggagcagttcacagttgtgatgctgacctacgagcgggaggaagtgctcatgaactccctggagaggctcaatggcctcccctacctgaacaaggtagtggtggtgtggaactctcccaagctgccctcggaggaccttttgtggccagacattggtgtccccatcatggttgtccgtactgagaagaacagtttgaacaatcggttcttgccctggaatgagatagagacagaggcaatattgtccatcgatgacgatgcccacctccgccatgatgaaatcatgttcgggtttcgggtgtggagagaggcgcgtgatcgcattgtggggttccctggccggtaccatgcgtgggacatccctcaccagtcctggctctacaactccaactactcctgtgagctgtccatggtgctgacgggtgctgccttctttcacaagtattacgcctacctgtattcttatgtgatgccccaggccatccgagacatggtggatgagtatatcaactgtgaggatatcgccatgaacttccttgtctcccacatcacacggaagccccccatcaaggtgacatcgaggtggacttttcgatgcccggggtgccctcaggccctgtcccacgatgactctcactttcatgagcggcacaagtgtatcaacytttttgtcaaggtgtacggctatatgcctctcctgtacacacagtttagggtggactctgtgctcttcaagacccgcctgccccatgacaagaccaagtgcttcaagttcatctagggccttgccagttctgaggagaagacagtgagcagagtgaggggagtcacccccaaggttcccaaggtgttgaaggtccttggggacatcgtgggcagggcccaggccctttgcttggagaagagcagggagagtagaaagggatggctgtctttattttgaagtcagccgcactgggcctggaatcctggtcagcagactcagggcaccgactaatggcgaacactgaggactgttcatgagcccgggacagctggttcccggtttttaaattcagaacagcatttactatttaaagagagagtttcacatctgccatccaaggcttatttatatgtgcgtatatgtacacacatatgtgtatatacatgtatatgcacgcacacacacacacacacacacacacacacacacacacacacacagcggccgcg

SEQ ID NO: 2557 - DNA, 3586 bp, Rattus norvegicus
caagaacaaggagtagggtgaagcttttctcagataacccttcagaatgtttcccacaggtatatttttgatgagtgtccttatttctcagatgcaaggaagagggattgttggagtagagggtcaagaactggttcatcctaaaaagctatccctgctacagaaacgggatcttgaacgcatccatgactctgatacaccggaggaatatgaagaagaattgttgtatgaaataaaattggggagaaaaactttaacccttcaccttctgaaagcaagggaattcctcgctctaaattacagtgaaacatactacaacataaagagagaaatggtcaccaggcatccacagatcttggatcactgtttttaccaaggctccatcatacatgaatttgattctgcggcaagcatcagcacttgtaatggtctgagaggcttcttcagggtaaatgaccagcggtacctcattgaaccagtaaaatactcagatgagggagatcatttggtgttcaaatacaatgtcaaggcaccttatgctaccaattactcctgtgaagggctgaattttaccaagaagtctactctgatagatgctaagattatagaagagcataaagtagaagactatcacaaagaaaagttcattgaattgtttgttgttgctgatgaatttgtgtaccgcaggaacagtaaaccccaaaacaagttaagaaaacgaatttgggggatggtcaattttgtcaacatgatttataaagccttgaacattcgtgtgactttgactggcatggaaatatggtcggctggagatgagatagaaatagtgtccaatctagaaagtaccttattgcatttttcgacttggcaagaaacagttctcaaaaagaggaaggactttgatcatgtgattttactgagtgggaagtggctctacacatctatgcaaggaattgcttacccaggagggatatgtcagacccttcgttcatgcagtgttgttaaggatcttctgccagatgtaaatataattggcaacaggatggcacatcagctgggacacagcctgggcatgcggcatgatgactttccatgcacctgtcctttggggaaatgtgtgatgggtgcaggaagcatccctgcaataaaattcagcaaatgcagccaaacccaataccagcaatttctgaagaatcagaaaccagcatgcatactcaacaacccacttccggaagaattcaatgattatccgttctgtgggaacaagaaggtggatgagggagaagagtgtgactgtgggccagttcaggaatgcaccaatccttgctgtgatgcacacaaatgtgtcctgaagccaggattcacttgtgtagaaggagagtgctgtgaatcatgtcagatgaagaaggaaggggttatatgcagaccagcaaagaatgaatgtgatatttcggaagtgtgtactggctactcccctgagtgtcctaaagacgagtcccaagccaacgggtttccttgcaagaatggagaaggctactgctttatggggctgtgtcccactcgggatgaccagtgcgcagagttgttcagtggtggagctgaagagagtcacagcctttgctacaggatgaatcaaaagggaaacagatttggatactgcaaaaataaggacaacacgtttgttccctgtgaagagaaagatctcaaatgtggaaagatatactgcaccggaggccggcgttcagcacaccttggagaggataaaacctataaccttaagaatgtgaagcagaatatctccatcaaatgcaaaaccatgtttttataccacaattctagagacatgggcctggtgaattctggaacaaaatgtggtgagggaatggtttgcagcaatggcgaatgtatagaaatggagaaggcctacaactcaaccatctgctcttccctgtgtgatgaaaatgatgtggatgacaatgaacctgactgccagtgtgaagaaggaccaataattacagagtggggagaagccttaaaccttaccagtgtctccatcatggtcgttgtgcttgtcatggttattattggtgttggacttgtcatattactaatccgttaccagaaatgcattaagatgaagcaagttcaaagctcttctagagaaatacggggcatagagaataaagtatactttcctgatgagcatcagacgaggagtgagccaatcttcacagatatctatcccctacataatacggcagagtcattggaaagagttccttccaccttttcaagtcctcactacatcaccctgaaatctgtcagcaaggacccaagaggaattgcagaccctaagcaaaatgataacatgaatttgaacctggatagccaaagcgactgcacaagactgggctaaagatcccccatgcagatcatcactgccttggtgtctgctaaacagatttcagttgtttgccaaatatcccttacctggatagaaaatgttcaagagaaatagtttcttcctgtcaatattaagtcatagaacccacaatctatagcacacacataatccccacaaaaaatgaatatgaaatttccaatgggctttaatttaatgcccaaataggaagtctctctgctctagtaatttcctatgtaatattaatcttgtaattttataataatcaaagcttgtgatcatttagagtttcacatacaaggaacagataaggctagtggttggttactttgttaagatcattttaaaagcacttactttcaggtcagatgttgtggcccagacctataatccctagaggttgagataggaggatcacaggttcagggtctacatgggctgcagagaaagatcatgtcaagtctggacaacttggtgagaactctttaaaaaaaatcataaaatttaaaattgcaccagaaatgttaaggaacagctgttggtggagcagaatgggagacaccctgggttcaaccccgagaattaaaaaaacaaaacaaaacaaagcaaacaaacaaaacagaaagatcaaaacagatgacagtgtgcctactttgatttgcaaactatatcactgaagtctgctttcaatgaaattatcttctatggaagggccaaggaggttagggcagggcagagagttatagtagctgattagaagagggaggaacaaaagaatggcctcctagactatagcaccagcactgtcacaaagcatctcatccattgcccagggtgtagaggcctgtgcaagctttgggttcctaggcctgcctttctagatttctataataagtcaagaaaatgacagggcttttaaaatattcactccacttccttgtgagtcctcaggaaacacagatgggggtgtgcttagtgttcattttctttactgcagaacactgcattcccatggatttgttgccttgcgttgggttgtttccttatacagatgtctgtgggtggaagcactctctctcactgactctgttttcttaatgggagctgttaagtcttttaaatctatagataattttcccccatccttaaataaagatctcaaac

SEQ ID NO: 2558 - DNA, 2500 bp, Rattus norvegicus
ggagcccctgcactattctgccttgcctgcttcccaagagctcaggcgcaggggccacgagctgctgccgttgtaccaactgtcatcattgtggcaaagccagcagccacaccatgctgccgttattcctggtcctctcatgcctaggccaattgatcgccgtaggcaaggacatagaaacaccacttatacagatcacagtgccagagaaaatcgagaccaacatcaaggatgccaaggaatcagaaacacaagtcacttatgtgatcagaattgagggcaaagcatacacactccaacttgaaaaacagtcatttttacatccacattttgtgacaaatttgcataacaagttgggaacattgcaaccatatttttctttagtaaagagtcactgcttttatcaaggacatgctgtcgagattccagcatcgaccgtgacactcagcacttgctcaggtctcaggggcttgctgcagttggagaacgtgacttacggaattgaacccttagagtcttcaactacactcgaacacatactttatgaaatacagaatcataaaattgattattctcccttaaaagaaaactacacgaattcccaggatgaaagtgggtcctaccgaattctcgtgaaaccattgaaaagttcaaactcgaaactaaggaagagaattctgacggtaaagatcatcatggataaaggcatgtttgaccacgtgggctctgaggtgggagtcgcgactcagaaagttgttcagatgtttggtctcattaacactatgttttcccagctgaagatgactgtgatgttaaactctctggagatctggtcagaagaaaacaagatagaaacaaatggggatgctgatgaagtcctgcaaaggtttctgctgtggacacacaaggaaatgcctcaaacaaccaaggaaataacctacttactcctgtataaggaccatcctgattatgtgggagcgacatatcatgggatggcctgcaacccaaagttcacagcaggaatcgctctgcacccaaagacgttaggtgtggagggctttgccattgttctgtcacagttgctgggaattaacctggggctgacatacgatgacatctacaattgcttctgtcgaggaagcacatgcataatgaatccttcagcaatacattccgaaggcataaaggtttttagcagttgcagcatggatgaattcaggcagctggcttcacagcctgacctagattgccttctgaagacacaggagacagaagttgttgccctgccccaggctgcaaaagtttgtggtaactacatcctggagcccccagagcagtgtgactgtggcccagcagagagatgttctcataaaaagtgctgtaagtctgaggattgtaccctgcttagtgatgcagagtgtggttctggggcgtgctgtgataaaagaacatgcaagatagctgaaagaggacgcctatgtaggaaaagtacggaccagtgcgacttcccagaattctgcaatgggacgtctgaattctgtgtagctgatataaaagctgcggacctggaaccttgcaacaatgaaaccgcctattgcttcaaaggggtttgccaagaccgcgacaggcagtgcacagacttatttggaaaatatgctaagggtcctaattatgtgtgtgcacaagaagtgaatctgcagaatgacaaatttggaaactgtcatgggcgctgtaattatagtgctctattttgtggaaaagcagtttgttactggagctttgcagaactcgtgaaaacagacgtatttgatgttcaatatacttacttgggaggccaagtgtgtgtgtccgcacatttaagagtaaggaatgatgagaccaaggatgacacatatgtccgtgatggcactatttgtggtaatggccaggtgtgttaccgaggggagtgcttgcgtgtgcacgtcctgaggggggatagggagtgtgaggccgatgacaaatgccaaggacatgggatttgcaacaatcaaaacaactgtcaatgtgaagctggtttcgctcctccagaatgtgacatgaccccttcatctccaggagggagcatggacgatggattttggctgcccttagataaaagcacaccgttggttatcaagcggcctggcactcaatataaaaagggacttttgatcagtttctatgtcttcctgccttttctcattgtgacagccattatggttgttaagcagaatatctcaaagatgttcgggcaaggagaggaagagtttagtgaaggatccatatcagaagaaattaacgacagcaagcagtcatagagccaaagcatttatgcaacagcaaagccacaacagaaaaagatcaccaagaaagtcaccattccttggtcttatttcgagaacaagaaccagtccatctctttctccgtggcttactggtttcagttatccatgcctccaaataaatcctatggctgaaagta

SEQ ID NO: 2559 - DNA, 4128 bp, Rattus norvegicus
ggttccggctgtgggcagcagggtggtccgcgactgcggccggaagcaggctgagcggctctcggcgagcgccgcctgtacttccggggacttcagcctagctcttgagttttccctgtaggcggcgcgggagggaaaagtttgcagggccgtgctgggaagatcacctccgcttcccaatgtgagcagtttctcgaacgctctctctagaaggttgcccagagaggtggtggacgggaacatgaggcagcgtctcctcttcctgaccactttggtgcctttcgtcctggcaccccgacctccggaggaaccaggctctggctcccacctgcgacttgagaagcttgattctttgctctcagactacgatatcctctctttatctaatatccagcagcactccataaggaaaagggatctacagtctgcgacacacttagaaacactactaactttttcagctttgaaaaggcattttaaattatacttgacatcaagtacagaacgcttttcacagaacttgcgagtcgtggtggtggatgggaaagaggaaagcgagtacagtgtgaagtggcaggacttcttcagcggacatgtggttggtgagcctgactctagggttctagcgcacataggagatgatgatgtcacagtaagaatcaacacagatggggcagaatataacatagagccactttggaggtttgttaatgatactaaagataaaaggatgctggtgtataagtctgaagatatcaaggatttttcacgtttgcagtctccaaaagtatgtggttatttaaatgcagatagtgaagagttgcttccaaaagggctcatagacagagagccatctgaagagtttgtccgtcgagtgaagaggcgagctgaacctaacccattgaagaatacttgtaaattactggtggtggcagatcatcgattttataagtacatgggccgaggagaagagagcactactacaaattacttaatagagttaattgaccgagttgatgacatataccggaacacctcgtgggacaatgcaggatttaaaggttatggagtacagatagaacagattcgaattctcaagtctccacaagaggtaaaacctggtgaaagacacttcaatatggcaaaaagttttccaaatgaagaaaaggatgcttgggatgtgaagatgctgctggagcaatttagccttgatatagctgaagaggcctctaaagtctgcctggctcatcttttcacctaccaagattttgatatgggaactcttggattagcttacgttggttctcccagagcaaacagtcatggaggggtttgtccaaaagcttattacaacccaggtgtgaagaagaacatctatttgaatagtggtctgacaagtacaaaaaattatggtaaaaccatccttacaaaggaggctgacctggttacaactcatgaattgggacacaattttggagcagaacatgatcctgatgggctggcagagtgtgccccaaatgaggaccaaggaggaaagtatgttatgtaccccatagctgtgagtggtgaccatgagaataataagatgttttcaaactgcagtaaacagtccatctacaagaccatagaaagcaaggctcaagagtgcttccaggagcgcagcaacaaggtgtgcggcaactccagggtggacgaaggagaagagtgtgacccgggcatcatgtacctgaacaacgacacctgctgcaatagtgactgcacactgaagccaggtgtgcagtgcagtgataggaatagtccttgctgtaaaaattgtcagtttgagacggcccagaagaagtgccaggaggctatcaatgctacttgcaaaggagtgtcttactgcacagggaatagcagtgagtgccccccaccaggagatgctgaagatgacactgtgtgcttggacctgggcaagtgcaaggctgggaaatgcatccctttctgcaagagggagcaggagctggagtcctgcgcatgtgctgacaccgacaactcgtgcaaggtatgctgcaggaacctttctggcccatgtgtgccttacgtcgatgcagagcaaaagaacttatttttgaggaaagggaagccctgtacagtagggttttgtgacatgaatggcaaatgtgagaaacgggtacaggacgtaattgagcggttttgggatttcattgaccagctgagcatcaacacttttgggaagtttctggcagacaacatcgttgggtctgttctggttttctccttgatattttggattcctttcagcattcttgtccactgtgtggataagaaactggacaagcagtatgagtccctgtctctgtttcatcacagtaacattgagatgttgagcagcatggactcagcatctgttcgcattatcaagccgttccctgcaccccagactccaggtcgtctgcaggccctgcagccggctgcaatgatgccgccagtgtctgcggctccaaaactggatcaccagaggatggacaccatccaggaagaccccagcacagattcacatgtggatgatgatggctttgagaaggaccccttccccaacagcagtgcagccgccaagtcctttgaggacctcacagaccacccagtcaccaggagtgagaaggccgcctccttcaagctgcagcgtcagagccgagttgatagcaaagagacagagtgttagtgggagcctgggcctgctctgggggacacagacctacagatgttccacagagctgacctgaatcaaaatagactgtaatgatctgagaaacgggagcagcttagcagatgctggtcatgtgacaggaccttcacatgacatcctgtgtatgtaggccctttgaagaggtgaggtaaatctggcttatttaaggctttcaggttttggggttttcttttgtaatctaaaaatctcctttgacctgtggtgcagaagcagaaaataaggctggatcaagttcctggtgacagcactgattaagccttcagtctgtttttctgtatgctgtaaggtcctctcactacggtgaagcacttagcagtgaggataactggaacacagactttttgggggttttggccttcacatgtgcgttgtctccaaatgccgtctgtcttggcactgaactttgtggatacagtcctttccaagatgaagactagctctggaacagtctatacaaacagccacatgaacttcaagatggcctattaactgcttagccccaggttccctggacagtttttccgttttgcaaaaagtgtcttcacgggtctctaaacattgtttgtcttaaaaaatactgggctggagagttggccccacagttaagagcacttggtttcattcccagtacccacacggtggctcttaactccaatcccaggggagatgacatcttctgaactctagaacacaaggcatgcattggtgcagtcaaacatgcaggcaacacacacaaatttagaaagccaagtgctgtaagaagttgcacatcccccaacmtacagtgyttcgcggtmtgagstggagtggagctctctcctgaacactctggaaggctggcaggtgctgagctggytagggagacggrtggggcccagccctgraagaacygtmttcagcctcagcaagcagacactcgcgttacctcasgctttggggyttcmggamcsaggatgttttgtacttattgtgtgaggataaataccattagcctgaatkctcatttctgtaagttttagtyataaaagcttkttttctthtaagaattgcaatgtgcwcaccagyaaacacgtcttaaccagaataacttgtaactbtgaggacagttaaccaaacctgtsccttgtctmtmctgagggtgtmtgttacaytaatacttgaacatgtaccttgkggtmktggctccttttactagtcatgacasyyttatatgttagttacactttgaggatttgctmtaaggtgagtggggtgtgtgggtrtatgtatgaatgaaacagttggcagaatataagaaaaccatttttataaaattgtgactttttaavmcmaaaaaaaaaaaaaaaaaaaaaaaaaaa

SEQ ID NO: 2560 - DNA, 2821 bp, Rattus norvegicus
agctggtgtccggcggggccgtggctgctcctccacgcttagccccgcacctgctgccctcgtccggcccggagctccgcggccatgcggctggcgctgctctgggccctgggactcctgggcgcgggcagccctcggccctccccgccgctgccaaatataggaggtactgaggaagagcagcaagccagcccagagaggacccagagtagatccttggagaaccaggttgttcaggacagccccccaattaacctaacagaagtgcttcagactggtttacctgagaccctgaggattggattggagctggacggtgagaatcatatcctggagcttcaacagaatagagatctggtccctggccgcccgactctggtgtggtatcagcctgacggcacccgaatggtcagcgaggggcacagtctggaaaactgctgctatcgaggacgagttcagggccgccccagctcttgggtctccctctgtgcctgctctgggatcagggggctggtagtcctgtcccctgagagaagctatacactggagctgggacctggagaccttcagcgtcctctcattgtttctcggatccaagacctcctcttgccaggscacacctgtgccccaagctggcatgcatttgtgcccaccgaggcagcaccagacctccttttggaacagcaccaccttcgcaggcttaagcgggatgtagtaacagagacgaaaattgtcgaactggtgattgtggctgataattcagaggtcaggaagtaccctgacttccaacaactgctgaaccgaacactagaagtggcccttctgctagacacattcttccagcccctgaatgtccgggtagcacttgtgggcctagaggcatggacccagcgcgacctgatagagatgagctccaacccagctgtcctgctagacaacttcctccgctggcgccggacagacttgctgcctcgactgccccatgatagtgcccagcttgtgactgttacttccttctctgggcccatggtgggcatggccattcagaattccatctgttctcctgacttctcgggaggtgtgaatatggaccactcgacaagcatcttaggagttgcctcctccattgcccacgagttgggtcacagcctgggcctagaccacgattcacctgggaacagttgtccctgtccaggtccagccccagccaagagctgcatcatggaggcctccacagatttcctaccaggtctgaacttcagcaactgcagccgatgggccctggaaaaagccctcctagatgggatgggcagctgcctctttgaatggccacccagccgggcccctatgtcctctttgtgtggaaatatgtttgtggaccctggagagcagtgtgactgtggcttcccagatgagtgcactgatccttgctgtgactattttacctgccagctgaggccgggagcacagtgtgcatctgacggaccctgttgtcaaaactgcaagttacagccagctggctggcagtgccgccttcccacagacgattgcgatttgcctgagttctgcctaggagatagctctcagtgcccccctgacatcaggcttggggacggtgagccttgtgctagtggagaggctgtgtgtatgcatgggcgctgtgcctcctacacccggcagtgccagtcgctttggggacctggggcccagcctgctgcaccactttgcctccaaacagccaacactcggggtaatgcctttgggagctgtgggcgcagccccagtggtagctacatgccttgcaaccttagagatgccatttgtgggcaactacagtgccagtggggtaggaatcagcctctgctgggctcagtccaagatcagctctcggaggtcttggaagccaatgggacacaattaaactgcagctgggtagatctggacttgggcaatgatgtggcccagcctctcctggctctacctggcactgcctgtggccctggcctggtgtgcatcggccatcgatgccagcctgtggatctcctgggagcacaggaatgccgcagcaaatgccatggccatggggtctgcgacagcagcaggcactgccactgtgacgagggctgggcacctcctgattgcatgacccagctcagagcaaccagctccctgaccacaggcctgctcctcagcctcctgttgttattggtcctcgtactacttggtgccagctactggtaccgtgcccgcctgcatcagcggctctgccagctcaagggatccagctgccaatatagggcagcccaatccggtcctcctgagcgaccaggacctccayakagggcasmscagatgccrgkcactaagcctsagsggcctassaaaccyccacmsmsrrsamagcmrmtgccmgscaacycacaggrccggcccccsctgggtgacctgcctggcccaggagatggaagcttgcagctggtagtgccttccaggcctgccccaccacccccagcagcatcttcgctctacctctgacccctcgagaytcggctgtskcctgctcagttctaggacttaaagtggaacctctgtctgaatctcccacaaaacactagagaagcagaagcktagacaatatggcatccagccctaaagaaccaccaggcgctgttcagtagtacctgggacccactgaattacctgcagctgagtgytgggaaggggctggggctggagtaggtggtggaaggacgggaatgtggtctgtctctgctctgttgtaataaatgtgaggtcttggaawaaaaaaaaaaaaaaaaaa

SEQ ID NO: 2561 - DNA, 1298 bp, Rattus norvegicus
gaattccgcggaggctgggcgcgcgaccctggtccttctgcccccggccgtacgctttgctcacgtctctctctgcatggtggatattatttttcattatccttttctgggtgctatgggggatcattccaagaagaagcccgggacggccatgtgcgtgggctgcgggagtcagatccacgaccagtttatccttcgggtgtcgcccgacctcgagtggcacgccgcctgcctcaagtgcgctgagtgcagccagtatctggatgagacgtgcacgtgcttcgtgagagacgggaaaacgtactgcaagcgggactacgtcaggctgttcggcatcaagtgtgcccagtgtcaggtgggcttcagcagcagtgacctggtgatgcgggcgcgggacagcgtgtaccacatcgagtgcttccgctgctccgtgtgcagccgccagctgctccctggagacgagttctcgctgagggagcacgagctgctctgccgagccgaccacggcctcctgctggagcgcgctgcggccggcagcccgcgcagccctggcccgctccccggcaccccaccaggcctgcatctgccagacgccgggtccggacaacaggtctcactgcgcacgcacgtgcacaagcaggcggagaagacaacccgggtgcggactgtgctcaacgagaagcaactgcacaccctgcggacatgctacgccgccaacccgcggcccgacgcgctcatgaaggagcagctggtagagatgaccggcttgagcccgcgggtcatccgcgtgtggtttcagaacaagcgttgcaaggacaagaagaagtccattctcatgaagcagctacagcagcagcaacacagcgacaaggcgagtctccagggactaactgggacgctcctggtggcgggcagcccatccgcccatgagaacgccgtgcagggcagcgcagtcgaggtgcagacgtaccagccgccctggaaagctctcagcgagttcgcactccagagcgacctggatcaacccgcctttcaacagctggtctccttctccgagtcaggctccctaggcaactcctctggtagcgacgtgacctctctgtcttcgcagctcccggacacccccaacagtatggtacctagtccggtggagacgtgagacaggacccttccctgccagcccgcggacctcgcatgcctccctgcatgagactcacccatgctcaggccattccagctctgaaaaatctccggcccttgtaattattgttgttatttaaaggcgagcgggcagagga

SEQ ID NO: 2562 - DNA, 1742 bp, Rattus norvegicus
aactctaggtcagactgtgaatgatgaggggcttctgtacacaccagatttccatgtcctccctgaagtaactgttggatcatacagtggctgcagtctggtaagagatggctatccggttgttttcagtgattacacctagtcgtgctcattgaacagaagatgaaaagattcagagaggtacagtgagacccagcacactgctaggaaagggtggggctggcctcagagccaggcagaaacacttcctgaatgactgctggataagagactcccaccccctactccgaccctcctgactccagtcttctcttacagctctccaaggactcaaggccatctgcccacctctctccaccttttacctcttctttgtgatcttcgtgttgtctaccattttccactgccaccggcgcctcagtctagtgcctgccccctgggcctcgtcagcccttgtggtcttatccccaagacacctgccccgggaaggcatgttcaccatcaatgtcagaggccggctggggaaccagatgggcgaatacgccacattgtttgcactggccaggatgaacggacggcttgcttttatccccgcatccatgcacagcactctagcgcccatcttcaggatcagcctcccggtgttacacagtgacacagccagaaggataccatggcagaaataccatctcaacgactggatggaggagcgttaccgccacattccgggacactatgtgcgcttcacgggatacccgtgctcctggaccttctaccaccacctgcgcccagagatcctgaaggagttcactctgcatgaccacgtgcgggaggaggcccaggccttcctgcgtggtctgcgggtgaatgggagccagcctagtacttttgtgggtgtccatgtgcgtcgaggggactatgtgcatgtcatgcccaaggtgtggaagggcgtggtggctgaccggggttacctggaaaaggccctggatatgttccgggcacgctattcatctccagtcttcgtggtcgccagtgatgacatgtcctggtgccggaagagcatcgttgcttcccgaggggacgtggcatttgctggcaatggccttcaaggatcgcctgccaaggacattgcattactcatgcagtgcaaccataccgtcatcaccttgggtacctttggtatctgggctgcctatctcacaggtggggatactgtttacctggctaactttacccagcccagctcccctttccataaggttttcaagccagaagcagcttatctgcctgagtgggtgggcattgctgctgatctggaacagccaaacagaggassccctggccatgcctcagcaagagcccccaagagtcaccagaggaccttgctgtagtgcacatgctcagagggscggtgggggggaggktatgttgttgtcgtgctcgtgctcgtgctcgggacctcacagggattcccagttctgttttgcatgcttctcagmysagysmkkgcsgtcraysaygcgtsmcctmtastgsskatcctswagastcgascacagcctggacttagctcagcagcaacagcacaggtactttgagctcctccatgcccacactgttagccatcataggcctaacattggctgcatctggagtgctgtgtcacggaggccagtgtgtagttagggtttctgcggctctgataaaacaccatggccatggmcaaaaaaaaaaaaaaaaaa

SEQ ID NO: 2563 - DNA, 1515 bp, Rattus norvegicus
atggagatttcaaatatcacagaaacctacccaacaaccacagaatatgactatggggactctactccatgccaaaaaactgatgtaagagccttcggggctggactcttgccccccctgtactctttcgtgtttatcattggagtggtaggcaatatcctggtgattctggtgctcatgcagcataggaggcttcaaagcatgaccagcatatacctgttcaacctggctgtctctgatctggtcttccttttcactttacctttctggattgactacaagctgaaagacaactgggtttttggtgatgccatgtgtaagcttctctctgggttttattacctgggcttatacagtgagatcttctttatcatcctgctgacaattgacaggtacctggccattgtccatgcagtgttttccctgagggcccgaactgtcacttttggcatcatcaccagtattattatttgggccctagccatcttagcttctattcctgccttatgctttttcaaggcccagtgggagttcactcaccatacctgtagccctcatttccccgatgagagcctgaagacgtggaagaggtttcaggctctaaagctaaacctccttggactaattttacctctgttagtcatgataatttgctacgcagggatcatcagaattctgctcagacgacccaatgagaagaaggcgaaagccgtgcgtctgatatttgctattacgcttctattcttcctcctctggaccccctacaatctgactgtatttgtttctgctttccaagatgttctattcaccaatcagtgtgagcagagcaagcagctggacctggccatacaggtgactgaagtgattgcctacacccactgttgtgtcaatccaatcatttatgtctttgtgggtgagcggttccggaagtaccttcggcagcwskwksaaaggcatgtggctataccgctggcaaaatggctgcccttcttctctgtggaccaactagaaaggaccagttccttaactccatccacaggagaacatgaactttctgggggcttctgattcagaccctaggtgtcaaccaaggtctagaggagaatgaggggratagtwtatagcwmtycrrsacagakrctgacagctattacagtgggrwttcccagtcttgtagsgkcaragggaactttgaggtcgcttaggtacaagtcacctattcaatggtttccttgaacttctctctgttaaaaatgagatgaataaacaaagtgggacattatagaaatggggataatgagtggcttgggcccaacaagtgatggatctgtagttattaacctaaaaacaaaaccactacttttactgaaatcaacacctaatgatgtgatattytgagaaaaatttaaagcattgtaataaagaattttgtgtattttcatattgacatatattataaagtagatgttatgtcaaaattaaaactgtmgcmmmcwmmaaaaaaaaaaaaaaaaa

SEQ ID NO: 2564 - DNA, 4849 bp, Rattus norvegicus
agcccgctccccgagcagccttagccatccctaactaatccaactgcttcccagtctgcgggtgctgggctcggtgctgagaagaggctctggctcttggctattgtcaggtcaaacactaagaytgtgtccatgttagaactcatagaagttaatggaacccctggcagtcagctctccactccgcgctccggcaagtcaccaagtccatcgcccaccagcccaggaagcctgcggaagcagagggacctgtaccgccctctctcgtcggatgatttggactcagtaggagactcagtgtaaaagacacagtggagcgatgtgtatggtttgtgatgggatcaaggtttcccatttcctaagcaagcatctaacagcaaaatacacaaaagagttttgcataagcaattaaattatacaaaagcaagagtgcagacattttctactcggcggtattctttgaaaraaaaaaaaamwwwtttaaagcatctcctccatttgatgtaaccgaggagagtttgaatacaatatttgttcatcactgaggattttatgactaaggtctggttccagataaatttcatatatgactccaatattaagtacaagaatcaccctaacgatccagcattatggagtcaccatttctataaatgagcctgctttttaatcagtaagtagatatataaatacaatttttctgtacttagtatcttttacctttttagtttaaatttttttaaaaaaatcagacagctaattagttatttcattgcaaaataacataaaagaatctcttcaggattttttatttgagtgaatacgtctgaaggggagtggaggaactccgtaagagacgtctcccagagaccaacattaggcagcgagmacgwkkstkkttttttttttttttttttttttktttttkttttttgccacatggattttcttttcccagatttttataaamatagtttcaactacatggraacatgaataacttggcattattattaattttataatggytcccwacagcaacaacagtatatatatctttttcaagtgtgtaaagttttttgacctamaacaaatgggacttgtactgtttttcawrawataaactcastttgagaattggrattcttctacasasagcttgtaysttgggcctccagstagctaaactccattctgatcatcctgcatcccgttgkttgggatatcttcacatgcaawactccttttgtgtcaaaccgagtgtgtctatgattataacccactgttaaaattaacctactaattcttctcctttagtcctctactttcaaaagcgtgagtcagctttgcttaaatgtaaaacagttattttttaaatctaratgttagaaatcaatgtgtacggtgtattgtatttagaccatacccgtgaccgtttctttttactagctcaaacactaacaatttaagacttacaaagcatgggttttatattcgccaggcttgacatatctcagtagggtgacagatttaaaatgtatggtgccatttggagccttttacttgagatttctttcaaatttcacttgaaaacattttgaaaatgcctgattcaagatggagaggagtygccttgtcatacggtctcaaatgttattgatttatttctctcagtagactgttcgactagcaatttttcccatctggtttatcgttacctgtgctagcatctcacttgacaagtgaataaaatattccaactgaaaaaagaaaaataagacctccaggcaacctaccagcatttgaaaagttagccgagtgataattagtgcctcatwaccctgcctgttagagaggagagggcacttctttggcgtgttatttgagaactgcagactgatccctccatcttgaaagcacagagaatgatcatacctgttccagacttcggattttaaaactgtttccaatagacacgaacagagactcctgctgagatsaaagggccgctttgtctttagctgaaacagtaaacatctgggaggatgctgtgctgcctgttggagtgttacgtctttgtaagatgcattgcttaatatagtccaacccgtaaaagattagtacagatttgactaacctgtcaaaaaatgcaatgaaagcagtgggtcagatggtccagaacaaaacataaattccagtaatttcaactcccctatgaagtcaatcttatggacgactacyrckaggagaaacctaataaatgttatctgctataaaaatcgtggctttgtttagacacagcatagagtagacttggactaattgccagtaggtattgtggccaactttccattcaagcagttccagagagatgcaatcccatggcatttcatcctggaacatacgatttttattaaaggattgttcaagggccatatatctcatttacttttgaaactaaagtccctctgagattgaaacaacacaccctgagatctctttctatgcacggaataattctattatccaaaagcagagtttttgaacatccaagcagcccaccaggtcattagtaaagacccaatgggcaattagcagtcactcaagacgtggctgcttttagaatccttctaacatcattagtcgctgaactctaaaaatgaccttctgaggaragagctccagccaacaaaagccacatgcttttctctcactgataaagcctctgctgtgttgacctttcaggcctttgcatgtatggttacatttttttagacatacctagaaagaaagatgctataaagagtcccctgctttcagcattttatgagctaaaaccctagtgatgcacaaaatgtgttgctctgcgtgaactccgaagccatgtgggaaagtcattgtcatttcagcagaaggtctgtactcttgtaggtttctaaaccgraagtttgtgctccacctatatgtacgcatgcctgcmatgcacacatraggtcwccttaacatgtcaagatctgatcccgttgtctgccaaccccagakcagctmtgacacctatgctcccctgccaagcagcgagggcactcgccctcccsttccttgcagccgcaccgagctgtacttttgtttccatttaaaagaactgaattccaaaagcctcgttttaaaaaagcmattgggaatgaaaatacataagaataatcctaaaagataaatccatatatttaacctgttgaacwactaggttttttttttcttttcctggtggccatatatctatacaggtgtgtaggtgtgyctacatraatatctgtgtttgtatatagaacatgaagaataaaggatgatatttgtgawawrrwmwwawaarwwactggctcctgtagaattaactgtgaagctttatgtgataaagttgtgacgtatgtattagttggcacatgtttaagctcaaaacaagttggctaaattatcatgaagcagtaccaactgttcacgggtacgaatttatccaagaccgattggaatccagacaaacaaaaaaawwraarwmmaagcaaatccaatcttacagtgattgataaatgtaaatactcattgatgttttcactgtaaattcttgatgctcagccagtaatctgacagaatgcagtgacactttcctgttgtgtgtgtactgatgactacagcgattatcaatgggaaattcaccaaacaaactgatttctagacttgtggacagttgagtgttgtgctgaaataaaagtagaaaaggtcaaagtaaattcggtttgaagccttgttatgaagccagacaacatgtaaggccatgctgtgtgtcctttttataaactgttttggagacamwwrmwrwrwrwrwgcatgtgtgtctacatgagtgtatacacacttgaaaatgcttattgactcaagttcactgtctgtatacatctgtgcctatctgcattggtctggccagcgcctctaactgtgcatggtagtgacagccctgtgtgattggatgaacccacagaaaaatagtgtggaaatcagagctgcgtcaaactcattataacaattgcctgatatagcatattaaattgtcagctgaaaaacgtttgtaatgttgtgcctgtaacatgtgtagggaaaactggaaaatctgaggccctcactataattttaagggtgcatgacatgtggtgtctttaaagatgtatcttattgtaataaaaggtgatggataaattctgaggtagcgtaagtgaagcatgaaacgmwaggtktttktwttatatatgsccacacaatatttttgaaggcasggtagtaaatgtttgaaggttaataggcaaagaatatggaagttaatttwactgtgatgtgtttttgaggtgtttttacacattgccagacaaggaacttagttcctgtttcccccctgtggactctttgaaacactatgaatgttacaaagttggattttctttataaaggtcgcaaaccatttgcagttggagttgcttggatgtatagtctcctctttggggaaaaaaaccactttggtattaaaatggtttaagcactaatacattgggaaatacgtcgtctgasgccatctgcagacatctgtagagatgagaactaatgaaatgtgttactgaactacccagttttgatagcttccatgcctctctgctgtagtctcctcgaaaatgctgtaccttgtgtttcacatgcaaccatgttactctctyccgaacttacctttgtgacacttagcagcttagccaaaccacgtaataaacaggaagaactgcmmwmrwraaaaaaaaaaaaaaaaaaaaaa

SEQ ID NO: 2565 - DNA, 1659 bp, Rattus norvegicus
ctaaatcctctcatttcctgcatgtggttgggaagaggaatcttagaagacgagccccactctgtagcagctcaactaaccatgggcgatgatgacacccctgtgtgcctctctgtcgcctcatgcaagggagtgagttgctggctggacaaactcttactctgggctcttactctgtctatcacacttcgaaacaccgccgtggattgtaggagggtggacagaaatggattgctttctccaaatctgaactcaagtatgagtgtggtcaggatgggccaaaatgtatctctgtcttgttccagcaagaacacatccatagacatcacctattcgctcwykwkgggtaagagatacctagaaagcaagaggagaagagggggagctgtggatttccacctgaggatctccaatgccaacgagtcaggcccctacaagtgcaaagtcaatgattccaactcgtcgaaatacagtcagaatttcaacttcacaatcatccaggatgagagctgctcttcttgtctactgtcrctgttgctcccaggggtgttattggggctaatactcccaggcctggcctttttgatttatttgaaatacaaaaaagggtgcacaggaaagactctgaragagaatgagtccaagggttctggagatgcgcccaygcaaggggagctgtatgcgaatatctgtgaaactcaaaaagggtcagaacaactccaggagatacactatactactccagtcttcaaagaggtggcacccacagaacaagaaggccttgaggatagaaaagatgactacatctactctgaactcacctactaaagtgcgaagaaactgactgtatcctaatataagagactttccagtaagctgatgcttacgaagaaacaggaaattcacctggcacttcagagtttcatcctaggctggggcagaaggatcctgagttcaaggccagctggcactacatagcaagaccctgtcttaaaacacaaagatcaaaaaagatttaacctggtcaccgaaagtgaatgtatttttcacatctggacactattattcctttggctaacttgggcatctaatcttgtcaccaaagtagccaggcttgataagggttaaaaaatacttcggttttgtggccttcagccgttctcactttccaacccaattttaaatggaattatcctggggctgcagaagtggctcagcagctaagagcagacactgctctcccaaaggatgggagtttgagcccagagtctacatcccataactcacagttgccaataacattgtttccgaaggatccatcgccctcttctggcacctgcaggcactacactcatgtgcacagacacacctaaacgcataattaagtaagttggggctggagagatggctcagtggttaagagcactgactgctcttccagaggtcctgagttcaatacccagcaaccacatggtggctcacaaacatctataatgggatccgatgccctcttctgctgtgtctgaagacagctatagtgtacttatgtacataaaataaataaatctttaaaataaataaataagtctatgggcataccaccctgtacatgcccaagctcatctagaagtaaataataaaataaaaaagttaatctta

SEQ ID NO: 2566 - DNA, 6460 bp, Rattus norvegicus
agaggtccctagacgggaaggggcacgccgccaggcgggactgtggagctaacgatggagagcacctccctgcgaggtctccggtgcccacagctctgcagccactctggcgccatgagggcgccgaccaccgtccgctgctccggacgcatccaaagggcgcgttggaggggcttcctgccacttgtcctggctctcttgatggggacaagtcatgcccaaagggattccgtggggagatacgaaccagctagccgggatgccaatcggttgtggcgccccgtgggcaaccaccccgcagcggctgcagccaaggtgtacagtctgttccgagagcccgacgcgccggtccccggcttgtcgccctctgagtggaatcagccgggccaggggatccctgggaggctcgcagaggccgaggccaggagaccgtcccgagcccagcagctgcgtcgagtccagtcacctgtccagactcggagaagcaatccccgaggccagcagccaccagcagcccggaccgcacattccgtcgtgcgcctggcgacccctcagcgacccgcggctgcacgccgagggcggctcaccgggagaaatgtctgcgggggacagtgctgccctggatggacgacatcgaacagcaccaaccactgtatcaaacctgtgtgtcagcctccctgtcagaaccggggctcctgcagccggccccagctctgcatctgccgttctggcttccgtggggcacgctgcgaggaggtcatccctgaggaggagtttgaccctcagaatgccaggcctgtgcccagacgctcagtggagggagcacctggccctcacaggagcagcgaggccagaggaagtctagtgaccagaatacagccgctgctaccaccactaccaccacctccatctaggaccctcagccagacccgtcccctgcagcagcatgcaggactgtccagaacagttcgtcgttatccggccactggtaccaatggccaactgatgtccaacgctctgccttcaggaccaggacctgagctgagagacagcagccaacaggcagcacacatgaaccatctctcacacccctgggggctgaacctcaccgagaaaatcaagaagattaaggtcgtcttcactcccaccatctgcaagcagacctgtgcccggggccgctgtgccaacacgtgtgagaagggtgacaccaccaccctgtacagtcagggcggccatgggcatgaccccaagtctggcttccgtatctatttctgccaaatcccctgcctgaatggaggccgctgcattggccgggacgagtgctggtgtccagccaactctacagggaagttctgccatctgcctgtcccacagccagacagggagcctccaggacgaggctcccagcacagagccctgctggaagggccattgaagcaatccaccttcacgctgcctctctccaaccagctggcctctgtgaacccctcgctggtgaaggtacaaatgcagcacccgcctgaggcctccgtgcagatccaccaggtggcccgggtccggggtgaggtggaccctgtgccagaggacaacagtgtggagaccagagcctctcatcgcccccatggcagctcaggccacagccactgggccagcaacagcatacccgctcgggctggagaggcccctcggccaccaccagtgccgtccaggcattatggacttctgggccagtgttacctgagcacggtgaatggacagtgtgctaaccccctaggggagctgacttctcaggaagactgctgtggcagtgtggggacttcttggggggtgacttcctgtgccccatgcccacccagaccagctttccccgtgattgaaaacggccagctggagtgtccccaagggtataagagactaaacctcagccattgccaagacatcaatgagtgcctgaccctgggcctgtgcaaggattcagagtgtgtgaacaccaggggcagctacctgtgcacctgcaggcccggcctcatgctggatccatcaaggagccgctgtgtatcggacaaggctgtctccatgaaacagggactctgttaccggtcaatggtgtctggcacctgcaccctgcctttggtacaacggatcaccaagcagatatgctgttgcagccgtgtgggcaaagcctggggcagcaaatgtgaacactgccccctgcctggcacagaagccttcagggaratctgccctgctggccatggctacgcctactcaagctcagacatccgcctgtctatgaggaaagctgaggaagaggaactggctagccccgtaagggaacagagacagcagagcagtggacccccacctggggcagcagaaaggcagccactcygggcagccactgccacctggattgaggctgagaccctccctgacaaaggtgactctcgggctattcagattacaaccagtgctccccacctacctgcccgggtaccaggggatgccactggaagaccaacgccatcattgcctggacagggcattccagagggtccagcagaagagcaggtgatcccttccagtgatgtcctggtgacgcacggtcccccaggctttgatccatgtttcgctggagcctccaacatctgtggccctgggacctgtgtgaagctcccaaatggatacagatgtgtctgcagccctggttaccagctacaccccagccaggactactgtactgatgacaacgagtgtctgaggaacccctgtgaaggaagagggcgctgtgtcaacagtgtgggctcctactcctgcctctgctacccaggctacacactagccaccctaggagacacacaggagtgccaagatgtggatgagtgtgagcagccgggggtgtgcagcggtggacgatgcagcaacactgagggctcgtaccactgcgagtgtgatcagggctacgtcatggtcagaagaggacactgccaagatatcaacgaatgccgtcaccctggtacctgccctgatgggagatgcgtcaactcccctggctcctacacttgtctggcctgtgaggagggctacatagggcagagcgggaactgtgtagatatgaatgagtgtctgacccccgggatatgtgcccatggaaggtgcatcaacatggaaggctcctttagatgctcttgtgagccaggctatgagctcaccccagacaagaagggctgccgagatgtggacgagtgtgccagccgagcctcatgccccaccggcctctgcctcaacacggagggctccttcacctgctcagcctgtcagagtgggtactgggtgaacgaagatggcactgcctgtgaagacctggatgaatgtgccttccccggagtctgccccacaggcgtctgcaccaacactgtgggctccttctcctgcaaggactgcgacaggggcttccggcccagccccctgggcaacagctgtgaagatgtggatgagtgtgaaggtccccagaacagctgcctgggaggcgagtgcaagaacacagatggttcctaccagtgcctctgtccccagggcttccagctggccaatggcaccgtgtgtgaggatgtggacgaatgtgttggggaagaacactgcgctcctcatggcgaatgcctcaacagcccggggtccttcttctgtctctgtgcacccggctttgctagtgctgaggggggcaccagatgccaggatgttgatgaatgtgcaaccacagagccgtgtctgggaggacactgtgtcaacaccgagggctccttcaactgtctgtgtgagactggcttccagcccgccccagacagtggagagtgtgtggacatagatgaatgtgcaaatgatactgtgtgtgggaaccatggcttctgtgacaatacggatggctccttccgctgcctgtgtgaccagggcttcgagacctcaccctcaggctgggagtgtgttgatgtgaacgagtgtgagctcatgctggcagtgtgtggggatgcactctgcgagaacgtggaaggctccttcctgtgcctttgtgccagtgaccttgaggagtatgatgcagaagaaggacactgccgtcctcgggtggctggagctcagagaatcccagaggtcccaacagaggagcaggctgcaggccttaccggcatggagtgctatgctgaacacaatggtggtcctccatgctctcaaatcttgggccagaactccacacaggctgagtgctgctcgacccagggtgccagatggggggaaacctgtgatccctgcccatctgaggactcagttgaattcagtgagctgtgccccagtggtcaaggttacatcccagtggaaggggcctggacatttggacaagccatgtatacagatgccgacgagtgcatactgtttgggcctgctctctgccagaatggccgatgcctcaacacagtgcctggctacatttgcctgtgcaaccctggctaccactatgatgccgtcagcaggaagtgccaggatcacaacgaatgccaggacttggcctgtgagaacggcgagtgtgtgaacacagaaggctccttccactgcttctgcagtccccccctcatcctagacctcagcggacagcgctgtgtgaacagtaccagcagctcagaggacttccctgaccatgacatccacatggacatctgctggaaaaaagtcaccaatgacgtgtgcagccagcccttgcgtgggcaccatactacctatacagagtrctsstgccaakwcggsgagrcctggagccagcagtgtgctctgtgcccccccaggagctctgaggtctatgctcagctgtgcaatgtggctcggattgaggcagagagggaagcagggatccacttccggccaggatatgagtatggccctggcccagatgatctacctgaaaccctctacggcccagatggagcccctttctataactacctgggccctgaggacactgttcctgagcctcccttctccaacacagccagtcatttgggagacaacacacccatccttgassmkscyctgcagccctctgaacttcagcccccagycattcagaaccccctggcttccttcgaaggccttcaggctgaggaatgtggcatcctgaatggctgtgagaatggccgctgtgtgcgtgtgcgcgagggctacacttgtgactgctttgaaggcttccagctggatacagccctcatggcctgtgtggatgtgaatgagtgtgaagacctgaacggssctgcgssamtctgtgcgcatggymactgcgagaacacagagggttcctatygstgcmactgttcccctggtwacgtggcagagccygggscccmacactgtgsarccaargagtaggagtraragatcatggtgggcagcwatgtggaaatggctatcagccataggctggggacttaaggttgcttccctagctgggaagacgtgactgggaagaccccgtgatgccatcaggccagggctctggagcccagttccgccagcctcgcctcctttttatctcttccggcttaactctgggtgtgaattccgtcactgcctctatgccactgcttggctcagacaccacaaatattttaatgctttagccactggccgtgagacacagcccacagtctgtcctcggggccacactttagagcgcccatcagaagagtcctcgtgcactcctcttaggctgtgcagacactgcaggcacccccttccatctgtgatctacacatcatctcgatggttctgtaacgggsacagwggctacatccacctggggatggcccttcacagtgaatggagcaggagagggtctggggagtagctccaatgccacctctcagaaccaccaccagcactgggtggcgtgagttctttttgctactcctccatcccatagacagttctgcggccccgagaagggaccagtttccctcacctcagaggatgaagactaatwckmackkgctgagtktaagaamcgaaagaagaggaataacgagtctgagaaagtgtggcaagagagtgatacggaaaacatgggagtccatatgaaaggaggasccaagagttagacaaaacacgaagtcgctttgggcaaatcagtccaagcctccttagagcttctktgtgcctgcagggaggctcgccacaagctctggcgcccatctgcaaacacctttattaggctcatctgttccccacaggaaaacctaaatagatggccttaacaatataaaggcagagcaagccagatttttcaaagttgtttctctcctccacttcagaagcacttgcccttgcttcctcttaasasatgcacttccacaccagctagctgggggtycaggagcgtgggggaataaaatgttcatctgsmaaaaaaaaaaaaaaaaaa

SEQ ID NO: 2567 - DNA, 6286 bp, Rattus norvegicus
  misc_feature (1510)..(1527): n is a, c, g, or t
  misc_feature (5362)..(5376): n is a, c, g, or t
  misc_feature (5589)..(5600): n is a, c, g, or t
gaggtccatgggcgctcacggtcgtcctcgcccaccctcgcggggtcggcgcccatagcacctcagcagcacccggcgacaccccggctgagccaggggaccctcaccttgagcagcccgcgcccctcccctcctctccaccccagctcccgccccctgctcgcctccgctcccggctggggtccgctgccgctcagccgcccgcaaagctccctccctgcggccacccagttggcctccaccccgcggcgcacaggctctccgcggagtcctcggggataccgagggagtgcgccggggcagggcgagtcgcacggccggagactgcccgcgatggcgggagcctggctcaggtggggactcctgctctgggcagggctgctagcgtggtctgcgcacggccgggtgcggaggatcacgtacgtggtgcgcccgggcccgggactgccggccggaaccctgcctctggctgggcccccgcggaccttcaacgtcgcactggacgccaggtacagccggagctcaacagccacctccagccgctccttggccgggcccccagccgagcggacccggcgcaccagccagcctggcggcgcggccctgcccgggctccgatctccgctgccacccgagcccgcgcgtccgggggcgcccagccggcagctccactcaaaggccggtgctcagaccgcggtcactcgcttcgccaaacatggcaggcaagtcgtgcgctccaaagtgcagcaggacacgcagagctccgggggctccagactgcaggttcagcagaagcagcagctgcaggggatcaatgtctgtggagggcagtgctgccatgggtggagtaaggccccgggctcccagaggtgcaccaaaccaagctgtgttccaccatgccagaatggagggatgtgtctccggcctcagttctgtgtgtgtaagccagggacaaagggcaaagcctgcgagatcacagctgcccaggacaccatgtcaccagtgtttggagggcagaaccctggctcctcgtgggtccctcctgagccagcagcaaagcgtacttcaaccaagaaggcagacaccttaccaagggtcagtccagtggcccagatgaccttgaccctcaagccgaagccgtccatgggactctcccagcagatacattctcaagtggcacccttgtcttcccagaatgtgatgattcggcatggccagacccaggagtatgtgctcaagcccaagtacttcccagccccaaaggtggtctctggagagcagtccacagaaggctctttctctttaagatatgggcaggagcaaggcacagcaccctttcaggtgagtaaccacactggtcgcatcaaggtggtctttactccgagcatctgtaaagtgacctgcaccaagggcaactgtcacaacagctgccagaaggggaataccaccactctcattagtgagaacggccatgcagccgacaccctgacagccacgaacttccgagtgnnnnnnnnnnnnnnnnnntgtatgaatggtggccagtgcagttcaagggacaaatgtcagtgccctccaaatttcacaggaaagctttgccagatccctgtccttggtgccagtatgcctaaactctaccagcacgcccagcagccaggcaaggcactggggagtcacgtcatccattccacacataccttgcctctaaccatgaccaaccagcaaggggtcaaagtgaaatttccccccaacatagtcaatatccatgtgaagcatcctcctgaggcttctgtgcagatacaccaggtttccagaattgatggcccagtgggccagagggtgaaagaagtgcaaccgggccagtcccaagtctcttaccaagggctgcccgtccagaagacccagacagtccattccacatactcccaccagcaggtcattccgcatgtgtatcccgtggctgctaagacacaacttggacgatgcttccaggaaaccattgggtcacagtgtggcaaagcgctccctggcctttcaaagcaagaggactgctgtgggacagtggggacctcctggggctttaacaaatgccagaaatgccccaagaagcaatcctatcatggatatactcaaatgatggaatgcctacaaggatataaacgggttaacaacaccttttgtcaagatattaatgaatgtcagctccaaggcgtatgccctaatggggagtgtttgaataccatgggcagctacagatgctcctgcaaaatgggatttgggcctgaccctaccttttcaagttgtgtgccggatccccctatgatctcagaagagaaagggccctgctaccgcctcgtcagtcctgggaggcagtgtatgcaccctctctctgttcacctcaccaagcagatctgctgttgtagtgtgggcaaggcctggggcccacagtgtgagaaatgtcccctcccgggcacagctgcttttaaggaaatctgtcctggtggaatgggttatacggtttctggcattcatagacgcaggccaatccatcagcatataggtaaagaagctgtatttgtcaagccaaagaacactcaacctgttgctaaaagtactcatcctccacctctcccagccaaggaagagcctgtggaggccctgacctcctcgcgggaacatgggccgggagtggcagagcctgaagtggtaacagcacctcctgagaaggaaataccctcactggatcaagagaaaacaagacttgaacctgggcaaccccagctctccccaggggtttcaactattcatctgcacccacagttcccagtagtggttgaaaagacatcccctcctgtgcctgtggaggtggctcctgaaggttctacatcaagtgccagccaagtgattgctcctacgcaagtaacagaaatcaacgaatgtactgtgaacccggatatttgcggagcaggacactgcatcaacctgccggtgaggtatacctgcatatgctacgagggctacaagttcagtgagcagcagaggaagtgcattgacattgatgaatgtgctcaggcccagcatctctgctcccagggtcgctgtgagaacacagagggaagtttcctgtgtatttgcccagcagggtttatagccagtgaggagggttctaactgtatagatgtggatgaatgtctgaggcccgatgtgtgtagggacggccgctgcatcaacactgctggggccttccgatgcgaatactgtgacagtgggtaccggatgtcacgacggggccactgtgaggatatcgatgagtgtctgaccccaagtacctgtcccgaggaacaatgcgtgaattccccaggttcttaccagtgtgtgccctgcacagaagggttccgtggctggaatggacaatgcctcgatgtggacgagtgcctgcagccaaaggtctgtaccaatggttcctgcaccaacctggaaggctcctacatgtgttcctgccacaagggctacagccccacaccagaccatagacactgtcaagatattgatgaatgtcagcaagggaacctgtgcatgaacgggcagtgcaaaaacactgacggctccttccggtgtacctgtgggcagggctatcagctgtcagcggctaaagaccaatgtgaagatattgacgaatgcgagcaccgtcacctctgctctcacgggcagtgcaggaacacagagggctccttccagtgtttgtgcaaccagggttacagagcatctgtgcttggagaccactgcgaggatatcaatgaatgcttggaggacagtagtgtctgccagggaggtgactgcatcaatacagcagggtcctatgactgcacgtgcccggatggactccagctgaatgacaataagggctgtcaagacattaatgaatgtgcacagccaggactctgtgcacctcatggggagtgtctaaacacacaaggctcattccactgtgtctgtgaacaagggttctccatctctgcagatggtcgtacttgtgaagatattgatgagtgtgttaacaacactgtgtgtgacagtcacggcttctgtgacaacacagccggctctttccgctgcctctgttatcagggctttcaagccccacaggatgggcaagggtgtgtggatgtgaacgaatgtgaactgctcagtggtgtatgtggggaggctttctgtgaaaatgtggaagggtccttcctgtgcgtgtgtgccgatgagaaccaggagtacagccccatgactgggcagtgtcgctcccgggctactgaagattcaggtgtggatcgtcagcccaaagaagaaaagaaggagtgttattataatctcaatgryrcsagtctctgygatrrcgwgctggcccccaasgtcaccaaacaagagtgctgctgtacatcgggcgccggctggggagacaaytgtgagatcttcccttgcccagtccaggggactgctgagttctcggaaatgtgccctagaggaaaaggttttgtccctgctggagaatcctcttacgaaaccggtggtgagaactacaaagatgctgacgaatgcctgctgtttggagaggaaatctgcaaaaacggttactgtttgaacactcagcctgggtatgaatgctactgcaaggaagggacatactacgatcctgtcaaattacagtgttttgatatggatgaatgccaagaccctaacagttgtatcgatggccagtgtgttaatacagagggctcttacaactgcttttgcacccacccaatggtcctggatgcctctgagaasagatgtgtgcagccaactgaatcaaatgaacaaatagaagaaaccgatgtctatcaagatctgtgctgggagcatctgagtgaggagtacgtgtgtagccgtcctcttgtaggcaagcagacgacatacacagagtgctgctgtttgtacggggaggcatggggcatgcagtgtgctctctgccccatgaaggactcagatgactatgcccagctgtgcaacatccctgtgacaggacggcggcgaccatatggacgggatgcgttggtggacttcagtgaacagtatggcccagaaacagacccttacttcattcaggatcgctttctaaacagctttgaggagctacaggctgaggaatgtggcatcctcaacggctgtgaaaatggccgctgtgtaagggttcaggaaggttatacttgcgattgctttgatggatatcatctggatatggccaagatgacctgtgttgatgtaaatgaatgcagcgagctgaataatcggatgtctctctgcaagaacgccaagtgcattaacacagaannnnnnnnnnnnnnngtgtgtctaccaggctacgtaccatctgacaagcccaactactgtacaccactgaacaccgctttgaatttagacaaagacagtgacctggagtgaaggagaagctacgtaacctatgcccatatactctgcactgtgtaaaggaaaagggagagaggtatacttgagacactgcacctaatccagaccatgsmaaagaaggaaacaacgtgnnnnnnnnnnnngacccccaaagaaagtgagcggatggagtagcagcytgagaggtgcgacagaccaaatggacatttcctcaaaaacccagtatatatagtctgttcatatgtaaaattcaatggaaaagaggcaggatgcggctktywttttaaacagaggttgtattattatcwtgtyttgatttttttttttactattgcttaaatttggcttttaaatagtggtgacgatgttthatatgagtcttctytgtgctgtgcagatccccagccmccatkttttcttcagcgataatctcaagtgcaaacatctttgwtaacgtattgttaaactgtmttatargtatgacacagggttgtrctgtcccttggtccggagactttgaaaaacaaattgtctgtcctgtggagcaggcagtgactgttaaacttttatctacatttrgagtggktgggaaaacacctttattttcaatgtattatcggattgcstgtcaattggatcccttacttgggtggaaatggaggagtttcttagcatttattagcactgtgttgtgtaaagtcaacccagaaaaatttaaaaacctgaaatccccccctcaaaatatttwmcattgtatgttataagaaaataaaatcgccatttttgtvsmwmrwrmmraawwmwwaaaaaaaaaaaaagtttggcggcc

SEQ ID NO: 2568 - DNA, 2676 bp, Rattus norvegicus
gcggcggcggccaggagcgcacggacggccgcgcggcccgagctaggcgggcgccgccgcgatgctgcgaggccagcggcacgggcagctgggttggcatcgcccggccgcggggctaggcggtctggtgacttcgttgatgctggcttgtgcttgcgccgcatcctgtcgtgagacctgctgtcccgtgggcccctcggggttgcgctgcaccagggcagggaccctgaataccctccgcggcctgcggggcgccgggaacctgacggagctctatgtggaaaaccagcgggatctgcaacgcctggagtttgaggacctgcagggcctgggggagttgagaagcctaaccatcgtgaagagtggcctccgctttgtggcccctgatgccttccatttcacccctmrsctsasksasctgaatctctcctccaatgctttggagtccctctcctggaaaactgtgcagggcctcwmcctacaggasytgaccctgtcagggaacccactgcactgttcctgtgccctattgtggctccagcgctgggagcaggaggatttgtgtggtgtgtatacacaaaagcttcagggctctgggtctggagaccagttcctcccactgggacacaacaacagttgtggtgtaccctcagtgaagatccagatgcccaatgactctgtggaagtgggggatgacgtttttctgcagtgccaggtggaggggcaggccctacagcaggctgactggatcctcacagagctggaagggacagccaccatgaagaaatctggagatctgccatccctggggctaactctggtcaatgtcaccagtgatctcaacaagaagaatgtgacgtgctgggcagagaatgatgtgggccgggctgaggtctctgtccaagtcagcgtctccttcccagccagtgtgcatctgggcaaagccgtggaacagcatcactggtgcattcccttctctgtggacgggcagccagcaccgtccctgcgctggttcttcaacggctctgtgctcaatgagaccagcttcatcttcactcagttcttggagtcagcgctgaccaatgagaccatgcggcatggctgccttcgcctcaaccagcccacgcatgtcaacaacgggaactacaccctgctggctgccaacccctatggccaggctgctgcctccatcatggctgcctttatggacaacccttttgagttcaaccctgaggaccccatccctgtctccttctcgccagtggacactaacagcacatcaagagacccagtggagaagaaggacgaaacaccttttggggtctctgtggctgtgggcctggccgtctccgccgccctcttcctttctgccctcctcctagtgctcaacaaatgtggacagaggagcaaatttgggatcaaccgccctgctgtgctggcgccagaggatgggctggccatgtccctacacttcatgacactgggtggcagttctctttcccctactgagggcaaaggctccggactccagggccacatcatggagaacccacagtacttcagtgatacctgtgtccaccatatcaagcgccaggacatcattctcaagtgggagctaggggagggagcctttggaaaggtctttcttgctgagtgctacaaccttctgaatgatcaggacaagatgctggtggctgtcaaggcactgaaggagacatctgagaatgctcgtcaggacttccatcgtgaggcagagctgctcaccatgctacagcaccaacacatcgtacgcttctttggagtctgcacggagggtggcccattgctcatggtcttcgagtacatgcgccatggggacctcaaccgtttcctccggtcccacggacctgatgcaaaactgctggctggcggcgaggatgtggctcctggtcctttgggccttgggcagcttctggctgtggctagccaggtggctgctggtatggtgtacctagccagcctgcactttgtgcaccgggacctggccacacgcaactgtstggtgggtcagggactagtggtcaagattggagacttcggcatgagcagggacatctacagcacagactactaccgtgtgggaggtcggaccatrctgcccatccgctggatgcctccagagagcatcctctaccgcaagttcagcacckagagtkatgtgtggagcttcggggtggtgctctgggagatcttcacctatggaaagcaaccctggtaccagctctccaacactgaggcgatcgagtgcatcacgcagggccgggagctggagcggscgcgcgcctgccctcctgatgtstacgccatcatgcgcggctgctggcagcgtgagccgcaacagcgcctcagcatgaaggatgtgcacgcgcggctgcaggccttggcacaggcgccaccgagttacctggacgttytgggctasgagtytggatgtcaggctaccctgggctccctcagcgcccagcagctatcacactcaagtcttaccctcagcatgtggaggggaccagcaggcggggagcagaggstsgykyygcttcatggccagcmtcswkcmkaatagcmmtyrtvyybrtkmyscctgrmwrwraaaaaaaaaaaacaayswcgtgccgctccaacatcagcctcgtgccg

SEQ ID NO: 2569 - DNA, 971 bp, Rattus norvegicus
cacgaggcccgctctttggaaatccgaacccttctctctcgctgcctacagaaaccttcaagaagtccgcaggtccttcgtgtcatctccagccttgctcaggactcctccaaaacccagccaattcgctgcattggtgcccacggtgacccccttctgtggggcgcatggggcggtgctaattgggctggcagcacaggccaggaggctctccaacatgaacctcgtgggcagctacgcacaccatcaccaccatcaccactcacacccgccgcaccccatgctgcacgaacccttcctctttggtccggcctcgcgttgccaccaggagcgsccttacttccagagctggctgctgagcccggctgatgctgccccagatttccctgccggcgggccaccacctaccaccgcagtagcagcggctgcctatggtcccgatgccaggccgagtcagagcmcaggtcggctggaggctcttggaggccgcctgcmcaggcgaaaaggttcaggacccaaaaaggagcggaggcgcacagagagcattaacagtgcgttcgcggagctgcgtgagtgcatccccaatgtgcctgcggacaccaagctctccaagatcaagactctgcgcctggccaccagctacatcgcctacttgatggacgtgctggccaaggatgcacaagcaggtgaccccgaggccttcaaggctgaactaaaaaaramvrmwdrmrgycgcgaaagcaagcggaaaagggagtcgcctcagcagcacgaaggccttcctcctgccctggggccaagcgagaagaggattaaaggacgcactggctggcctcagcaagtctgggcgctggagctaaaycagtgagamgaggccggcaccgaggacccggccaaggctggcccacctggctatccggagaggagagggcaggacgcagcggccacggcaatttccgggtacccgcgcg

SEQ ID NO: 2570 - DNA, 1633 bp, Rattus norvegicus
ccatgggcctacgtctaggaggagctgagaaaggcattgtgccccccccctgcttgctgatgattctctgacccctgtctccctgcagagagaggccccggaaacatgggtgactggggcttcctggagaagctgctagaccaggtccaggagcactcgaccgtggtgggcaagatctggttaacggtgctcttcatcttccgaatcctcatcctgggcctggctggtgagtcggtgtggggcgacgagcagtctgatttcgagtgtaacacagcccagccaggctgcaccaatgtgtgctatgaccaggctttscccatctcccacatycgatactgggtgctgcagttcctcttcgtgagcacacccaccctgatctacctgggccacgtcatttacctgtctcggcgggaagaacggttgcggcagaaagagggagagcttcgggcactgccatccaaggaccctcatgtagagcgggcactagcagccatagaacatcagatggccaagatctcggtggcagaggacggtcgkcttcgaattcgaggggcgctcatgggtacctacgtgatcagtgtgctgtgtaagagtgtgctggaggcaggcttcctctatggccagtggcgtctytacggctggaccatggagccggtgtttgtgtgccagcgtgcgccctgcccccacgtcgtggactgctacgtctytcgacccaccgagaagaccatcttcatcattttcatgttggtggyaggggtcatctmcttggtgctcaacctactggagctggtgcacctgttgkgccgctgtgtcagccgggagataaaggcrcggagggaccatgacacccgcccggctcagggcagtgcctcagacccttaccctgaacaggttttcttctacctccccatgggcgarggaccmtcgtccccaccgtgtcccacctacaatgggctctcatccactgagcaaaactgggccaacttgaccaccgaggmragamtkacskctacsagrcctcccccatttgtaaatgcagccccccagggtggccagaagtcctctasccgccccaacagctctgcatccaagaagcagyaygtakagggctctggggyttctgtcactccacaggctrtcctgaggagtgtgtgtaccttgratgcctctcgggcggtccactcctcaaaggcacttgagagacaactgggcctggaaggtggacattcgctgggcagargacctgatcacaggtggttctggaataccctgagccttagtgatgaccaaaggacactggcttctttccagaatgtgaccctaccagcctyggtgacagcaggtggggtgmtcttggmtaagtgtgctgtgaactctctgatccttttygcctgatgcagagggatcccragccaagtcgacttcaggtttccatcacaccycacttctcctgggagaaggcactgatgtaggctgctggctcagcttcgtcaccaggacagacacagcctgcctgckctggatctggccctttccaggggagctggttggtgtcttgtttccctcactcctagttccactgtttatgatcctaaaataaacgggactccatcataaaaaaaaaaaaaaaaaa

SEQ ID NO: 2571 - DNA, 3242 bp, Rattus norvegicus
gagctctaatacgactcactatagggcgtcgactcgatcatgatgatgttaccctaactcgtaacaatacacagaacataggtggtcaacctaatctaaaaacccattaatctaaaaaccacggcttgcgcacgttgttaatgtgaagtacaaagataatatatttttttaattagcagtctcaatcttctccttctgccttgcttccttctcctatgatacaatccgtaattttgttcacttctccagtccagacttgcacttttagaccacaccccaagccaagtcactcctggcacccctctttcctatctcagctgccctttcctggctactactcacttagccccacccaaagagtcttcctcccttctggactgctctggaacacagactgtccctccccaacagtgaagggaggtgtgggggttttcagcctcaccctcaggaagatgctccccggcccctgcctcctttgctctgctctgtggtacttcctctctggctgtcttagctgacagacctagaagtgggaccaagaccctagcactaagacagattcaaggactgtatatccaactactagacgtgtgttaccttctgatcagcatctgaaaaaccctgtaagtatcctaggaatgggatggtgtgtgtgtgtgtgtgtgtgtttgtgagtgtatgtcagtatggtatatgtgtgtattgagtgtgtctgtgttttgtgtattagtgtgtgtatgtgagtgtatgtatgagtgtcagtatggtgtgtatgtgtgtgtgtatgtgtatatgtgtgtatgtgtgttgtgtgtataagagtgcatgtcagtatggtgtgtcggtgtgcttgtgtgtatgtgagtgtgtcagtgtgttttgtgtgtgagtgtgtgtatgtgagtgtatgtatgagtgtttgtcagtatgggtgtgtgtgtgtgtgtgtgtgtgtgtatgtgtgtgtgtgtgtgtgtgaagtatggcttggagagatggtgaggcagaatccccaaaggaagcctgaccacagtaaagggagggttctcagggctagtccatttctttttttttttttttttttggttcttttttttcggagctggggaccgaacccagggccttgtgcttcctaggtaagcgctctaccactgagctaaatccccagcccctaaatggagggaaatcattttttttttttggttcttttttttttccggagctggggaccgaacccagggccttgcgcttcctaggtaagcgctctaccactgagctaaatccccagccccccattaactcttacaggccctgttcttcctggtgccctgtggtcagctctagagagagtggataggcgactagagaaagtagacggtggctcttgggagacagaagagttagttggcctttcaaggtgtgcaccgtgctgaggagagtccagcggtctggtgctgggttccagggtctcttaaggggacgaatgtgaagggttctggaaatactgctgttgctattcatttcataactgggtctgtggcaaagaaggggccccatagcctggttaggaaattagcctttctattcaaccaagtgcctttaagacaatgaggttgacagtgatgggctgatatattttgaaggtgactctgaaacgtctgattttggagactaaactactcacgctaatgtgatatggggtgtgtgtgtcaaggatcctttggcttcccctcatgggtgtgtccactttcactctctaggaccttttgatggctgcaaacactacatctactgcagcaacttcttctcctggtggcatgtccctgtctctgttgcccattgtcctgctgtctgtggccctggttgtggggcttcccggcaatagctttgtcgtgtggagcatcctgaaaaggatgcagaaacgctctgtcaccgccctgctggtgctgaacttggccctggccgacctggccgtgttgctcactgctccctttttcctacactttctggctcggggcacctggagttttgaagtgaccggttgccgcctgtgtcactatgtctgtggagtaagcatgtatgccagcgtcctgcttatcactatcatgagcctggaccgctcactggcagttgcccgcccctttgtgtcccaaaaggttcgtactaaagcctttgcccgatgggtgctggcaggtatctgggtggtgtcttttctgctsrcsakrccggtccttgtgtaccgcacagtawcacccaagaacaagacgttgatctgcgactcgaggtatcccagcgacgggcataaagtctttcatctgctctttgaagccatcacgggcttcctgctgcccttcctggcggtggtggccagctactctgacatcgggcgcaggctgcaggctcggcgcttccgccgcagccgccgcaccggtcgcctggtggtgctcattatcctggscttcgccgccttctggctgccttatcacctggtgaacctggtggaagctggccgcacgctggccggctgggacaagaacagccctgctgggcagcgtctgaagctggcccgctacgtgctgatcgcgctggccttcctgagcagcagcgtgaacccggtgctgtacgcgtgcgcaggcggcggcctgcttcgttcggcgggcgtgggcttcgtagtcaagctgctcgagggcactggctccgaggtgtccagcacccgtcgcggaggcactttggtccagaccccgaaggccacacccacctgtcctgaaccgggccccaccgacagcttcatgacttcctccacccctcctgaatcttcgaagtgaactgtagtaggttgggttatgacacaactcataacttggaggagaacctggaggagaacatgttggggactgggctaaagtggaaaagagggaggggtggggcaagtcagggcagagagakagcatgctctgtcctggcttctgcaggcagccttacgattaaaactaaagtctaaagccarrwwaarmmwrwrarwgaggtgtgtattgtgggggtactagggtctttactggtcccacagagggaccattctggtggagtccctctcaacagttccttagttccccgtgatttacaattttgcaagagacacatggcagatacaaccctatgttcctaattctgaaatccgtcagtagaaacacactactgactcctgaaggtgttcgttacgagaactcttgttgtgtgagctc

SEQ ID NO: 2572 - DNA, 6269 bp, Rattus norvegicus
cccgggggaccagcggggagggtgtgtgtgggggggcggtggcggcgaaacgggcgggcggcgcgcgggatggaacaccgagacaccgacggaatgctccggatcgccacataatcctctggaacagccgcgccgaacgccatcggcgtctccgttctccgcgcgccgctgccgccgccgtctcccaccttcgcctcacctcctcctcctccgctgcctccggagctgggggggcgacgtgaaaccccgctacgatggagcccgccgccgcagccccggcacagcgactcgcggaccccacgggtgaggaccgagccccggcggcggcggcggcggccgagggcggacggagtccggattctgtgctgagcgcggcggccccgagcggcgggaacggcggcgcggcgcgagaggaggccccctgcgaggcgccgccggggccgctgcccggccgcgcgggaggcaccggacgcaggcgtcggcgcggggtgccccagcccgcggccggcggggccgccccggtgaccgcggccggcggcggcgccaactcgctgctgctgaggagagggcggctgaagaggaatctgtcggccgccgcttcgtcgtcctcatcgccgtcctcggcgtcttcggccgctggcggcctcccggcgtcctgctcggcctcggcgtcgctgtgcacccggagtctggacaggaagacgctgctccagaagcaccggcagctgcttcagctgcagccgtcggaccgggactgggtgaggcaccagctccagcggggctgtgtgcacgtctttgaccgccacatggcctcgtcctacctgcgcccagtgctctgcacgctggacaccacagccgccgaggtggccgcccggcttctgcagctgggccacaaaggcggcggggtggtgaaggtgctgggccacgggccacctccggccgctgccccggccgccagcgatcagaccccggccacagagctcggaagagacgtggagccaccgccctcgagcagcacggtcggtgctgtccggggccctgcgcgcgcgcctcctgccgatctgccgctgcccgggggcgcctggacgcgctgtgcacctcgggtcaaccctgcgccctcggactccagccccggagagctgttcgcgggcggcccctgttccccgtcccgcgccccgcgcccggcctccgacaccgagagcttcagcctgagccccagcgccgagagcgtgtcagaccggctggacccctatagcagcggcggcggctcctcctcttcgtccgaggaactagaagctgacccggccacggtcttgacggggccttccgggccgccccaccacccagtccgctcctcacagcctcgaccgccttccccgaagacctcggcgttactgcagccgaaagccccgacgggcgtagacggcactggcctagtggtgggcgaaggtcccggagacgacaaggcggtggcagctgcagctccaggcgttcctctgtggactccagggaggatccgggagaccgtgcaaaagacgtcttctccgccctccctgtatgtacagctccatggggagactacccggcgcctggaggcggacgagaagccattgcagatccaaaatgactacctcttccaactgggatttggggagctgtggagggtgcaggaggaaggcatggattcggagattggctgcctcatccgattctatgcaggaaagcctcatagcactgggagctctgagcggattcagctctcgggaatgtacaatgtccgaaaaggcaaaatgcagttgccagtgaacagatggacaagacgccaggtcattctgtgtgggacgtgcttgatagtgtcgtctgtgaaagacagctcgagtgggaagatgcacgttctgcctctcattggtggaaaagtggaagaagtgaaaaagcaccagcactgtctagcgttcagctcttccgggccccagagccagacttactacatctgcttcgatactttcacggagtacttacgatggctgcgtcaagtctccaaggttgcatcacaacgcataagctcagtagacctctcatgttgtagccttgagcatctgcctgccaacctcttttacagccaagaccttactcatctcaatttaaaacagaacttcctaaggcagaaccccagcctcccagctgccagaggacttggtgaactgcagagattcaccaaattgaagagccttaacctttccaataaccacctaggagcctttccgtcagcagtctgcagcatcccaaccctggcagagctgaatgtgtcttgcaatgccctgcaagaagtcccagcagctgttggagctatgcagaacttacagacgttcttgctggatggaaattttctccagtcccttcctgctgagttggagaacatgcaccagctcagctatttgggtctttcctttaatgaattcactgacattccagaggtattggagaagctgactgctgtggataaactgtgcatggctgggaactgtatggagacccttagactacaggccttaagaaggatgcctcatattaaacacgtggacctaagactgaacatactcagaaagcttataacagatgaagtggactttctgcaacatgtcactcagcttgacctgcgagacaataaacttggtgatctagatgctatgatcttcaacaacatagaagttctgcactgcgagaggaatcagctggtgacactgaacatttgtggctatttcctaaaagcactctatgcttcttctaacgaactcgttcaacttgatgtctacccagttccaaattatctatcgtacatggatgtctcaagaaactgcctagaaagtgtgcctgagtgggtatgtgaaagccggaagttagaagttttggatattggccataatcaaatatgtgaacttcctgcccgcttattttgtaatagtagtctccggaaattgctggcaggacacaaccggttggcaaggcttcctgaaaggctggagagaacatcagtggaggtcttggacgtacagcataaccagatcattgagctcccaccaaaccttctcatgaaggctgacagcctgagattcctcaatgcgtccgcaaacaaactggaaaccctgcctccagccacactttctgaggagacaagcagtatattacaggagttgtacttgacaaacaacagcctcactgataagtgtgtgcccttgttaacagggcacccccgcctgaagatcctacacatggcttataaccggcttcagagcttcccagcaagtaaamwsgmgraactggaggagcttgaagaaatcgatatcagtgggaataagctgaaagccatcccaacaaccatcatgaactgcaggcgcatgcacacggtgattgctcactcgaactgcatcgaagtctttcctgaagtcatgcagctcccagaagtcaagtgtgtagatctgagctgtaatgagctgagtgaaatcaccctaccagaaaacctgccacctaaactgcaggaactagatctgaccggaaacccacgccttgccctggaccacaaaagcttggagctgctcaataacatccgctgtttcaagattgaccagccgtcagcwggagatgcatctggagccccagcagtatggagtcatggttacactgaagcatcgggagtaaaaaacaagctgtgtgtcgcagccctgtctgtgaataacttccgtgacaaccgagaggctctctacggtgtgtttgatggagaccggaatgtggaagtgccctaccttctccagtgcaccatgagtgacatcttagctgaggagcttcagaaaacaaaaaatgaagaagaatacatggtcaatacatttatagtcatgcaaaggaaactgggaacggctgggcagaaactcggtggtgctgctgtcctgtgtcacatcaggcatgaccctgtggacctgggaggatcctttaccctgacctctgctaatgttggcaagtgccaaacggttctctgtcgaaacgggaagccgctgtctctgtccaggtcctataccatgagctgtgaagaagagcggaagaggattaagcagcacaaagccatcatcactgaggatggcaaggtcaatggagtgacagagtccacacgcatcctgggctacaccttccttcaccccagtgtggtgcctcgcccccacgtacagtcggtgcttctgactccacaggatgagtttttcatcctgggcagcaaagggctgtgggacagcctgtccatcgaagaggctgtggaagccgtgcgcaacgttccagatgctctagccgccgccaagaagctatgcaccctggcccagagctacggctgccacgacagcatcagtgctgtggtggtgcaactcagtgtcacggaagacagcttctgctgctgtgagctcagtgtgggaggaagcatgccaccgcccagtcccggaatcttcccgccctccgtcagcatggtgatcaaggaccggccctcagatgggctgggcgtgccgtcctccagcagcggcatggcatctgagatcagcagtgaattgtctacctctgagatgagtagtgaggtgggctccacagcttctgacgagccgccgtcgggagccctgagtgagagcagccccgcctaccccagcgagcagcgctgcatgctccacccggtctgcctgtccaactccttccagcgccagctgtccagcgccactttctccagtgcgttctctgacaacggccttgacagtgatgacgaggaacccattgagggcgtgttcagcaacggcagccgggtggaggtggaagtggacatccattgcagccgggccaaggagaaggagagacagcagcacctgcttcaggtaccagctgaagccagtgatgagggcattgtcatcagtgccaatgaggatgagtcaggtctgtccaagaagacagacatttctgctgtggggaccattgggcgacgcagggctaacggctctgtacctccccaggaaaggagccataatgtaatagaggttgccacagatgcacctctccggaagccgggaggctattttgcagcccctgctcaaccagatccagatgatcagtttatcatccccccagagctggaagaggaagtcaaagaaatcatgaaacatcaccaggagcagcagcagcagcagcagcagcagcagcagcagcagcagcagcagccaccacctccaccccagccgccacaggcacaggcacaggcacaggcacaggcacagaggcccttccagatggatcacctgccggactgttacgacacaccactatgacccagcctgcgtactgttttaaaccataaactaaccagagaggccgagagagtgtcccaggctcacgttaaaccaggggtgttgcttcatgccctctcccagacactgccccgcctgtctctgcagctcatctctaggctctctttgtattagttacttttaatatttaaccacttttcttctagtgacactttaccaatatgatttaaatttgttaacttctttccctaacatatcaactgtgtaaagacaaagaacaaaaggtttaatatattacagagaaacagtaaatgataatgtaatatttttaaaaatggctttttgttgttttgttcgtttggaaggcagggctagttgccgttgctaaatgatttaataatactgtaatgtgtatttctttgtggggaaagcttttttttgtcttgaaaatgatagacatttgtagaatatggagactaactcctaggagykgcwykaskctgtcagtgacttaagtcactgggactcactaattttctctgagagaacagttgattgagaaatttctattgtaaatagctcagtgttacataatgaagcttaaagtgtttgtagtcttggcatagggacacggccgaaataactgactccttcctcgstytgcagagcctcccctgccccagccacctcgcccatgtgcagtgtgssccatttgctyagtstgmttctgtgcagataatrtggccctgctctcgggagcccagaaccttttacagacactktttaaktgtrttcmttcstgctrcsacamtcwgcatgactgtatagagtccmttagaccagccacacatccagagttatatrgaaacwgaatgcccaawtggacatgtcgtaatwtwtgtwataataaatatgaaatktacamrwwaaaaraaaaaaaaaaaa

SEQ ID NO: 2573 - DNA, 1440 bp, Rattus norvegicus
cccgctccccgctccgcggctccgttgcaacccgcgcggcccccgccctcggacccgcccccgggggtcgcccggccccatgccctgcagcggcggcagagaagcgcgcggccgcaggcggctctgaggagcccggagagagccggcgacgaaggggaccatgtaccgggacccggaggcggccagcccaggggcacccacccgcgatgtcctgctggtctctgcaatcatcaccgtcagccttagcgtcactatcgtcctctrygkmcygkgmcacyggwgkcrgcgcammywgggcaaacgctacaagaactccttggagacggtgggcacgccagactcggggcgtgggcgcggtgagaagaaagccatcaagttgcctgcaggagggaaggctgtgaatacagccccagtgcccggccagacgccacatgatgagtctgaccgcagaacggagccccgttcctctgtctcggacctcgtcaactcccttaccagcgagatgctcatgctctccccaggctccgaggaggatgaggcccatgagggctgcagccgagagaacctgggccgaatccagttcagtgttggctacaacttccaggagtccacactcaccgtgaaagtcatgaaggcccaggagctgccggccaaggacttcagtggcactagtgacccctttgtcaagatctacctactacccgacaagaagcacaaactggagaccaaggtgaaacggaagaatctaaacccgcactggaacgagacctttctatttgaagggtttccctatgagaaagtggtacagaggatcctctacctccaggtcctggattatgaccgtttcagccgcaatgaccccattggggaggtgtccatccctctcaacaaggtggacctgacccagatgcagaccttctggaaggatctgaagccatgcagcgatgggagtgggagccgaggggagctgctcttgtctctctgctacaacccctctgccaactccatcatcgtgaacatcatcaaagctcgcaacctcaaagccatggacatcgggggcacatcagacccctatgtgaaggtgtggctgatgtataaagacaagcgggtagagaaaaagaagacggtgacaaagaagaggaacctgaatcccatcttcaatgagtctttcgcctttgacatacccacggagaagctgagggagaccaccatcatcatcactgtcatggacaaagacaagctcagccgcaatgacgtcattggcaagatctacctgtcctggaagagcggaccaggcgaggtgaagcactggaaagacatgatcgctcgtccccggcagcctgtggcccagtggcaccagctgaaagcctgagaggggccgagggaggccccgagggccaaggcctggctccccatcacgccctaccactttatgcacaa

SEQ ID NO: 2574 - DNA, 1169 bp, Rattus norvegicus
cacgagggcatccccggccccatcggagcggaactccgtgagcctttctacctcgcgagtgcccgggagtgcgtcttgctgtctgacttaaatcctcgctgctttagagcacgccccttcggcagccagggtggggcccaaaccgaacctggccmtsccsmccccaymtgmskytsrgwmrcwgcacacagggccagaagaggcagacaggcctccctcgatgtccagccatgatgcagccccctcaggacctcccagtcgaaatccctgctgcttgtgctggtgctgctgctgtagctgttcctggaaccaagaacggcaacgagcttggcaggtttcccgggaaagcaagctgcaacccctcccmagctgtgaagtctgcactccaccaagccctgaggaagtacagagctgggcacagtcctttgacaagttgatgcatagccccacgggccgcagtgkattccgggcattcctgcgcacagaatacagkgaggagaacatgctcttctggctggcttgkgaggagttgaaaacagaggctgaccgacatgtggtggatragaaggcscgacttatytatgaggactacgtgtccatcctgtcccccaaggaggtcagcctggactcccgtgttcragaaggcatcaataggaagatgcaagaaccatcaccacacacattcgacgacscacagctgcagatctacaccctcatgcaccgggactcctaccctygcttcctcacctcccccacctaccgytythtgttactccagggggccccacagtcctytgaggcctaggtcatttgtcacacagatgttctcccatgggcagcctaggggtggccctgctccacttggctgaaatagactgcaatgccatgttctgctytgtcctagcctgctcctactgggggttctcctacatggtgcctmagaccaccaccctccagtcktgtgcccagragatgttctcatggagaacatcctgtatagcaacaagtttgtagcaggagaacgttaattcctcagaagcagatatagaacctcagagtcagactcaaatgaagagcccatttatattttatatattaactttaaagttgtccatactgtatgttttatcaaaagaaaaaaaaagacctttcaaaaaaaaaaaaaaaaa

SEQ ID NO: 2575 - DNA, 518 bp, Rattus norvegicus
tccagmwcrwskgtcctcaccaccaaggccatggtgtcttcagcgactatctgcagtttgctactcctcagcatgctctggatggacatggccatggcaggttccagcttcytgagcccagagcaccagaaagcccagcagagaaaggaatccaagaagccaccagctaaactgcagccacgagctctggaaggctggctccacccagaggacagaggacaagcagaagaggcagaggaggagctggaaatcaggttcaatgctcccttcgatgttggcatcaagctgtcaggagctcagtaccagcagcatggccgggccctgggaaagtttcttcaggatatcctytgggargaggtcaaagaggcgccagctaacaagtaaccactgacaggactggtccctgtactttcctcctaagcaagaactcacatccagcttctgcctcctctgcaactcccagcactctcctgctgacttacaaataaatgttcaagctgtaaaaaaaaaaaaaaaaa

SEQ ID NO: 2576 - DNA, 1441 bp, Rattus norvegicus
gggaaggctatgctgccttgtcccacttgctggttctgtttgttttcatgccaaaaagcctagtcaggagacttgctttggcccagaagattctcccacaggaagcaagatagggtctgccagccggcttttctttttatttcttgccccgtctttgctatttgttaaaccaggatgtggaagaggtcagactgatgttctttggacttggttaggaatctgttgacaagcaccaagctttgcaagatggcccttctcacaattcttagaattcttttgtggggaatggtgctttttatggaacacaaggtccaaatggcaaaggtagagtggccctccactaccctccttgctgaaaaccctacattgccctcgagtttggatctggccaaagaagcccctggcaaggagatgaagcagtggccccaaggatatcccctgaggtacatgctgaagttataccagcgttcggctgacccacatgggcacccgagggagaaccgcacgattggagctaaaatggtgaggctgataaagccgtcagccagtgcaatgaggcttctcagaggtccttggcatatacagaccctggactttcctctagcatcaaacgaggtagcataccaactaatcagagccactgtggtctaccgccatcaacttcatctagttcattaccatctctcctgccatgtggaaccttgggtccctaaatgtcgaaccaagcactttccatctaaatcgggttctgcaaagccttcttctgtgtctaaagcctggagagagatgaatattacccactgtattcagcagaagctctggaatcgcaagggacggagagtccttcgcctccgcttcatgtgtcagcagcaaaaaggcaatgagactcttgagctccggtggcatggcatgacctccttggatgttgccttcttgctactctatttcgatgacactgatgagagtgctcaggctaaacttcttgcaagaggtcaagaggagttaactgatagggaatctccttttcttatgcggagtgtccggcaaacatgcagcatagcatctgatgtcccttgtccttctcaggaacaggataggtctgtaaataaccagtgttccctccatccttacaaggtcagcttccatcaattgggctgggatcactggatcattgctccccgtctctataccccaaattactgtaaaggaatctgtactggagtattaccctatggtctaaattcacccaaccatgccatcatacagagccttgtcaatgaactagtgaatcgcagtgtgcctcagctttcctgtgtcccttataagtttcttcctatgagtatccttctgattgaggcaaatgggagtatcttgtacaaggagtatgagggtatgattgctcagtcctgcacatgtagataacagtgaacttgtagctagc

SEQ ID NO: 2577 - DNA, 1703 bp, Rattus norvegicus
atggcatttcccagcagattcctgttgggggtttgctgctttgcctggctgtgtcttcttattagccttagctctcaggcttccacgggagaatcccaggctggagccagtgaaaatttggagtctgaggcagacccctggtccttgctgttgcctgtagatgggactgacaggtctggcctcttgccccccctcttcaaggttctctctgataggcgargtgagacccctaagctgcagcctgactccagagctctctactacatgaaaaagctctataagacgtatgctaccaaagagggggttcctaaacccagcagaagtcacctctacaataccgtccggctcttcagcccctgtgcccagcaggagcaggctcccagcaaccagatgacaggacccctgccaatggtggacctgctatttaacctggaccgggtgactgccatggaacacttactcaaatcggtcttgctatacactctgaacaactccgctgcttcctcctccactgtgacctgtgtgtgtgaccttgtggtaaaggagcccatgtcttccagcaaggctaccccaagagcgccatactcatttaccctgaggaaacacaggtggattgagatggatgtgacctccctccttcagcccctggtggcctcaagcgagaggagcattcacctatctgtcaattttacatgcacaagagaccaggccccagagaatggaacgtttaatatgcctctctcagtgccgccctcgctcatcttgtatctcaatgacacgagtacccaggcctaccattcctggcagtcccttcagtccacccagaggcattcacagcatcccggccaggrcagtgtgactacccgtcctgtggaagaggaggctactgaggtagmamgakstcctcggcaccgtcggggacagaaaaccctcagctcagaaacaaagaagccacttacagcatccttcaatctcagygaatacttcagacagtttcttttccctcaaaacgagtgtgaactccatgatttcagactgagttttagtcagctcaaatgggacaactggatcgtggccccgcacagatacaaccctaggtactgtaaaggggactgtccccgggcagtcaggcatcggtacggctctcctgtgcacaccatggtccagaatatcatctatgagaagctagacccctcagtgccaaggccttcatgtgtgcccggcaaatacagccccttgagcgtgttgaccattraacccgatggctccattgcttacaaagagtacgaagatatgadagctacaaggtgcacctgtcgttagcatggggctctctacaacacctgagcctgtctggcagagcagtkccatgggccttagagggcctgggcagagagcttcatgtgaccaatctttytgtgtcactcagtgcacmttgtwtgagcaggggaagtgtgtgtgtgtgtggatgagcatkttgtgtgcmgtagccataggtgtacaggacacactggtcgttkccataaaccaagtggattatagctcmttcggagatctttttcttacccacgagtgtggtttccaatggacaaatttattagcataggtcttgagtggaaatgtagctgtgaacacttmagagtgctgtggttttacgcgtaacagaagaataaaccgttgstggcmaaaaaaaaaaaaaaaaa

SEQ ID NO: 2578 - DNA, 1342 bp, Rattus norvegicus
gcggccgcggctcggcgtggcccggggcgtccgccagggggcgcgccgcgacggggcgggaggggccgtctggtctggggaattaacaccggggacgggcgcgcgcgcaggtccccagcacatctgggtaagagccgagcctctggaagcgagcggggcgccgagcgcctgtctggagcggcagagccaccacgcaggcggagccccttcgagacgctccgggcgcacatctgggaccgggagaagggaccgcgcggcgcgcagctggacgcggggagggggcggcggctgcacasctggaccgaagggggcggggtcggtcccagcaactggskgaggggagggccgcaagccaccagggaccgaagcatggracagcgcgcctgaaggagcagtccggggcggagggggcctgggaccccgaaaggaaaagagagacgggtgagagcagaggaggaagatgcaactgacccgctgctgcttcgtgttcctagtgcagggcagcctctatctggtcatctgcggccaagaggatgggccccctggctcagaggaccctgagcatgatgaccatgagggtcagcctcggcytagggtgcctcgcaagagaggtcacatttcacctaagtcccgccccttggccaactccacccttctagggctgctagccccacccggggaggtttggggtatccttgggcaaccccccaaccgccccaaacaaagtcccctaccctcgaccaaggtgaaaaaaawawwwrrawrrggtgatttctactccaacatcaagacagtggccctgaacctgctggtcacagggaagattgtggaccacggaaacgggaccttcagcgtccacttccgccacaacgccacgggccagggtaacatctccatcagccttgtaccccccagcaaagctgtggaatttcaccaggagcagcagatcttcatcgaagccaaggcatccaaaatcttcaactgccggatggagtgggagaaggtagaacggggccgccggacctcactctgtacccacgacccagccaagatctgttcccgagatcacgctcagagctccgctacctggagctgctcccagcccttcaaaatcgtctgcgtctatattgccttctatagcacggactatcgactggtgcagaaggtgtgcccagattacaactaccacagtgataccccctactacccatctgggtgacctagatgggccacagaggcctgttcaaggaggctggctgtctggacactgggcagggaaagggatgggcctcaggaagggagggggtggagaggaagagaggccaagtgggtccgggtcagg

SEQ ID NO: 2579 - DNA, 1265 bp, Rattus norvegicus
cgtcgccctcagccgggcgccccttgccctgtgcccagaccggcccgccccgggacccgccctgccggacccgcttggccgcccgggaagatgcggctgctcccggaatggctcctcttgctctttggtccttggctccttaggaaggttatcagtggccagatcgtggaatccgggaggccacagtacctggacctgcgtcccgccatggccggagggggcgcccgcggccagcagctcccggtgcccgcttcttccgagggcctgaaccccgtgcgctcctggagctgggcttggccagctaaccacaccggggcgctggccaggccgggggcagccggtggcccgcccgtgccgcgcaccaagagaaagccatccattaaagcggcccgcgccaagaagattttcggctggggggacttttactttcgtgtacataccctcaagttctcgctgctggtgaccggcaagattgtggaccatgtgaacggtaccttcagtgtgtacttccgtcacaattcgtccagcctgggtaacctaagtgtcagtatcgtgccgccttccaagcgtgtggagttcgggggcgtctggctgcctgggcctgccccccaccctctacagtctacgctggcattagaaggggtgcttcccggactggggccccctctggggatggcggggcaggggctggggggtaaccttgggggtgcacttgccggcccactcggaggcgcgctgggagttcctggggccaaagagtcgcgcgcttttaattgccacgtagaatatgagaagacaaaccgcgctcgcaagcaccgcccgtgcctgtacgacccgtcgcaggtgtgcttcaccgagcacacgcagagtcaggccgcttggctctgcgccaagcccttcaaagtcatctgtatcywcgwskccttcctcagttttgactacaaactggtgcagaaggtgtgcccagactataacttccagagtgagcacccctactttggataacgcccccgtcctgggcccagagtttcccaccagatctcagtctcactaggtgggaccctccctgtataccccatgctcctgtgactgcccccacgtcttccactatgggtgaggtggagaacaacagccttcccccgggactatcagccagtgtggccctccatttccttgtggtactgagtgtccctaagactsrrrtgtcttcktsrmasgwkrarwkskmskggctakamkcmtgcmccwgawywtgastggttgtc

SEQ ID NO: 2580 - DNA, 5177 bp, Rattus norvegicus
ggacagacatggcacttctgctgtcttcaaaataataacaccagacccccttcctgttctctacattcctgaaagatctagtctaatctaggctccaacttttcctccgtcttggagaacagagatgaccaaagttcagtttccagctcacaactgcctgaaagtccagctccagaggatctgacacacttttctggcctccatgcaacacatgttgcacaaaaacagacacacacacatacagagaagacctccttggggagacagcttcctggcactgaaaaatcctgaccactgtccttgaacatgagtgcccgaaggcaggaattacaggacagggcaatcgtcaagatagctgctcacttaccggacctcattgtctatggagatttctctcccgagcggccgtcagtgaaatgttttgatggagttctgatgtttgtcgatatttcaggctttactgcaatgactgagaagttcagcacagccatgtacatggaccgaggagccgagcagctggtggagatcctcaactactacataagtgcgatagtggagaaagtactgatttttggaggagacatcctaaaatttgcaggtgacgccttgttggccctgtggaaagtggaacgaaagcaactgaagaatatcatcacggtggtaattaaatgcagcctggagattcatggcttgtttgaagccaaggaggttgaagaaggcctggatattcgagttaagataggactggctgctggccacatcaccatgttggtctttggggatgaaacacggaactacttcctggtgattggccaagcggtggatgatgtacgccttgctcagaacatggctcagatgaatgatgttattctgtcaccaaactgctggcagctctgtgatcggagcatgattgaaatcgagaggattccggatcagagagcagttaaggttagcttcttaaaaccacccccaacttttaacttcgacgagttttttgccaagtgtatggccttcatggattattatccttctggtgaccacaaaaacttcctaaggcttgcctgcatgctggagtctgatcctgaactcgagttgtctctacaaaagtatgtgatggaaatcattttgaagcagattgatgacaagcagcttcggggctatttatctgagcttcgtcctgtgacgatcgtgtttgtgaacttgatgtttaaagagcaagacaaagcagaagtcataggatcagccatccaagctgcctgtgtgcacatcacttccgtcttgaaggtcttccgaggccagatcaataaggtcttcatgtttgataagggctgctccttcctctgtgtcttcggtttccctggggaaaaggcccctgacgagatcactcacgctttggaaagtgccgtggatatattcgacttctgctctcaggtccacaaaatccgtactgtctccatcggcgtcgccagtgggattgtcttctgtgggatcgttggacacactgtgagacacgagtacacagtcattggccaaaaggtcaatattgctgccaggatgatgatgtattacccaggcatcgtgacctgcgactctgtcacatacgatggcagcaacctgccagcctacttttttaaagagcttccaaagaaagtcatgaaaggagttgcggatcccggaccagtgtatcagtgtctgggcctcaatgagaaagtcatgtttggtatggcctatctcatctgcaacagatatgagggctaccctttgctgggtcgtgttagggagatcgactatttcatgtctactatgaaggactttctgatgacgaactgcagccgagttctaatgtatgaaggattgccaggatatgggaaaagccaggtacttatggaaatcgagtatctggcctcccagcatgagaaccatagggctgttgctattgcactgactaagatcagcttccatcaaaatttttacactatccagatactcatggctaacgtactaggtctggatacttgtaaacattacaaagaacgacagaccaatcttcaaaatagagtcaagacgctgttggatgataaataccactgtctccttaacgacatcttccatgttcagttccccgtttcccgggagatgtccaggatgagcaagataagaaagcagaagcaactggaagctctgtttatgaagatcctggagcaaacagtgagggaagaaaggattatcttcatcatcgacgaggcccagtttgtggacgtagcctcctgggccttcatagaaaagctcatccggtccatgcccatcttcattgttatgtccctgtgtcccttccctgaaactccctgcgcagctgccaatgccataatgaagaaccggaacaccacctacatcacactcggtaccatgcagcctcaggaaatccgggacaaggtctgtgttgacctgagtgtaagcagcatccccagagagcttgactcgtacctggtggaggggagctgcgggattccgtattactgtgaggaactgctgaaaaacctcgaccaccacagaattctcattttccaacaagcagaggctgaggaaaagacaaacgtgacctggaataacctgttcaagtactctgttaagccgacagaagacatgtatctgtatacttccatagccgcgggacagaaagaagcctgttaccttacaagtggtgtcagactaaagaacttgtcacctccagcatcgctcaaagaaatctctctggttcaactggacagcatgagcctttcccatcagatgctggtgaggtgtgctgctatcattggtctaaccttcaccacagagctgctgtttgagattctcccctgctggaacatgaagatgatgatcaaggccctggccaccctagtggaatcaaatgtctttgattgctttcggagtagcaaagaccttcaactagccttaaagcaaaacgtgaccacgtttgaagttcattatcgctctttgtccctgaagtccaaggaagggttagcttacagtgaggaggagcagctccgtgaaatggaaggagaggtgattgaatgccgcatccttcggttctgcagacccataatgcagaagacagcctacgaactgtggctcaaggaccagaagaaagtcttgcatctgaaatgcgcccgctttttggaggagagtgcccatcggtgcaaccactgcagaaacagagacttcattccttaccaccacttcatagcggacattcgactcaacactctggacatggatactgtcaagaagatggtgaagtcccacggatttaaaactgaagacgaggtcatcttttctaaatcagagatccccaggaaattcaaattccccgagaacatcagcatcacagaaacaagggaaaaaatcttgcatttctttgacaatgttatcataaagatgaggacgtctcaggatgatgtcatccctctagaatcgtgccattgtgaggagctgctccagattgtcatcttgcctctggcccagcatttcgtagccttagaagaaaacaacaaagccttgtactacttcctagaacttgcatctgcctatctcatcctgggagacaactataacgcatacatgtatttgggcgaaggggaaaggctgttgaaatctctgacaaatgaagattcttggagtcagacctttgaatatgctacgttttatagtctcaaaggtgagatctgttttaatatgggacagatggtgctcgccaagaaaatgctgagaaaagcactgaagcttctcaacagaatgtttccctgcaatctactctccctgactttccaaatgcacattgagaaaaacagactctcccacttcatgaaccagcatacccaggagggctcgctgccagggaagaagctggcccaacttttcctgcagtcgtcctgcttctccctgctgtggaagatctatagcttgaacttctttttccactacaagtactatggtcgtctggcagcaataatgcagatgaacacctcgttagaaactcaaaacaatttccagatcatcaaggctttcctggacttttccctgtaccgccatctggctggatacgagggcgtgtggttcaaatatgaaatcctggtcatggagcagctcttgaacctccccctgaaaggcgaagcctttgaaatcatggcctatgcagccgacgcactgggccatatcaagttcttaaccggtcatctggacttggccattgaattaggctcccgagctcacaagatgtggtcacttctccggaatcccaacaaataccatatggttctctgcagactgagtaaacctcttttcttgaagagcagatacaagcatttggtccaggtgctgggatggttgtgggacctttctgtaacagaggagcacatcttcagcaaggcatttttctatttcgtctgcttggacatcatgctttattctggcttcatttacagaacatttgaagaatgtttggaattcatacaccacaatgaagacaacagaatcctcaagttccaaagcggactcctcctgggactttactcctgcatagctgtctggtacgccagacttcaggaatgggacaacttttacaaattttccaatagagcgaagactttagtgactcgaagaaccccaacggtcctttactacgaaggaatttctaggtatatggaagggcaagtcctccatcttcagaagcaaatagaagagcaggccgagaatgctcaggacagtggggtggagctacttaaggccttagagacccttgtggctcaaaataccactggccccgtcttctaccccaggctctaccatttgatggcctatgtctgtatactgatgggagacgggcacagttgtgacttcttcctaaacacagccttggagctctctgagacacaggggaatttgctggagaaatgttggctgagcatgagtaaggaatggtggtactcagcccccgagttgacaggagatcaatggcttcagacagtcttgagtctcccatcgtgggataaaattgtatcaggcaacgtaacccttcaggatgttcaaaagaacaaattcttgatgagagttaatattctggacaatcctttctaataattatgaatgagaacaaagattgcaaaaaaaaaaaaaaaaaa

SEQ ID NO: 2581 - DNA, 4060 bp, Rattus norvegicus
aattgtcagcacgaattctgagacttgccaaaaatgaagctggcgacgggactgtgggtctgggggagccttctggtggcagccaggaccgtccagcccagcgcttctcagtcagtgtgtgccggaacagagaacaaactgagctctctctctgatctggagcagcagtaccgagccttgcgcaaatactatgaaaactgcgaggtagtcatgggcaacctggagatcaccagcatagagcacaaccgggacctctccttcctgcggtctatccgagaagtcacaggctatgtacttgtggccctcaaccagtttcgttacctgcctctggagaatttacgcattattcgtgggacaaaactgtatgaagatcgctatgccttagcaatattcttaaactacaggaaagatggcaactttggacttcaagaactgggattaaagaacctgaccgaaatactaaatggtggagtctatgtagaccagaacaaattcctatgttatgctgatactatacactggcaagatattgttcggaatccatggccttccaacatgactctggtgtcaacaattggaagttctggatgcggaagatgccataagtcttgcactggtcgatgctggggacccacagaaaatcactgccagaccttgacaaggactgtgtgtgcagaacaatgtgatggcaggtgctatggaccctacgtcagtgactgctgccatcgagaatgtgccggaggctgctcaggaccaaaagacactgactgctttgcctgcatgaacttcaatgacagtggagcatgtgttactcagtgtccccaaacgttcgtctacaatccaaccacctttcaactggaacacaacttcaatgcaaagtacacatatggagcattctgtgttaagaaatgtccacataacttcgtggtagattccagttcttgtgtacgagcctgccctagttccaagatggaagtcgaagaaaatggaattaaaatgtgtaagccttgcactgatatttgccccaaagcatgtgatggaatcggcaccggatccttgatgtctgctcagactgtggattccagtaacattgacaaattcataaactgcaccaagatcaacgggaatctcatctttcttgtcactggcattcatggggacccttacaatgctattgacgccatagacccagagaaactgaatgtctttcggacagtcagagaaataacaggtttcctgaacatacagacttggcccccaaatatgacagatttcagtgttttctccaaccttgtaaccattggaggaagagtcctctacagtggtctgtcattgcttatcctcaaacaacaaggtatcacttcactacagttccagtctctgaaggaaatcagtgcgggcaatatctacatcacggacaacagcaacctgtgttattaccacaccatcaactggacaacactgttcagcaccgttaaccagaggatagtgatccgagacaacaggagggctgagaactgtactgctgaagggatggtgtgtaaccacctgtgttcaaatgatggttgttggggacctgggccagaccagtgtctgtcatgtcggcgcttcagcaggggaaagatctgtatagagtcctgcaacctttatgatggggagtttcgagagtttgaaaatggctccatctgtgttgagtgtgactcccagtgtgagaaaatggaagacggactcctcacatgccatggaccgggacctgacaactgtacaaagtgttctcattttaaagatggtccaaactgtgtagagaaatgtccagatgtcctacagggagcaaacagtttcatatttaagtacgcagatcaggatcgggagtgccacccttgccatccaaactgcacccaggggtgtaacggtcccactagtcatgactgcatttactacccatggacgggccattccactttaccacaacatgctagaactccactgattgcagccggagtcattggtgggctcttcatcctggtcatcatggctctgacatttgccgtttatgtcagaaggaagagcatcaaaaagaaacgcgctttgagaagattcctggagaccgagttagtcgagcccttaacccctagtggcacagcacccaatcaagctcaacttcgaattttgaaggaaacagagctaaagagggtaaaagtccttggctcgggagcatttggaaccgtttataaaggaatctgggtacctgaaggagaaactgtgaaaatccctgtggctattaagatcctcaatgagacaactggccccaaagccaatgtggagttcatggatgaggcactgattatggcaagtgtggatcacccacacctagtgcgtttactgggtgtgtgtttgagccccactatccagttggttactcagttgatgccacatggctgcctactggaatatgtccacgaacacaaggataacatcggatcacaactgctgttgaactggtgtgtccagattgctaagggaatgatgtatctggaggaaaggcggcttgttcatcgggatctggcagcccgcaatgtgttggtgaaatctccaaatcatgttaaaatcacagactttggactggcccggctcttggaaggagatgaaaaagaatacaatgctgacggtggcaagatgccaattaaatggatggctctggaatgtatacattataggaaattcacacatcaaagcgatgtttggagctacggtgtcactatatgggaactgatgacctttggaggaaagccctatgatggaattccaacgcgagaaatccctgatttattagagaagggagagcgtttgcctcaacctcccatctgcactattgacgtttacatcgtcatggtcaaatgttggatgatcgatgctgacagcagacctaaattcaaagaactggctgctgagttttcaaggatggctagagaccctcaaagatacctagtaattcagggggatgatcgcatgaagcttcccagtccaaacgacagcaaattcttccagaatctcttggatgaagaggatttggaagatatgatggacgctgaggaatatttggtcccccaggctttcaatatcccacctcctatctacacatccagaacaagaattgactccaataggagtgaaattggacacagccctcctcctgcctacacccccatgtcgggaartcagtttgtgtaccaggatgggggtttcgctacacaacaaggaatgcccatgycctacmsagccacaaccagcaccataccagaggctccagtcgcccagggtgcaacggctgagatgtttgatgactcctgctgtaatggtaccctgcgaaagccagtggtaccccacgtccaagaggacagtagcactcagaggtatagtgccgaccccacagtgttcgccccagaacggaacccwcgagcagaactggatgaagaaggctacatgactcccatgcatgacaagccaaaacaagaatatctgaatcctgtggaagagaacccttttgtgtcccggaggaagaatggagaccttcaagctttagataatccagagtatcacagcgcttccagcggtccccccaaggcagaggatgagtacgtgaatgagcccctttatctcaacaccttcaccaacgccttgggaaatgcagagtacatgaaaaacagcttactgtctgtgccagagaaagccaagaaagcatttgacaaccccgactactggaaccacagcctgccaccccggagcactcttcagcacccagactacctgcaggaatacagcacaaaatatttttataaacagaatggacggatccgccctattgtggcagagaatcctgagtacctctcagagttctcgctgaagccaggcactatgctgccccctccgccctacagacaccggaatactgtggtgtgagctcagctagagtgttttaggagcagaaacacacccgctccatttccccttctccctcctctttctctggcagtcttccttctaccccaaggccagtagt

SEQ ID NO: 2582 - DNA, 1876 bp, Rattus norvegicus
gaaagggagcggcggcgggaggcgcggagcgcgggcgccgggaagatgctgcagtccctggccggcagctcgtgcgtgcgcctggtggagcggcaccgctcggcctggtgcttcggcttcctggtgctgggctacctgctctacctggtgttcggcgccgtggtcttctcgtccgtggagctgccttatgaggacctgctgcgccaggagctgcgcaagctgaagcggcgcttcctggaggagcacgagtgcctgtcggagccccagctggagcagttcctgggccgcgtgctggaggccagcaattatggagtgtcggtgctcagcaacgcctcggggaattggaattgggacttcacctcggcgctcttcttcgccagcacggtgctctccaccacaggctatggccacacggtgcccttgtcagatgggggcaaggccttctgcatcatctactctgtcattggcatcccgttcaccctcctcttcctgacggccgtggtccagcgtgtcaccgtgcatgtcacccgcagaccggtcctctacttccacatacgctggggcttctccaagcaggtggtggccatcgtccatgccgttctgctgggattcgtcaccgtgtcctgcttcttcttcatcccggccgccgtgttctccgtgctggaggatgactggaacttcctcgaatctttttacttctgtttcatctccctgagcaccatcggcctgggggactacgttccaggggaaggctacaaccagaagttccgggagctgtacaagatcgggatcacgtgttacctgctcctgggactcatagccatgctggttgtcctggaaaccttctgtgagctccacgagctgaagaaattcaggaaaatgttctatgtgaagaaagacaaggatgaagaccaagttcacatcatggagcatgaccaactgtccttttcctccatcactgagcaggcggccggcctgaaggaggagcagaagcaaaacgagccttttgtggcctcccagtcaccaccctatgaggatggctctgcaaaccattgagcatgggtcaccagaccccggacatgaggcagagcctagactgtgttcatttttacgagaaagtcaaagctaagatgatgttattttaagaaatatctactgttaacaatattttaaaaacacggaactttggatcctgggggagtgggttttaatctctgggcaaatgaggtgtgcacyyataactcacaggcaatgkgatcacctgacatcatgcagctgtaactcacaggcgatgtcatcacctggcatcctgcacctgtaactyacaggkgatgtcatcgcctggcatcctgcacctgtaactcacaggkgatattatcacctggcatcctgcacctgtaactcacaggtgatgtcatcacctggcatcctgcacttgtaactcacaggktgatgtcatcgcctggcatcctgcacctgtaactccacagktgatgtcatcacctgggcattacacactggggawgaaatacttkraacatgttactgcasyggarakscmvktytwmwwyswaactkrskactctgggtttgcattccaatcattttgccgcagctagtagcaacatttatattaaaamaaaamaaaaaawctatagaggtggttttattaataagcttaagggtcccgctttgatgtcctatatcaaatgataattttgtgaaagctaaataactctatttttagggaagggcccaatcccgtggccctagacaaattaaatgttatattctggcctaggggagctatcacaatacctggcttcttaaccagataagaagttttttttcctttttggtcccttttaccaacacg

SEQ ID NO: 2583 - DNA, 3440 bp, Rattus norvegicus
cgctaagcctggggtggtggtaggaaggtccagctcctccggccgatggctgtccactttcctccccccatcacaggtcagctggccaggtgagaaccactggcaggtgggcccagctgtggtggagagtccagctgtgggggcaccgcaggtgcgaggtctcccggacgtggttccggagggcacgctgctcaatatggtgctgaagagaatgcaccgtccccggtgctgctcttaccagctagtgttcgagcaccggcgcccaagctgcatccagggacttcgctggacgccacttaccaacagtgagggctccctggacttcagagtgagcctggagcaggccaccacagagcatgtgcacaaggccgggaagctcctgtaccgtcatctcttggcaacgtaccctaccctcatccgagacagaaaataccatctgcgactacatcggcagtgctgctctggccgggagctagtggatgggatcttggctctgggtcttggggtccactcacggagccaagctgtgggcatctgccaggtgttgctggatgagggtgccctttgccatgtaaaacatgactggaccttccaggaccgagacgcccaattctacagattccctggaccggagccccagcctgcaggaactcatgacgtggaagaggagcttgttgaggcaatggccctactctcccagcgagggcctgatgccctactcactgttgcactccggaagtccccgggtcagcgtacagatgaagagctggacctcatcttcgaggagctcgtacatatcaaggcggtggctcacctttctaactcggtgaaacgggaactagctgctgttctgctctttgaaccacacagcaaggcaggaactgtgttgttcagccagggggacaagggtacctcatggtacattatctggaagggatctgtcaatgtggtgacccgtggcaaggggctggtgaccacgttgcacgagggagatgactttggacagctggctctggtgaacgacgcacctcgagcagccaccatcatccttcgagaaaataactgtcactttctgcgtgtggacaagcaggacttcaaccgcatcatcaaggatgtggaagcaaaaaccatgagactggaagaacacggcaaagtggtgttagttttggagagaacctctcagggtgctggcccttcccgccctccgaccccaggcaggaaccgatatacggtaatgtctggcaccccagagaaaatcctagaactcctgttggaggctatgagaccggattccagtgctcatgacccaacagagacattcctcagtgacttcctgctgacgcacagtgtcttcatgccctgcacacagctctttgccgccctcctgcaccacttccacgtggagccatcagagcctgccgggggcagcgagcaggaacgcagcacctacatctgcaacaagaggcagcagattctgcgtctggtcagccggtgggtggccctctacagccccatgctccgctcagatcccgtggccaccagcttcctccagaaactctcagacctggtgagcagagatacccgacttagcaacttgctgagggaacagtatccggagagacggcgacaccacaggttggagaatggctgtgggaatgtatctcctcagaccaaggcccggaatgcacctgtttggtttcctaaccatgaggaacccctcccaagcagcgctggggccatccgagtcggggacaaagtcccctatgatatctgcagacccgaccactcggtgctgaccctgcacctgccggtgacagcctccgtgagggaagtgatggcagctttggcccatgaggaccactggaccaaggggcaggtgctggtaaaggtcaattctgccggtgatgtcgttggcttgcagccagatgcccgcggtgtggccacatccctggggctcaatgagcggatctttgttgtcgacccacaggaagtgcacgagctgaccccacaccctgagcagctggggcccactctgggttcttctgagatgctggacctagtgagtgccaaggacctggcaggccagctcacagagcatgactggaacctcttcaacaggatccaccaggtggagctgatccactatgtactgggcccccagcacctgcgggacgtcaccactgcaaacctggagcgcttcatgcgacgcttcaacgagctgcagtactgggtggccaccgaactctgtctctgcccggttcctggcccccgggctcagctactccggaagttcatcaagctggcagcccacctcaaggagcagaagaatctcaactctttctttgcggtcatgtttggcctcagcaactcggccatcagccgcctggcccacacctgggagcgtctgccccataaagtacggaagctgtactcggccctggaaaggttgctggacccttcctggaaccaccgagtgtaccgattggctctcaccaagctctctcctcctgtcatccctttcatgcccctgctactcaaagacatgaccttcattcatgaagggaaccacacactggtagaaaacctcatcaactttgagaagatgcgaatgatggccagagccgtgcggatgctccaccactgccgaagccacagcaccgcgcctctatcaccactcagaagccgggtttcccacatccacgaggacagccaggcatcaagaatctccacatgttccgagcagtccctgagcacccggagtccagccagcacctgggcttatgtccagcagctgaaggtcattgacaaccagcgggaactgtcccgcctctcccgggaactggaaccatgaggaaggactggctggagcaggcacttctctcagagaaagccagagcctgtgcaaccaagaggtccagaggccagccacagytgggcagggctctccacagagcggactcaaggccctggagtgggcagtgtcgaggcagctgtcctctgtgatgactgtcagctgtgaagatctttgatgttcacggccaaggaaaagggkccattgaggccccagaggggtaggagagctgggaggtgcaggactctggttcagtagagagccctcccaccgggctttstgcatgtytgtatgtctgtacatgcagctgtgtgtcctkgawrmmarrmymwrwrmwtgtwttcacaggagccagcgagctcacatctgcatggtgtgtgtgtgtgtgtgtgtgtgtgtgtgtgtgtgtgtgtgtgagcactgggtggtgccttgcctgggagagggtggggagttctgctattctcaccacacatctgagataaacagctgggtgtgggcaaarmmrmwrmmwararwrrwggtccctgtggagttgtattgttcccataaattaacaaagrtaaaaaaaramarwmwwrrcggccgc

SEQ ID NO: 2584 - DNA, 986 bp, Rattus norvegicus
cggccgcgggcttggccagtggcgtgcgctcggcgccctcccagccccacgcgcgccgggcgggcgccatggaggagggctccagctcgccggtgtcccccgtggacagtctgggcaccagcgaggaagagctggagcggcagcccaagcgcttcggccggaagcggcgctacagcaagaaatcgagcgaagatggcagcccgaccccgggcaagcgcggcaagaagggcagcccgagcgcgcagtccttcgaggagctgcagagccagcgcatcctagccaacgtgcgcgagcgccagcgcacccagtcgctcaacgaggccttcgccgcgctgcgcaagatcatccccacgctcccctctgacaagcttagcamgakscagacgctcaagctggccgccaggtacatagacttcctctaccaggtcctgcaaagcgacgagatggacaataagatgaccagctgcagctacgtggctcacgagcgtctcagctacgccttctccgtgtggcgcatggagggcgcgtggtccatgtccgcctcmcactagcgccgcgccacccacctccggagccgcacgccaggrccyacstgcacatctcaggcgcaagaggaactggatgcgtccacggctgtgacttttggcacccggacaaccacggstcctcatgacccaacgcccaatkttcagaggggacaacagcggcaggggacagagagccaggttcacatccttctcagagatacccgtgggatggacaccggccttcctgtcagtgacttctgcgtccttatctgctcaccattggattttcctcctgagctttagtttgggggaaactttctggaaagttctagattcaggaatgcatttgtaaggatatatattggattgtatttccctctaagtgccttttttttaaaaaaaaatgtatatttttaaataaaacagaagtgcattcttgtaraaaaaaaaaaaaaaaaa

SEQ ID NO: 2585 - DNA, 1685 bp, Rattus norvegicus
actcttctcctgtgattctgcttttcgtgtctactgactttgattacaggaaaggctctgacgattcgtatcaaatgacgtcaatggccagcctgttttctttcactagtccagccgtgaagcgattgttgggctggaaacaaggtgatgaggaagagaaatgggcagaaaaggccgtggatgctttagtgaaaaagctgaagaagaagaagggcgccatggaggagttggagaaagccttgagcagcccaggacagccaagcaagtgtgtcactatccccaggtccttggacggccgtttgcaagtctctcacaggaaaggcttgccccacgttatatattgccgtgtttggcgctggccagatttgcagagccatcatgagctaaagcctttggatatttgtgagtttccttttggatcgaagcaaaaagaagtttgtatcaatccataccactataagagagtggagagtccagtcttacctccagtgttagtgcctcgtcacaacgaattcaatccccagcacagccttctggttcagttcaggaacctgagccacaatgagccgcacatgccccagaatgccacgtttcctgattccttccaccagcccaacagcactcctttccccttatctcctaacagcccctatcctccttcccctgctagcagcacatatcccaactcccctgcaagctccggaccaggaagtccatttcaactcccagctgatacccctccccctgcctatatgccacctgacgatcagatgggtcaggataactcccagcctatggacacaagcaacaacatgattcctcagatcatgcccagcatatctagcagagatgttcagcctgttgcctatgaagagcccaaacactggtgttcgattgtgtactatgaactgaacaaccgtgtcggggaagctttccatgcgtcttccaccagtgtgttagtagacgggtttacagaccctgccaataacaagagccgcttctgcttggggctgctgtccaacgttaatcgcaactcaaccatcgagaacaccaggcggcacatcgggaaaggtgtccatctatactacgttggtggggaggtgtatgccgagtgtcttagtgacagcagcatctttgttcagagtaggaactgcaactttcaccatggcttccaccccaccaccgtctgtaagattcccagcagctgcagcctcaaaatttttaacaatcaggagtttgctcagcttctggctcagtcagtcaaccatgggtttgaggctgtgtatgagctcacsargatgtgtaccattcgaatgagttttgtcaagggctggggagcagagtaccaccgacaggatgtaaccagtactccatgctggattgagattcacctccatgggcctctgcagtggctggataaagtcctgacccagatgggctctccgctgaaccccatttcttctgtttcatagtgcagaagtattcttttcaactatatttttagtggacttgttttaattttagaggaatttccagcacagatactgtgagctgacatggaaaaacagatattatggcttattttttctacgtaattgtgaccaacacatttgtattttatgatattacatttgtttgtattcgtgttcattgtgattaactttcaaaagtattgtaaacgacat

SEQ ID NO: 2586 - DNA, 2204 bp, Rattus norvegicus
ggcacgagaagcactccagctcccaaagccccagccgaggggtccctggccacatcatggaggggtactcagaggaagccagtctgctgcggcacctggagaaggttgccagtgaggaggaagaagtaccattggtagtttacttaaaggagaatgcagccctrctgacagmtaatggactgcacctgtcccagaaccgagagacccagcagtcctcaccaaaccctcctgaaacggaggaagtgcccagcccagctgcagatatcaaccagaacccctcctctcccaatgccacgctcaccacagcagcctstaacagccaccacaaccaacccaccgctgatgtcaatcaaaaccccccagccactatcacccctgtccaacaaaattcatctgagacacagtgttccccgaatggcacgcttgattccaaacccaacactccaagcgctgatgatgggcagcgcccggtgccagcagaggaagtgaggtccagcattctcmtgattgacwaggygkccgctccaccatctgccgccagccccttctctagagaagctactcccctctccagctctgggccaccagctgcagatctcatgtccagctctctgctcattggcatgcagcctagcaccctagtggcatcagcagaacaagaggtgtctggacatgcagctgtcaccacgcccactaaggtgtatagtgaagtacatctcacactagccaagcctgcatccgtggtcaacaggaccgccaggccatttgggatgcagtcgccagggactaccagccagatagagcaaagtcccatgatgggaagacgacattttggagagaaggcctgggctcccccagctagcagtatggcggataggagtccccagccacagaggcacataatggcccgcagtcccatggtagaaaggaggctggttgggcagagaagcccggttgtagagagacgccccttaggaaactttaccccaccccccacctatgcggagactttgtcaacagtccctgtggcttcccgggttaggtctcctccctcttattctactctgtatcccagctctgaccccaagcctccccatttgaagggccaggtagttcctgccaacaagacaggaattttggaagaatctatggcacgccgaggcagccggaaatcaatgttcacgttcgtggagaagcctaaggtgacgccgaatccagacttgctggacctcgtgcagacagctgatgagaagcggaggcagagagaccaaggggaggtgggcatggaagacgagccctttgccctgggagctgaggcctccaacttccagcaggagccaatagctcgggacaggtccggccctgcggcagctgaggagactgtccctgaatgggcttcctgcctcaagtcaccccgtatccaggctaagccgaagcccaaacccaaccagaatctctcagaggcctcagggaagggggctgagctctatgcccgccgccagtcacggatggagaaatacgtcatagagtcgtcaggccatgcggaattggctcgctgcccttcacctactatgtcattgccttcatcctggaagtacaccactaatgcccctgggggcttccgagtggcgtccttaagcccagcgcggactccgcctgcctctctctaccacggctatctgccagagaatggagtcctgcgcccagagcctaccaagcagcagccataccagatgaggccttcactctatgctctgtcgccggtcaaggaacctgccaagacctcatcacgtgccacctcgtcacgcgcttcgtcacgcactgtctcacctcgtgctgcctccccggccaagcctagctccctggacctggtgcccaacctgcccagagcaggcctcccaccgtctcctgcgcttcctcggccttcccgctcctccccaggcctctacaatgccccagtccaggacagcctccagcccactgccgtgagccccacctacagcagtgatatctcccccgtgtctccctccagggcgtggtctcctcgagccaagcaggcccccaggccttccttctccacccggaatgctgggatcgaggcccaggtgtggaaaccttccttctgcttcaagtaacacatcccagtgcctgtcttgtcccccctttcggagggccagagagaagatgtggcaggatctagctca

SEQ ID NO: 2587 - DNA, 1943 bp, Rattus norvegicus
gagctttctttctagattgaaacaatggaagaactgtccatggcaaacaccatgtttgccctcaatctccttaagcagatagaacaatcgaactctacccagaacatctttatttctccatggagcatctcatccacattggccatagttttccttggtgctcaggctaacactgaagagcaaatggccaaagtgctgaattttgacaaaattggcagctacgacctcactccaggaaacccagagaacttccatggctgtgattttgcacaacacatacagagggacaattatcctgttgctattttacaggcacaagcaagagacaaaatccattcagccttctcctctctcagctcgacaatcaacacaccacgcttgggagattatttactagaaagtgcaaacaagctgtttggagagaaatctgcaagattcaaagaagaatacatacaacgctgtaagaaatattattctacagaaccagaagcagtagacttccttgaatgtgccaatgaagctagaaaaaagattaattcttgggttaaaactcaaaccaaaggtgaaatcccaaacctgctacctgaaggttctgtagacgaagacaccaaaatggtcctggtgaatactatctacttcaaaggacggtggaaaactccatttcagaagagacttaatgggctttatcctttccgtgtgaacttgaatgaaagcaaacctgtccagatgatgtacctccgtgaaaagctgaacattggatacataaaggacctgaagactcagatcctagaacttccgtatattggaaacatcagtatgttcctgttgcttcctgatgagatcgaagattcatccaccggcttggagatgctggaaagggaaataaacttcgataacttcaacaagtggatcagcaaagagacactggatgaagatgatgttttggtctacattcccaagttcaaactggcacaaaactacgaactcaagcccattctgcaacgcatgggcatggaagatgccttcaacaagggcaaggccgacttctcgggaatgtctgagagcaatgacctttttctttctgaagtgttccatcaagccacagtagatgtgaacgaggagggcactgtggcagctggtgggactggggcagttatgacagggagaactggtcatggtggtccacagtttgtggctgatcatccctttcttttctttatcatgaacaacattacccgcaccatactatttgttggtagattctcctcaccctaaaaggggaagaccttgttttcacattagattttgaagcatgcgctgtaagcctcagaattgcttcttcaagtgccaaaagtcaaaatattttcctacacatttttatactgctatacactaaatacaaactgtacaacagtctgcactgcttacagtataactccgttaatgatttttttccaaacgatgtgtgtttagttcatccttattactgctttgtcattatagctttagtttttacagtgttatttattatttacataatggttgttttacagattgttgtcctctgtctatttaataagactataatactacagaagcagataatcagataattttctatttaaagaaaaacagccattcaatgtaattatgaaggaaaatatgatttttctatgatttctcatgataatcacccagaaaaatgtayttaacaaaagacaacaacatgttatatgtctatyattgtatatcttatgtacatatctgcaagtcatctataattagaaatacatcatacttccttactcaatgctatttgttgttctctgttaggtatgcacaacagaatacttagcaatccttgtttgttagtcatctttcaatcactgtaacaaaataccagagataataaagttcaaagatttaaaaaaaaaaaaaaaaaa

SEQ ID NO: 2588 - DNA, 2784 bp, Rattus norvegicus
ggttctcaggagcacaagcaggatccagtaaagctgaaaatgtcggatactccagcaactacctttgggggacggggagcaatcccacccaacaactctaatgcagcaggagtggacctcccgactgaggatctgcagggcctggtgcccaggggtgtcagcctgaaagattacttgaatgtcacagctgttcacctgttcaaggagagatgggacagcaacaagattgttcaccacacagacaaatttgacaacaataagttgattgtccgcagaggacagactttctacatccagattgacttcaatcgcccatatgaccccaggaaggatctcttcagagtggaatatgtcattggtcgctaccctcaggagaataagggcacctacatcccagtgccggtagtgacggagctccaaagcggaaagtggggggccaaggttatcatgaatgaggacaggtctgtgcggctttccgttcagtcttcccccgaatgcatcgtggggaaattccgcatgtatgttgccgtctggactccctatggcatcctgcgtactcagagagacccggaaacagacacatacattctcttcaatccttggtgcgaagaagacgctgtgtatctggatgatgagaaagaaagagaagagtacgtcctaaatgacatcggaggtatatttcatggggacttcaatgacatcaagagcagaagctggagctatggccagtttgaagatggcatcctggacgcttgcttgtttgtgatggacaaagctgagatggacctttctggcagagggaaccccatcaaagtcagccgagttggatcagcaatggtgaatgccaaggatgacgaaggtgtgctggttggatcatgggacaatgtctatgcctacggaatccctccatcagcctggacaggaagtgttgacattctactagaatacagaagctcagaaacaccagtccgatatggccagtgctgggttttggctggtgtctttaacacatttttaaggtgccttggaatccctgcgagagtcattaccaattactcttcagcccacgacaatgatgccaatttgcaaatggacatcttcctggaagaagatgggagtgtgagcttcaaactcaccaaggattcagtgtggaactaccactgctggaatgaagcatggatgacgaggcctgatctccctgttggatttggaggctggcaagctgtggacagcacaccccaagaaaacagcgatggcatgtaccgctgtggccctgcctctgttcaagccgttaagcacggccatgtctgcttccagtttgatgccccatttgttttgggagaggtcaacagtgatcttgtttacatcacagctaagaaagatggcacccacgtggtagagaacgtggatgccacccacatcgggaagctaattgtgaccaaagaaattggaggagatgggatgcaggatatcacggatacttacaaatttcaggaaggccaagaagaagagagactagcccttgaaactgccctgatgtatggagccaagaagaccctcaatactgaaggcatggtcaaatccagttctgatgtggacatgaactttgatgtggaaaatgctgtgctgggaaaagacttcagagtgactatcaccttccagaacaatagctccaatctgtacaccatcctggcctatctttccggcaacatsaccttctacactggggtatccaakwwwgagttcaagacagagtcctttgaagtgacgctggatcccttgtccttagagaaaaaggaggtgctgatcagagcaggcgagtatatgagctaccttctggaacagggcctcctgcacttcttcgtcactgcacgcatcaacgagaccaggswcgwssyggccragsagaagkccatagtgctgactatccccaaggtcaccatcaaggtccgaggcactgccatggttggctctgatatggttgtgactgttgagttcacaaatcctttgaaagaaacgctaaaaaatgtctggcttcacttggaaggtcctggagtgatgagacccaagaggaagatgttccgtgaaatccggcccaacgccactgtgcagtgggaagaagtctgtcagccttgggtctctggtcatcggaagctgawtgccagcatgaccagtgactccctgagacatgtgtatggagagctggacctgcagattcgaagacgacctactgtataaatgcccaggaggctcgaatgggctggggcacatggcctattgcagtcttggttatggccattctaacgcaaaacatagctagctcttgctttaatttgggtgtgaagactaagacagattccagcatagagatgctatgtatttcatagacacgcctttccaaacaggctattggacaaggggagttagatttgagttgttccacctccaaagggtctgagcattagcttaattaagctataattaagccttcatagctcataagatgaaagccatcatttatcactgcaaatgggtacagctcacagatcagaggtcttgcccatgagcaggggggatgtgcccaatacctggcctcaattaagaattctgattcccactcagtcttttaggggtaacatactccccaaaggaaagggtgtccacaatcagatcctaaaaattctattcccctttcttggaatcaggttgaaccctccgtattaaaatatttttttccaggaattaagcccaacatcatttttcttcctggcaaagcctttctct

SEQ ID NO: 2589 - DNA, 2572 bp, Rattus norvegicus
ggcacgagcgttccctcccctgagataccggcgccatgtccagcgctcggacccccctacccacgctgaacgaaagggacacggagcagcccaccttgggacaccttgattccaagcccagcagtaagtccaacatgctgcggggccgcaactcagccacctctgctgacgagcagccccatattggcaactacagactccttaagaccattggcaagggtaactttgccaaagtgaagttggcccggcacatcctgacggggaaagaggtagctgtgaagatcattgacaagactcagctgaattcctccagcctgcagaaactcttccgagaagtaagaataatgaaggttttgaatcatcccaacatagttaagttatttgaagtgatcgagactgagaagacgctctaccttgtcatggagtatgccagtggcggagaggtatttgattacctagtggcccatggcaggatgaaagaaaaagaagctcgagccaaatttcgccagatagtgtctgctgtgcagtactgtcaccagaagtttattgttcatagagatctaaaggcagaaaacctgctcctggatgctgatatgaacatcaagattgcagactttggctttagtaacgaattcacctttgggaacaagctggatactttctgtggtagtcctccttatgctgccccagaactcttccagggcaaaaagtatgacggtcctgaagtggatgtctggagcctgggcgtcatcctctatacactggtcagcgggtccctgccttttgatggacagaacctcaaggagctacgggaaagggtactgagggggaaataccgtattccattctacatgtccacggactgtgaaaatctgcttaagaaatttctcatacttaatcctagtaagagaggcactttggagcaaattatgaaagatcggtggatgaatgtgggccatgaggatgacgagctaaagccttacgtggagccactccctgactacaaggatccccggcggacagagttgatggtgtcaatgggttacacacgggaagagatccaggactcgctggtaggccagaggtacaacgaagtgatggctacctatctgctccttggctacaagagctctgagctggaaggtgacaccatcactttaaagccccggccttcagctgatctaaccaacagcagtgccccatctccatcccacaaagttcagcgcagcgtctctgccaaccccaagcagcggcgctccagtgaccaggccgtccccgccattcccacctcgaattcctactctaagaagactcagagtaacaacgcagaaaataagcggcctgaggaagagacagggcggaaagccagcagcaccgccaaagtgcctgccagccctctgcctggcctggacaggaagaagaccactcctaccccctccacaaacagcgtcctctccaccagcacaaacagaagcaggaactccccacttttggacagggccagccttggccaggcctccatccagaatggtaaagacagcacagccccccagcgtgtccctgtcgcctccccctccgcccacaacatcagcagcagtagtggagccccagaccgaactaatttcccacggggtgtgtccagtcgaagcaccttccatgctgggcagctccgacaggtgcgggaccagcagaatctgcccttcggtgtgaccccagcctcaccctctggccatagccagggccggcggggggcctctggcagcatcttcagcaagttcacctccaagtttgtccgcaggaacctgaatgaacctgaaagcaaagaccgagtggagacgctcagacctcacgtggtaggcggtggaggcactgacaaggaaaaggaagaatttcgggaggccaagcctcgttccctgcgcttcacttggagcatgaagaccacgagctctatggagcccaatgagatgatgcgggagatccgcaaggtgctggacgccaacagctgccaaagcgagctgcacgagcgatacatgctgctgtgcgtgcaygrsrcacccggccacgagaactttgtgcagtgggagatggaggtgtgcaaactgccccggctgtctctcaacggtgttcggtttaagcggatatcgggcacttccatggccttcaaaaacattgcctccaaaatagccaatgagctgaagctttaacaggctgtcaggaggggcggcagaggcccaccagtggacttggctgcttgggccaaacctgcatcccctgggagaaaaactgcaggatgaattggtgtgtctcccctgctggcacttgtccccttccaggcccttctcagttttttcttccatgtttgtgggggatgggaagtggtggttcctcctcccacattcacccctgcccagaagtctctcccttcccctctacccccgtacaggaggcaaaggaaggggaaggggttgggggggcagggctccccctcggtactgcggttgcacagagtatttcgcctaaaccaagaaaatttttattrccaaaaagaaaaaaaraaaaaaaaactcgtgcc

SEQ ID NO: 2590 - DNA, 1491 bp, Rattus norvegicus
gcaggtagcgagaggagcagtccctgggcccccgttgctgattggcccgtggcacaggcagcagcccggcaggcacgctcctggtccgggcagagcagataaagcgtgccaggggacacacgattagcagctcagaagtccctctgggtctcaccactgcacagaggccgaggaccccctccgagcttctttgctgcctccagacgcaatttactccaggcgagggcgcctgcagctcagcaaaacttcgaagcgagcagaggggttcagctatccaccgctgcttgactctgaccacccgcagctctctgttcttttgagcccggagtaactaggtaacatttaggaacctccaaagggtagaagaggggagtgggtgggcgtactctagtcccgcgtggagtgacctctaagtcagagactgtcacaccccccttccattttttcccaacctcaggatggcgcctcatcccttggatgcgcccaccatccaagtgtcccaagagacccagcaaccctttcccggagcctcggaccacgaagtgctcagttccaattccaccccacctagccccactctcgtaccgagggactgctccgaagcagaagcaggtgactgccgagggacatcgaggaagctccgtgcgcggcgcggagggcgcaacaggcccaagagcgagttggcactgagcaagcagcgacgaagccggcgcaagaaggccaacgaccgggagcgcaaccgcatgcacaaccttaactccgcgctggatgcgctgcgcggtgtcctgcccaccttcccggatgacgccaaacttacaaagatcgagaccctgcgcttcgcccacaactacatttgggcactgactcagacgctgcgcatagcggaccacagcttctacggccccgagccccctgtgccctgtggggagctgggaagcccgggagggggctccagcggcgactggggctctatctactccccagtttcccaagctggtagcctgagccccacagcctcattggaggagttccctggcctgcaggtgcccagctccccatcctgtctgctcccgggcaccctggtgttctcagacttcttgtgaagggcccaaacaggccctgggcggtgggcgctggcagaaagggagggagtcagagctgtctgaaatggaaggtagtggaggcactcgagcatctcgccccttctggctttcattagtcaggtccctgatttaaccaggattcgcacagttccttgctgctgtgcgtgcacaaaggacattgcaggctgatctcctcttaaccctcctcagtgtggccacctcaaactcccgctccaagcagaggagagccgtagcactaaatagttgggagactcccatacttcctggtgactccgccctctttcaaatctgcgggcctccaaccaccgctttctccagagtgacctaatccagtgttgcgtcttacctcactggctcttgttccata

SEQ ID NO: 2591 - DNA, 759 bp, Rattus norvegicus
cggcagccccactgcctcgccatgggaaatgaggccagttaccattctgagatsggsasmcasywsgrccacgacgwgmtymrwwggcygrgsagaagcttcaagaagatggacttggacaaatcgggctccctgagcgtagacgagttcatgtcgctgcctgagctgcagcagaatccactggtgggccgagtgatcgacatctttgacacagacggcaacggggaagtggacttccgcgagttcatcgtgggcacctcccagttcagcgtcaagggtgacgaagagcagaagctaaggttcgccttcagaatctatgacatggataatgatggcttcatctccaacggggagctcttccaggtgcttaagatgatggtgggaaacaacctcaaggactggcagctgcagcagctggtggacaaaagcatcttggtcctggataaggatggtgatggccggatatcctttgaagagttccgtgatgtggtcagaaccatggagatccacaagaaattggtcgtgtttgtagatcacggtcaagaagactaaaagcttaaaaataagagaggtgtacatctgtgcctttctttctcgaggttgtgtacatgggagaagacaacaattctcatggagtattaggaactcctttcgtttacctgtggcattcagactttttaacaaacagattgttaacttcctgttgtaacaactagcagaaatatatttatctttgcckagcaaaaaaaaaaaaaaaaa

SEQ ID NO: 2592 - DNA, 3071 bp, Rattus norvegicus
cacgtgggtagggcggggcgggccggggcggaggggtggggccgggggcggagctgctggagggggctgctccgcgccggggccgttggctccagacaaataaacatggagtccatcttccacgagaaacaagaaggctccctttgcgctcagcattgcttgaataacctcttacaaggagagtattttagccccgtggagctgtcctcaattgcacaccagctggatgaagaggagaggctgcggatggcggaaggaggggtcacgagcgaagactaccgcacatttttacagcagccttctggaaatatggacgacagcggctttttctctattcaagttataagcaatgccttgaaagtttggggtttagaactaatcctattcaacagtccagagtaccagaggctcagaatcgatcctataaatgaaagatcctttatatgcaattataaagaacactggtttacagttagaaaattaggaaaacagtggtttaacttgaattctttgttgactggtccagagctaatatcagatacatacctcgcactgttcttggctcagttacagcaagaaggttattctatatttgttgttaagggtgatctgccagattgtgaagctgaccaacttttacagatgatcaaggtccaacagatgcatcgaccaaaacttattggagaagaactcgcacatctgaaagagcagagcgccctcaaagcagatctggagcgagtcttagaggcggctgacgggccgggaatgtttgatgatgatgaggacgatttacagagggctctggccatgagtcgccaggaaatcgacatggaggacgaagaagccgatctccgcagggccattcagctcagtatgcaaggtagttccagaggtatgtgtgaagatagtccgcagacatcaagcacagatctttcttcagaagagctgcggaagaggagagaagcctactttgaaaagcaacagcatcagcaacaggaagcagaccgacctggatacctttcatacccatgtgaaagacccaccacaagttcaggaggactccggagcaaccaagcaggcaatgctatgagtgaagaggacgtgcttcgggcaactgtgactgtgtctttagaaactgctaaagacagtttgaaagcagaaagaaaaaaatagtccctttaaaaatcattttgccaccatgctttgtaccattgtttgtgtgatcacagtgtaaggtccactttggcagcagtgtgttcaccggaaggcagcagacactgcatggtttgtaagcagaaagggcagaagcgtcctaggactaaagaaccacgagatgctagccaaagaggcagtcagcaatgaaagaaacaacgtagttttctaaatgtccctccttgtttttcaaatgtgcaatatctgactgaaattatggaattttccttggctcttttggaccaactcgttagctcttgccacagaacttgatcctgtagagttccgtcttctctctgcattggagctggcttggcttgtttgggcttttcttcatttcacaccaaccttttgtgaaatatcgtttgtatgtcttgctatggaaagatcagtctgtcttttcgtgtatgtgtcaggcacatggatgcttcctggtgttattttctctggttttggttattttcctgcaagtctaacatggtgatctgttggttttaaagccttttttagtgggatcattatttaactctggtgcattcctctactctaaagtcagccctgttcttctaaacgagctgaggttttttgtgagcacgtgctttctcgatgccctgcgaaggatttcagctgtgtcctggctgacttatttcctttcttttccagttgagaaaggagagacagaggatacaaatatatttccttctacttaacgttctccatgaatgtaccacaggagaacccgcccttcagtgctggtggtgggttcgttccagtgtttcttctgtgtcaagagcttagtgttctgtatatgattaagtcctggaaaataggtgcctgcttcactttttaatttttaaaaataaatttttttttattttagtagaaaataggctgctaggatgatggtctaggatgtgaaagtaatttactaatgaaaatatatttaaatatactgtggttgacccttgctaccatgttaaaattgttaagaattacagaagtcacaatacttaaaggatctgtttgtaaatacgaaagtccttagttttgataaacattaagtgagatgcacatctagtcttgctgggtcaatgctttggtatgatttgggtggaaattaactattgtgtgtttgtcctgggtgtcatagatcctgatactgttttcccctccctaccctttttgaagcccctttgaatgttaacttgtacataggtaaaatcaagaagaaattttagccaacagcttaataaggtgaagcatggtatattgctctactgatgtgtgttctgcacacgcttttatcagggaaacgttttgatgtaggatttattgctatctaactgaaaatgatacaaatatttttatttatgattatgaaatagctttctcttggataggatggattgttttgtttggctgtgcatgggattgaacccagagcctcgtgtgtgctaggtaagcgctctacctctgagctagatccccagatccaaaacatgtgtttctcttttttgttttgtttttttttcttagccattttgtgccaattacagtttctctttttgaaatttgcctcatgaaaaattagacagtcctattttcaaatctatgaagttttcttttagtaattgcaaaggttcagaattatgcagctgtaggctgttgggttaggcctttgcttacagtggatttttacactgaagtatgcagctaccccaagtgtgctggtcacatgtcgagcattgaccctttcctttaccctttgaaaaaccacattacactttccgcacactcagattgatgtgctgcctgacagccatttcagttttaacttcagagtttataaaacgttcatg

SEQ ID NO: 2593 - DNA, 1840 bp, Rattus norvegicus
ggagccggagtcgccgccgcccgagcgcagccgagcgcacgccgagcccaatcgccaccgccatggccaccacggtgacctgcacccgtttcacggacgagtaccagctatacgaggatattggcaagggggctttctctgtggtccgacgctgtgtcaagctctgcaccggccatgagtatgcagctaagatcattaacaccaagaagctgtcagctagagatcaccagaagctggagagggaggctcggatctgccgcctgctgaagcattccaacattgtacgcctccatgacagcatctctgaagagggcttccactacctggtcttcgacctggtcactggtggggagctctttgaagacattgtggcgagagagtactacagtgaggctgacgccagtcactgtatccagcagatcctggaggctgttctccattgtcaccaaatgggggtcgtccacagagacctcaagcctgaaaacctgctcctggccagcaaatgcaaaggggccgcagtgaaactggcagacttcggcckggccatcgaggttcagggagaccagcaggcatggtttggatttgcgggaacaccaggctacctgtctcccgaagttcttcggaaggaggcctatggcaaaccagtggatatctgggcatgtggggtgatcctgtatatcctgctggtgggatacccacctttctgggatgaggaccagcacaagctgtaccagcagatcaaggctggggcctatgacttcccatcccccgagtgggacaccgttacccctgaagccaaaaacctcatcaaccagatgttgaccatcaaccccgccaagcgcatcacggcccacgaggccctgaagcacccatgggtctgccaacgatccacggtggcctccatgatgcacagacaggagactgtggaatgtctgaagaagttcaatgcaaggaggaagctcaagggagccatcctcaccactatgctggccacacggaatttctcagtgggcagacagaccaccgctccggccacaatgtccaccgcggcctccggcaccaccatggggctggtggaacaagccaagagtttactcaacaagaaagcagacggagtcaagccccagacaaacagcaccaaaaacagctcggccatcaccagccccaaaggatccctccctcctgccgccctggagcctcaaaccaccgttatccataacccagtggacggcattaaggaatcttccgacagcaccaacacaaccatagaggacgaagatgccaaagcccggaagcaggaaatcatcaagaccacagagcagctcatcgaggccgtcaacaacggcgactttgaggcctatgcgaaaatctgtgacccaggcctgacctcatttgagcctgaagctctgggcaacctggtcgaagggatggatttccacagattctactttgagaacctgctggccaagaacagcaagccgatccacaccactatcctgaacccgcacgtgcacgtcatcggcgaggatgcagcctgcatcgcttacatccgcctcacacagtacatcgacggccagggcagaccccgcaccagccagtccgaagagacccgtgtgtggcaccgccccgacggcaagtggcagaatgtccatttccactgctcgggcgctccagtggccccactgcagtgagagctgcgcctggtttcaccggacagagttggtgtttggagcccagccgccctcgggcgcacggcctgcctgtcgcatgtttgtgtctgcctcgtcccctcccctggtgcctgtgtctgcagaaaaacaagaccagatgtgatttgttt

SEQ ID NO: 2594 - DNA, 1931 bp, Rattus norvegicus
cccaggtcacaaaatatgacaggctgcaaccttccccacgttcaatgatttctgcagtaagccaaaggactgccaataatttcgctaagaatgtctgctagttcgattactggggattttcaagactttcttaagcatggacttccagctattgcacctgcaccaggatcagagactccacactcccccaaacttgaggaaaaacaccgggaaaaacgtgctgggcttccggaccgacaccgacggcccattcccgcccgcagccgccttgtcatgctgcccaaagtggagacggaagcctcaggactggtccgatcgcatggggaacaggggcagatgccggaaaacatgcaagtgtctcaatttaaaatggtgaattactcctatgatgaagatctggaagagctgtgtcctgtgtgtggcgataaagtatctgggtatcattacggtctcctcacctgtgaaagctgcaagggtttctttaagcgaacagtccaaaaccagaaaaggtacacgtgcatagagaaccagaactgccaaattgacaagacacagagaaaacgatgtccttactgtcggttcaaaaaatgtatcgacgttggaatgaagctggaggccgtgagagctgaccgcatgcgaggaggcagaaataagttcgggccaatgtacaagagagacagggccttgaaacagcagaagaaagccctcattcgagccaatggacttaagctggaagccatgtctcaggtgatccaagcgatgccctcagacctgacctctgcaattcagaacattcattctgcctccaaaggcctacctctgagccatgtagccttgcctccgacagactatgacagaagtccctttgtcacttctcccattagcatgacaatgccacctcatggcagtctgcatggttaccaaccatatggtcactttcctaatcgggccatcaagtctgagtacccasacccctactccagctcgccagagtcaatgatgggctactcctacatggatggttaccagacaagctccccggcaagcatccctcatctgatattggaacttttgaagtgtgaacccgatgagcctcaagttcaagcgaaaatcatggcttacctacagcaagagcagaataaccggaacaggcaggaaaagctgagcgcgtttgggctcttgtgcaaaatggcggaccagaccctgttctccattgttgagtgggccaggagtagtatcttcttcagggaactgaaggttgatgaccaaatgaagctgcttcagaactgctggagtgagctcttgatcctggatcacatttaccggcaagtagcacatgggaaggaagggacaatcttcctggttaccggagaacacgtggactactccagcatcatctcaaacacagaagtcgcattcaacaacctcctgagcctcgcccaggagctcgtggtgagactccgttcccttcagtttgatcagcgggagtttgtgtgtctgaagttcctggtgctgttcagctcagatgtcaagaatcttgagaacttccagctggtggaaggcgtccaagagcaggtcaatgctgccctgctggactacacactttgcaactacccacaacaaactgagaaatttggacaactgcttcttcgactaccagaaatccgggcaatcagcaaacaggcagaagactacctgtactacaagcacgtgaatggggatgtgccctacaataaccttctcattgaaatgctgcacgccaaaagagcctaagttcccacccctagacccttgctctagggacagagactggagggagaagaagaggaggaggaggaaggaagacaaacaatgctctgaactgctccaagcaatgctaattacaaacttggtttaaagacactgaattttgaaagcataataatgaatag

SEQ ID NO: 2595 - DNA, 3713 bp, Rattus norvegicus
gttccgagacccggaggagagctggacgggagcgagatgttactttgagtgaatgacctccttggagaccattcttctgctccccttcttaccagccaggaggcagaagattccacaggtccaggaaagacataattcccttgagcttccagaaagtaccttatgcctgggggatcaggccaactatggctctcgtattcagtgtcctgctgctactggggctgtgtggaaagatggcttcaggaggtcagcctgcattcgataacactcccggggctttgaattatgaattgcctaccacagaatatgagacccaagacaccttcaatgctgggattattgaccctctctaccaaatggtgcacatcttcctcaacgtggtccagccgaatgacttccctcaagatttggtcaaaaaactcatacagaagaggtttgacatctcggttgataccaaggaggtcgccatctatgaaattggagttcttatctgcgtcatcctgggcctgctgttcattttcctcatgcccctggtgggcttcttcttttgtatgtgccgttgctgtaacaaatgcggcggagaaatgcaccagcggcagaagcagaacgagtcgtgccggaggaagtgcttagccatctccctcttgctgatttgtctgctcatgagtcttggcatcgcgtttggctttgtggccaaccagcagacaaggacycggatccaaaggacccagaagctggcagagagcaattacagagacttgcgggctctcctgactgaagccccaaagcaaatcgactatattctggggcaatacaacacaaccaagaacaaggcattctcagacctggacagtatcgattccgtgctgggaggcagaataaagggccaactaaaacccaaagttactcctgttctcgaagagattaaggccatggcaacagccattagacagaccaaggatgccctgcagaacatgagcagcagtctgaaaagtctacgtgacgcaagcacccagctcagtaccaacctgacgtctgtgagaaacagcatcgagaattcactcaacagcaacgactgtgcttcagacccagccagcaagatctgtgatagcctcagaccacagctgagcaatctggggagcaaccacaacggaagtcagctcccatcagtggacagggaactcaacaccgttaatgatgtcgacagaaccgatctggagagcctcgtcaaaagggggtatatgtcgattgatgaaatacccaatatgatacaaaaccaaactggggatgtcatcaaagatgtcaaaaagaccttggattctgttagctycaaggttaagaacatgagccaaagtattcctgtcgaggaggtgctgcttcagttctcccactaccttaatgcagcamcaggtacatccacgaagtcgctgcccagagtggaagaatatgactcatactggtggctgggtggcttaatagtctgcttcctgctgaccctcattgtgactttcttttacctgggcttgctgtgtggtgtgtttggctatgacaagcgtgccaccccaaccagaagaggctgcgtgtccaacactggaggcatcttcctcatggctggggttggattcagcttccttttttgctggatattgatgatccttgtggttcttacttttgttgttggtgcaaatgtggaaaagttgctctgtgaaccttatgaaaacaagaaattactacaggttttggatactccctacctgctcaacgatcaatggcaattctatctctctggcatactactcaaaaacccagacattaacatgacctttgagcaagtctacagggattgcaaaagaggtcgaggagtgtatgccacttttcagcttgagaatgtcttcaacatcactgagaatttcaacattgagaggctttctgaagacatagtgaaggagttggaaagctgaatgtgaacattgacagcatcgaactgttggacaaaacaggaaggaagagcctcgaggactttgcacaatctgggatagatagaatcaattattccatgtacttacaggaggctgagaaaccccctaccaaagtggacctgctgacatttgcctcttttctggaaacagaagcaaaccagttgcctgacggaaatctgaaacaggccttcttaatggatgcacagaacattcgagccatccaccagcagcacgtccctcctgtgcagcagtcactgaattcattaaaacaaagtgtctgggcccttaagcaaacaagcagcaagttgccggaggaagtgaagaaggtccttgcctctttggattctgctcagcatttcctcaccagtaacctctcctccatcgttattggagaaacaaagaagtttgggagaacaataataggctactttgaacattatctgcaatgggtcttgtacgccatcacagagaagatgacatcctgcaaacccatgattacagcaatggactctgctgttaatggcattctgtgtagctatgttgctgaccctctgaatctgttctggttcggcatagggaaagccaccatgctcttacttccggctgtaatcatcgctatcaagttggccaagtactatcgcaggatggattcagaggatgtatatgatgatgttgagactgtacccatgaaaaatttggaaaacggtagtaatggttatcataaagatcatttatatggtgttcacaatcctgttatgacaagcccgkcwcgakrctgacaactgamgtggaaattgcttgaacatcaagatagctaactcggaaagaatcccagactttggatagtttctgagtcttctagaattttccaagaagaaaccatggtggcaaatgcggagactcgggcgggcactgggaacacagcacagtggtcttagggaggtgctttgtcaggaatgaacagtcatggttataatccacgtttccattgctactcacgaatgattctcttctgttttgtttttaaaatttttttacactgaatttctatttagacactaaaacatataggggtgcttgtcacccggatacatttatctgtgasccagctattcggatgtcatggctgggtacctaacttacttccatatgtgaagtgtgctaaactcaaaccagtttamaraaamrawrwawwwtgtgtatagtaaattgtatattcacccttttmccacggccggttttykrmacaratgaatactctagattttwmtycsrmrygaggwtwckgwygrggtggggttgacttagtgatgctgtagaagggaatccgcatgcactaaaaagtgtgtctgcctaaaagtgtgtacagcaggcacaaccttccttgtggatttccgtctgctcactgcagatctgcctgtggtttagaaatagaattcaagagccatcaaggagtgaccagcttgacaccactgccaaattcagaatgaggaaccttgagagaaggaactgtcgctcagccagaagcagatgaagccactggtcctggttcacagtttagtgtcatgctctggtttataaggatgggcattacgttcggtgttatctggttatctgcgagattctaaaccgaggtgcaagagctcctatcctgattctgagatttgaaataaagcatgawtgamcaawraaaaaaaaaaaaaaacaatcgcggccgcaagcttattcccttta

SEQ ID NO: 2596 - DNA, 3837 bp, Rattus norvegicus
  misc_feature (3829)..(3831): n is a, c, g, or t
atttatagccctcaagagcctttatgttctcccatgtttcccatagaaataagcccagacatgaagatctgaacatttttataagaagatgcagtttgcttggagtacacatacacaatgaatagttacataaaatcctgagttttcgaaaagaagacgagtatggtacatttgtgcagcagaaaagccgtggtgaaacaggttcttgtatttgtgataacagaagaaagccatgtctccaattgactcattcttaattatatagacttatagtgaattggccttaaacactggcggactttataaaatgcagtctaagattatgtacaaaatactgtctgttgaccagatgtattaaaatgatagacacagaattaaggtggtgatatatgagatttatataacaatgagagagttaatagtttatgctttaagcactgtttatttataacaaatcctgtagtcttagtagagctgtgctgacttccctggaagttatgcagttgatgtaacccactttagagagtcctgtgataatgatgagctgtatgacattagttctgaggaaatacaggtgcagacttcatcaggtcctttcctttgctaggaaaagaagtagttcagacatcagatttaagtccttaaagggaaaagagcccgcatatagacagtcagcagatgccctataactaataacgagaagtaggttttgggtctatagctctcgggttacccagaagagttcatgtgatttcccagagagtcccgagcagtgtcttgtcatatgagacagatttgtcctgtgagtgtgaactcatcagttcagtcagaagaccgtgaatgtgtccagttagctgtctgctgtctcattcccgtctatggtagagatcttgtgtgaagtagtgaggagcttcatatggaagtttaagctgccagaaatactattactattcctgcacagaactctcccagagacttgtccagggtgccttaccccagtaaactaacggtataatggagaatagcacagtcttgtcaaattggacaaaagaaaacaaagaaaaaatgaagtatgacttttcatgtgaactctacagaatgtccacatactcagcttttcccaggggagttcctgtctcagagaggagtctggctcgtgctggcttttactacacaggtgtcaatgataaggtcaagtgcttctgctgtggcctgatgctggacaactggaaacaaggggacagtcccactgagaagcacagacagttctatcccagctgcagctttgtgcagactttgctttcaggcggtctgcagtctgcagctaagarcacgtctcctgcgaaaagtagatttgcacactcgctacctctggaacaaggtggcattcattccagcctgccctcaaaccctctcaattctagagcagtggaagacttctcgttgaggatgaatccctgcagctatgccatgagtacagaagargccaggtttctttcttacagtatgtggccattaagttttctgtccccagcagarctggscaaagcagssttytactacacagggcctggagacagggtgscctgttttgcctgtggtgggaaactgagcaactgggaaccgaacgatgatcytctgtcagagcacaggagacattttccccactgtccatttctggaaaatacttcagaaacgcagaggtttagtgtatccaatctcagtatgcagacacactctgctcggatgagkacgtttctgtactggccatcgagtgttcttgttcagcctgagcagcttgcaagtgctggattttattatgtggatcacaatgatgatgtcaaatgcttttgttgtgatggtggcttgagatgttgggaacccggagatgacccytggatagaacatgccaaatggtttccaaggtgtgagttcttgatacggatgaagggtcaggagtttgttgatgagattcaagctagatatcctcatcttcttgagcagctgttgtccacttcagacacctcagaagaagaaaatgctgaccctccagttgtgcatctgggccctggagagaattgggaagatgcagtgatgatgaacacacctgtggttaaagcagccttggatatgggcttcagtaggagcctggtgagacagacggttcagcgacagatcctggccactggtgagaactacaggacggtcagtgatattgtctcagcacttctgaatgctgaagatgagagaagagaagaggagaaggagagacagagtgaagagacggcatcaggtgacttgtcattgattcggaagaatagaatggccctcttccaacagttgacgtgtgtcattcctatcctggatgatcttcttgaggccagtgtacttacaaaggaggaacatgatattatcagacagaaaacacagatacccttacaagcaagagagctcatcgacaccatcttagtcaagggaaatgctgcagccagcgtcttcaaaaactctctgaaggaagtcgactctacgctatatgaacacttatttgtggagaagacgatgaagtatattcccacagaagacgtttcaggcttgtcattggaagaacagctgcggagattacaagaagaaagaacgtgtaaagtgtgtatggacagagaggtctctatcgttttcattccttgtggtcatctggtagtctgccgggaatgtgccccttccctgagaaagtgccccatctgcagggggacaattaaagggactgtgcgtacgtttctctcatgaatgaaggaagctgtctgaacaaagaattactgattcagctacgcagcagaacatatgtgctctactctttcaagattaataatcttgctttatgatcatattgyayrwkkaatcttagtctgtwgcaggggagggtytatgctgatgagctacaggagtgtgtatgtcccagagcasgagtggggatgcttgctgtgtgtcctcaggacttcctggatttkggatttctgaaaactttggattcaggtgatgtggaactcagaaatcctgaaaccagtggtcctggcactcagcagttagccctgtgcttcttggtgcttttcccttctggaaaataagtatttttctgttactagtaaataatattttctgtttatgagaaacatactgaagttttttttttaaaggcttgcatcatcmtagtgtgtgtaggaatgtatgcaggcaraacactgtgtmcataataaatcttttaaaawtghwwmwaawrwrawwmawraraawwmctttagataagctgtgtgtgctttgtaaataaaatattgggagaagactccatcagtatcaaaaaattgagataaatctacatgagaaattatatgaaacagtttacttgcctgttgagtgtaggtgttygttaggattggagggttaggaaccagacagtgataagtactttctttgtggaccaaaccatatatgacctgtcctagatataagtctggtaggcttgtgaaggtttgaagtgtctttaaaaaggcagagggcgtggtggtgtacagcacagacaggtggatctttgggctggtttgtttttgacaacaaatttaaacatgtcttggaagarggaatctgagaaagctataagatggtcatagcctgctggagcgtttcttattatgatgagtagaagctgcccatcggtgtgtccctggcatggctgacgccaaagcgcacaccaggcagcgagccccgccgtcacggcgcgcgccccaggggaaagtcgcgagcgcggcgcaccggctctcgacaccccgcaaaaagnnngggggc

SEQ ID NO: 2597 - DNA, 6076 bp, Rattus norvegicus
cccgggaagaccagtccacatcccccttggccttggtgcaccaggccccgctgggatgagaagctgccggagactggaccagcttcaggccggcctctgcctgctcctggcctccctacaactcgtgtcctggacgctggctgcagaacctgtggatgtattggaaaccttgggtgtgcatagggacaaggctggggtgaccaaagggcctggcttctgcccccagaggattccacagggtgaccgagcattcagggtgggcaagtccagccttctcagcgtccccacatggcagctctttccagatggacattttcctgagaacttttctgtgctgctcactctgcgggcccagccagccaatcaatctgtccttctgtctatatatgacgagaatggtgtccggcagatggggctggcactggggccagctctgggtctccttggtgactctttcaggtctcttcccaagcagatcaaccttatggatggcaggtggcaccgggtggcggtcagcatcagcggtgacaaggtgaccctggtggttgactgtgaacctcagccccccatgtttggtcaggggcctcgggttataagtacagctggactcacggtgatgggaacccaggagctcggggaggagtcttttgagggagacatccaggagctgctgttaattccagaccctcaggctgctctccaggcctgtgagctctacctgcctgactgtgagacccccgattccacaaccacaggggtcactaaagaagaaccagaaacacctgcccctcgtcgacgaaagrrmaaarraaaraaaaaagatcggggtcgcaagggcaagggaagaaagaaaaacaagacctcaagactgagtccaaccccaggtgcccctgagaaccagacctccctccacacccctgagacagagaagccatcgccccatctgcctccaactcccacacctttggccatcaccaccactgtcacgatgggaggaaatgccacagttttgcaggggttggactccagtactgaaactgagcagatgactccagagatggacgctactgaagagagtgaaggaggtggcccgaccatgggccccgagttccgggcagcagaacagtctttacagactgagttccagatctttcctggtgctggagaaaagggagcgaaaggagaacctgcgactatagagcagggacagcagtttgagggacctgcaggagctccaggaccccggggaatatctggtccttcaggccctcctgggcctccgggcttccctggggaccgtggcctaccgggccctgctggcctcccaggaatcccaggcattgatggcgtccggggcctgccaggcacagtgatcatgatgccgttccattttgcaagcggctcgatgaaaggacccccagtctcctttcaacaggcacaggcccaggcagtactgcaacaggctcagctgtccatgaaagggccccctggtccagtagggctcactgggcgcccaggccctgtgggcctccctggatatccaggtctgaaaggtgaattgggagaagcagggcctcagggcccccgaggattgcagggccctcctgggcctcctggacgggaaggcaagacaggccgagctggagcagatggggctcggggtcttccgggagacacaggacctaagggtgaccggggctttgatggcctgcctggactgcctggtgagaagggccagaggggtgactttggacctgtaggacaacctggtcccccaggagaagatggtataaagggcctgcagggacctccaggccccactggccaggctggagagccgggtccccgaggtctgattggccccagaggcccccctggtcctttaggacgcccgggtgtgacagggagtgatggcgcaccgggtgccaaaggcaacgtgggtcctcccggagaaccaggccccccaggacagcaaggaaaccacggctcccagggaatcccaggcccccaggggcccattggcacacccggggagaagggtcctcctggaaaccccggaattccaggtgtcccaggatctgagggccccccgggccacccaggccatgagggtcccaccggagaaaagggggctcagggcccaccagggtcagcaggccctcagggctatcctggacctcgtggtgtgaagggtacctctggtaaccggggcctccaaggagagaaaggagaaaggggagaggatggttttccaggcttcaagggtgatgagggaccaaaaggcgaccggggaaacccgggactcccaggtcccagaggagaggatggcccagaaggacaaaaggggcctgagggactgcctggtgatgagggccccccaggagcagcaggggagaagggcaagcttggggtgccaggtctcccaggttatccaggacgcccaggacctaagggatctattggatttcctgggccccttggaccactgggggagaaaggcaagcggggcaaagcagggcagccaggggaggaaggagaacgtggcacaccgggcaccagaggagacagaggacagccaggggccacaggccagcctggccctaagggagatgtgggccagaacgggtctcctggggcccccggagaaaagggtctacccggtctgcaaggtcccccaggattccctgggccaaaaggccccccaggtcctcaggggaaagatgggatacccggacaccctggacaaagaggagaattgggcttccaaggtcagacaggcccccctggaccagctggtgtccttggtcctcagggaaaggtaggggatgtgggtcctctaggcgagagaggccccccagggcctcctggaccgcctggtgaaccaggtctgccaggcatagaaggcagagaaggggccaagggtgagctaggacccctggggtccctcggaaaggaggggccacctgggcccatgggcttccctggcccacaaggagcccccggagacccaggacccattggtttgaagggtgacaagggtcccccgggccctcttggggcaaatggctccccaggtgagcgtggtcctgtgggcccctctggaggcattgggcttcctggccagagtggtgggcaaggccctattggtcctgctggtgagaaggggtccccgggagaacggggtgtgcctggtcctactggcaaagatggtattccagggcccccgggacttcaggggccccctggagctgcagggccttctggtgaggaaggagacaagggggaagtagggatgcctggacacaagggaagcaaaggggataaaggagatgcgggcccacctggaccaacaggaataaggggtccagcgggccatccaggccccccgggtgctgatggtgctcagggtcgccggggaccccctggcctctttgggcagaaaggtgatgatggagtccgaggctttgtaggtgtaattggtcctccaggcctgcaggggctgccgggccctcctggggagaaaggcgaggttggagacgtgggatccatgggtccccacggagctccaggccctcggggtccccctgggcccagtggatcagcgggttccccagggctgcctggaggagtagggcagcctggcgctgtgggcgagaagggtgagccagggaatgctggagacgctggacccccaggagttccaggcatccctgggcccaaaggtgaaattggtgaaaagggggattcgggtccatcaggggctgctggtcctccaggcaaaaagggacctcctggagaggacggagctaaggggaacatgggtcccacaggactccctggagatctaggacccccaggagaccctggagttccgggtacggatggcatcccaggggagaaggggaatgctggtgatattgggggaccggggccacctggagcttcaggggaacctggtgcccgtgggctccctggcaagaggggttcccctggccgcatgggtccagaaggaaaagagggagagaaaggcgccaagggagatgctggtcccgatggccccccaggcagaacaggccccattggggctcgggggccccctggacgggttgggcctgatggtcttccagggatccctggtcctgtgggtgaaccaggtctcctgggacctcctgggctaatcggccctccagggcccctgggcccacctggcctccctggcctgaagggagacgctggcctcaagggggaaaagggccacattgggctaatcggcctcattggtcccccaggggaggctggggaaaaaggcgatcaggggttgccaggtgtgcagggccctccaggccttcagggagaccctggtcttcctggtcctgttggctccttaggtcaccctgggcccccaggtgtggtgggccctctgggacagaagggttccaaggggtccccgggatctcttggacctcgtggagaccctggaccagcaggtcctcctggtcccccgggttcccctgctgaggtgcacggcctgcgtaggcgccgctctgtgttggacaccccagaaggtggcctggaggaagtgatggcctcactcaattcactgagcttggagctggagcagttgcagcgacccccaggcacagccgagagcccaggcctcatatgccacgagcttcatcgaaaccacccacacctgccggacggagagtactggattgaccccaatcagggctgtgcacgggacgccttcaaggtcttctgcaacttcactgccggaggtgagacctgtctctacccagacaagaagtttgagacggtgaaactggcctcctggtcccgagaaaagcctggaggttggtacagcaccttccgccgagggaagaagttctcctatgtggatgctgacggctccccggtgaatgtggtccagttgaccttcctgaagttgttgagcgctgcagcccatcagaggttcacttacacctgccagaactccgcagcatggctggacgaagcttcaggtgaccacaggcactctatccgcttccaagggaccaactgggaagagttgtccttcaaccagacaacagcagccaccatcaaggtcccccatgatsrckrssgggtccggaagggacaggcgaagaccctctttgaattcagctcttctgtgggctttctgcctctgtgggatgtggccgccgttgactttggccagacgaaccagaagtttgggtttgaacttggctccgtctgctttagcagctgagttttggaggtgggaaggaagctaaagggagccccatgtggggctatgtggtgctgaggctttgaggccattctatttatcaccagggaactctagatccagggttgtgtgactctgagtattcttcctcccttgtaggggtgagggtggagagcccagcttcttctgtctattcatcccgggtggcacacccaactgtccgctggcttcttccctccacccaaccattcattgcctactcccacccccagacctccatacagtatagacttataactcagagctgatgaagccccacccctgcctctcsacccctccaccaggccctttggtgctatccctttccatagttaagcactggatacctcctggtccctggctaggacctttccctctcattcctattctttctttgagtaaagaggtaaacaagatcaacgtgggacgccctcccctgagacgcgccttccttctgcttccttgacccagctccgcacaattccctctccccactytgccccattcccatgtccccaagccttctggggaccaagatgttgggcacaaatcaggatcctaaatggtgctgccctgctcgtaactgggaactgtatgaaatggggaatgaatggtttgtggtctatttaatctgcttccttctgaaggaagtctgggatatgatgagagattccagaagggtctctactctccctcccctgtgctgccctcctcccaaggacacagggcaaaactgccatctcaagaataaaccaaggaactgtgmwmwwmaaaaaaaaaaaaaaaaaa

SEQ ID NO: 2598 - DNA, 2462 bp, Rattus norvegicus
ttttttttctcttttctttcttttctttttcttttcttttttcacctctccgctttctcatctgctcctgcttttcctctgctcgattcccccagttcgatcccagctatcttcacaagggtgccctcttccctctgaacccatcgccgggcgtaagtgtcaggaggcggcggactcggagattgcctctggagcaggcgatgcgcgccgctgctctgcgcgctgcccgggggaggctggcgggagctggagagctggccagggctgaatggagggaaggggtgcctcgcgtccatggggtctgcttctctcctgaaaggaggctggaccggcgaagtggtctccccgttccccacgcacaatgctaaatggatttacctagtggattcccggtggatggctgtcatgtagaagtgaagaccctccgggaggagctttaaacaatttccaggctccccaaccccggcacacactctcacccgaaactcttggggagtatctctggagaacctggaaccctgcaaacctgggagcagccaccctctctgcgcttgctgttcttcggggctgcctttctggacaagtcccccctgccagctgcattcacctcggctatgtttcggattgtttggggtgtagggtacggcagactccagcacctcgagaagactgtccgaaagagggagaggatgggtgccctggcgcggtgaggcggccagccccgcagcccaccgcgagcagccggattcccggcttcctcgcctcttcttgtgccccaaactttgtctcccgcggcggctgccccttggcgggcgccccgccatgtaccagaggatgctccggtgcggtgccgagctgggatcgcccggaggcggcagtagtggcggcgcaggggggcgcctggccctgctctggatagtcccgctcaccctcagcggcctcctaggagtggcctggggggcatccagtttgggagcgcaccacatccaccatttccatggcagcagcaagcatcattcagtgcctattgcaatctacaggtcaccagcatccttgcgaggcggacacgctgggacgacgtatatctttagcaaaggtggtggacaaattacatataagtggcctcctaatgaccgacccagtacacgagcagacaggctggccatcgggtttagcactgttcagaaggaagcagtgttggtgcgtgtggacagttcctcaggcctgggtgactaccttgagctgcacatacaccaaggaaaaattggagttaaatttaatgttgggacagatgacatcgccattgaggagtccaatgcaatcattaatgatggaaaataccatgtagtgcgtttcacgaggagtggtggcaatgccacgttacaggtggacagctggccagtcatcgaacgataccctgcaggaaacaatgataacgagcgcctsrcgakkgctagacagcgaattccatatcgacttggtcgagtagttgatgaatggctactcgacaaagggcgtcagctcacaatcttcawtagccaagcaaccataataattggcgggaaagagcagggccagcccttccagggccagctctctgggctttactacaatggcttgaaagttctgaatatggcggcagagaacgatgccaacatcgccatagtgggaaatgtgaggctgktcggtgaagtgcyttcctctatgacaactgagtckacagccactgccatgcagtccgagatgtccacstcaatcatggagaccaccacaaccstggctaccagcacagctcgacgaggaaagccccccacaaaggagcctatcagccagaccacggatgatatccttgtggcctcggcagagtgtcccagcgacgatgaggacattgacccctgtgagccgagctcaggtgggttagccaaccccacccgagtgggcggccgcgaaccatacccaggctcggcagaggtgatccgggagtctagcagtaccactggcatggtggtggggattgtcgcagcagcagctctgtgcatcctcatcctcctctatgccatgtacaagtacagaaaccgggatgaaggctcatatcacgtggatgagagtcgaaactacatcagtaactcagcacagtccaatggggctgtggtcaaggagaagcagcccagcagtgcgaaaagcgccaacaaaaacaagaagaacaaggataaggagtattatgtctgatctcaagattcgaaaaggacacttgtatagaaatagtcttcattttatctgagacataatataaacttatttactttcctttttatgaagcacatacaaaagaagacagggaatgcgatcaggagggaaaactctttttaaaaaaaaacaaacaagtatgtcatgctcttgtttctcaaaaaaaaaacatacacaaaaaaaaggaaagagagaaaaaaaaaaaaaaggaattc

SEQ ID NO: 2599 - DNA, 2217 bp, Rattus norvegicus
tccgagaatttagagtctcccagaatggataacaagctggatgtcttcaggagggagttagtggatgttcaagggatccccctcttttggagcatcgctgagcaatggtcgcaagtagagtcatttgaagcccgacctgatgacattttgatctccacctatcccaaatctggaacaacttggatcagtgaaatactggacttgatctataacaatggggatgcagagaagtgtaagcgggatgcaatatacagacgagtacccttcatggagctcatcattcctggaataacaaatggtgttgaaatgctggataacatgcagtctcctcgactggtgaagacacatctgcctgttcagctgcttccttcctcattttggagaaacgactgcaagatgatttatgtggcacggaatgccaaagatgtggctgtttcttactattatttccaccaaatggcaaaaatgcacccagagcctggcacctgggaagagttcctcgagaaattcatggctgggcaagtgagctttggtccctggtatgatcatgtgaagggctggtgggagaaaagaaaagaataccggattctttattgtttttatgaagatatgaaagaagatccaaagtgtgaaattcaaaaagtattaaagtttctagaaaaagacataccagaagaagttgtaaataaaatcctctaccatagctccttcagtgtaatgaaggcgaaccctagtgcaaattacaccactatgatgaaagaggagatggaccagtctgtgtctcctttcatgaggaagggcatttcaggygattggaagaatcagttcactgtagcccagtatgagaaatttgaagaagattatgtcaagaaaatggaagagtcaacactcaagtttrratcagagatcttagggagtgtttgctcctcagtctcctttggcaggcactaaatttagaggaaaagcacattcatggttcagtgaaagaaaatgttgtatattatttttctgtatttactaaaattcatggtcttcaaatatacaaaaataaagtaagaatgttctcctaawwawmwwmmwwamaaaarrwwmawawwmtagtttcctttttactttctaattatcaaaataatacaattttaagaggcttttaaacacagtgcgtttttagtttcagtcactaatagcttcctgtctaaatatggtctaggttacccctagaggaagattacatttcattaactctaattcaatgtcatctgtggttattttacattttaaaatattacgctttaatgttgccaaattatttaaattttttatgcccagaatctcccactcccccttcagccctaatttagaaatattaatttttaacaaaagaatgaatagtacccattttatacgatttaaatcaaggaaattaaatacctaattattttgtccttcatttcatatactgaagctactgtaaaactattacagagaaatgctctgtaggtttgttctagatattctaaattactgattctattgttcgctatctyaygwssattgacgcatcagcktctgagaggaaaactccatacaataaataaatttctgtaatctctcttcttggttggctagtcatcacatcaggctcattggccctctggaattaaccattcctgagtagacaaatacttgacaggttttgaaccagcaggagacatgaattcaaaacactttagatctattttcaggaacgaatgcttagtgaaaagtgaaaacttaaaggtaaatgagtaaagtactgtaasatttaatttgatatataasattcgtgacatgagaaaactgatgaagcagccgccmgwtaatgctacataatttaatgaagaacctgwwgggacatgagagaagtcataaaacagcagtgcaactcagactatattactatagaacaactagtctttaatgtatcaatatcatggtgttgatagaatgttattggtttaccagaggttactactggagaaaatgtgttaaagttacaatttcttaccatttcatgctgattatctcaagttttagaattatgttaaaagaatgtcttactaattttacattttctaaagtcaaagtaattttaactaaacaacagtaatgactgtctaaaataaaccttccttaaataaagtcaacaatgaattaatttaaaaaaaaaaaaaaaaa

SEQ ID NO: 2600 - DNA, 3055 bp, Rattus norvegicus
gacaaaggggcaaagacagatgtcagaagggagccccttcctctgtcaggcgggcagtccacatgatgctttaactagatgcttatcactaaaggcgtggctgtcctgtttcggtgtctctctatgaccatctgccattctcttgtcctaaccctaaagtcaacccgggcaggtgacgacttctatgcttacgacgaggatggcacacgcttctcacctgacatcacgcccatcatcctggctgcgcattgccataaatacgaggtggtgcacctgctgctactcaagggtgcacgcatcgagcggccacacgactacttctgtcgctgcgccgactgtgctgagaagcaaaggcttgatgccttcagccactcaaggtctaggatcaatgcctacaagggactggccagcccagcatacttgtcgctgtccagcgaggaccctgtgctcacagcgctggaactcagcaatgagctggccaagctggccaacatagagaaggagttcaagaatgactacaggaagctctccatgcagtgcaaagacttcgtagtaggtgtgctggacctgtgccgggactcagaagaggtggaagccattctgaatggagatctggaatcggtggaacccctggagagacacgggcacaaggcgtcgctgagtcgggtcaaacttgccattaaatatgaagtcaaaaagtttgtggctcaccccaactgccaacagcagcttttgaccatctggtacgagaacctctcgggccttcgggagcagaccatctctatcaagtgtctggtcgtgttggtcgtggccttgggccttccattcctcgccatcggctactggattgcaccttgtaccaggctggggaaaattcttcgaagccccttcatgaagttcgtggctcacgctgcctccttcatcatcttcctgggtctgcttgtgttcaacgcctcacaccggtttgaaggcatcaccacgctgcccaacatcaccgttattgactaccccaagcaaatcttcagggtgaagaccacccagttcacatggacagaaatgctaattatggtctgggttctcgggatgatgtggtctgagtgcaaggagctgtggctggaggggccccgggagtacatcgtgcagctgtggaacgtgcttgacttcgggatgctctccatcttcattgctgccttcaccgccaggttcctagcatttctgcaagccaccaaagcgcaccagtatgtggacagccacgtgcaggagagcgacctgagcgaagtcacactcccaccgaaggttcagtatttcacctatgctagagataaatggcttccttctgaccctcagatcatatcggaaggcctctatgccatagctgtggtgctcagcttctcccggatcgcgtacattctccctgcaaacgagagctttgggcccttgcagatctctctggggaggactgtcgaagacatattccagttcatggttctcttcatcatggtgttcctggctttcatgattggcatgttcatactttactcctactaccttggggccaaagtaaaccctgcttttaccacggttgaagaaagtttcaagactttgttttggtccatatttggactctctgaagtgacttctgttgtgctcaaatatgaccacaaattcatagagaacattggctatgtcctttatggaatatacaatgtaactatggtggtcgttctgctcaacatgctgattgctatgattaacagctcataccaagaaatcgaggatgacagtgatgtagagtggaagtttgctcgttccaaactctggctatcctacttcgatgatggaaaaacattacctccacccttcagtctggtccctagtccaaaatcgtttgtttatttcatcatgaggatcactaacttttccaaatgcaggaggagaagacttcagaaggatctggaactgggcatgggtaactcaaagtccaggttaaacctcttcactcagtctaactcgagagtttttgaatcacacagttttaacagcattctcaatcagccaacacgatatcagcagataatgaaaagactcataaaacggtatgttttgaaagcacaagtagacaaagaaaatgatgaggtgaacgaaggtgaactgaaagaaatcaagcasgakatctccagccttcrttacgaacttttggaagataagagccaagcgacggaggaactggccatcttgattcataaactcagtgagaaactgaaccccagtgcgctgaggtgtgaatgagggagccacatgcagtgagactttgactctggcacaaatgtgggcaataatattcctaagtatgaaatacttgaaaaaccgttgtgtaaaaactctagtgttaataccttcaccatgcggagctttaaaattaacctagtgggccacaattcccattacgtgaaaatgatcccaaggttggcctcagcactccaagcagtgacatgctgttgtacttagaagcccagtattaatgtcactgatttttttttttttttgtcatttttgtctttatgtcacctgttggcctccaagagttccttgggggacagggaccacatcaatctcatctttatgtctccaacatttagtgcagtgcctgatacacagtaggtgcwtggtaaatgttgaacccagctggcctggacagccagtagcatccaagaacacgaaagmccattgctatgtagcmtaccttctcatccgaacgcttgaagcgatttttttaaaaatagaaactgaaggtgttttacgaccagccatgacgtgtggagatctttctcagacctttagacatgcactgacagttctagggcttttgaaatgccaggtttaacagtgaaatgagctcattggaaagatacatatttaatttcatagggttgttcaaaaacaatcattaaagatttttctaaaatatatgcttgtgtcctttctctttgtatctgtggtgtcatgatgtaaatttggtcaataaagaatgcttttctaaaaaaaaaaaaaaaaa

SEQ ID NO: 2601 - DNA, 1732 bp, Rattus norvegicus
caaggtcggccaggactggaggtgtggtgtcccgcgtccggctgggacttccacgcagccgggccggcgggactacaggatgggctgaggcggcggcgattctcaggacgagaagccaggcttgaaaatggagatgtatgaaacccttggaaaagtaggagagggaagttatggaacggtcatgaaatgcaagcataaggatactgggcggatagtggccattaagatattctatgagaaaccagaaaaatctgtcaacaaaattgcaacgagagaaataaagtttctaaagcaatttcgtcatgaaaacctggtcaatctgattgaagtttttagacaaaaaaagaaaatccatttggtatttgagtttattgaccacacggtcttagatgagttacagcattattgtcacggattagagagtaagcgactaagaaagtacctgttccagatcctccgagcgatcgagtatctgcacaacaacaacattatccaccgagatataaagcctgagaatattttagtctcccagtcaggaattacaaagctctgcgattttgggtttgcgcggacactagcagctcctggagacgtttacacagactacgtggccacccgctggtacagagctccagagctggtgttgaaagacaccacctatggaaaaccagtggatatctgggctttgggctgtatgatcattgaaatggccactggcaatccctaccttcctagcagttccgatttggatttgctccacaagattgttttaaaagtaggcaacctgaccccgcacctgcacaatattttttccaagagtcccatctttgctggggtggttcttcctcaagttcaacatcccaaaaacgcaagaaagaaatacccaaagctcaacggattgctggcagatatagttcatgywtgttwasamattrakmctgctgagaggatatcatscasmratcttwwrmawmamrawwamwwwactagagatggatttattgagaaatttataccagagctgagagctaagttattacaggaagcaaaggttaattcatttataaagccaaaagagaattttaaggaaaatgaacctgtgagagatgagaaaaaaccagtttttaccaaccctctgctctatggaaacccaacactttatggaaaggaagtggacagagacaaaagggccaaggagctcaaagtcagagtcattaaggccaaagggggaaaaggagacgtcccagacctgaagaagacagagagtgaaggtgaacaccgccagcagggcacagctgaggacacacaccccacatcactggacaggaagccttctgtctcggaactaacaaaccctgtccatcccagtgcgaattctgacactgtcaaagaagacccacactctgggggctgtatgataatgccacctatcaacctgacaagcagtaatttgttggccgcaaatcccagttcaaacctctcccaccccaattcacggtgagctagagtgagaggaggcttgattaagtaaggcgtcctcctgtgcggcgcattgcagacacacgtgtacgatgtcagtatggaccggacctgaaaaggatcttctcaagttcgagtcaagtagtaacagggcattccctgaggagttcttgggaatgttatgtgagaagtgtttttcttagctatataggtattaaacttttttttgagacaaattgccacagagcccagg

SEQ ID NO: 2602 - DNA, 8019 bp, Rattus norvegicus
gaattcacaggaacggcatggttgtgtgcacagctgagtcagcatagttggaggagggccatgagagcccacagtactagctcaggtgctaccaacagcgtatggatgctagtataggataagtaaggttttttagggatatggttcttgataggctgacaatgctctagtgggtgcgcccccctcccctgtgtatgtatagaacacaaactggacctggtggttacttaaaaacatgagggcataaaatggagagggtgatgtggaagatctaggaagagtttgaagggaggactggggagtaaatatgattgaaatgcactgtatacatgtatgaaattctcaaagaataaatattattggatactataaataaataaattaaaattttattttaaaaaatagcgtattttaagaaaatgtattttaaaacattgtaatttaagaaaatattatatttgaagaaaatatcttccataggcatgcccagaggcccatctcatagctgatcctggattctgtgacattgacaattcgcattcatcatcacacctcttaactctgttggttcctttcgtttgtagaaattttaatatgttataatcttatttgtcaactttgctggtatcctgagttattgacattctagttgggaaatcattacatatgcattatttcatttctggactatttccctcatgtttttatgcacttttaaggttttaaatcctaaatttaagatcaaattgatttggaatagttttttttgtagaagagacttgattctctcctgtacatgcagataacttgtgtctccagcacaatgtgttaaaaagaatgccctttttccaagagatgtttttgctacattttttgagaatcagatgccaaaagtgtatttatttctggatcctctcctcagttccactagattgttttgtgtaagtggagtcttttttgcttctgtatgaacttcaacatttcagttttaccctatgcagtatgatgctgacttatggatttgttatataatcctttgttacgtagagatacaatcccgctatatgtatttatttgtgccttttattgggaagggatacttaattaaaggaaaggaaattcctatgcctatggatgtggtcatgtatctttttcatttgattctatttatgagcagcattatgcttacccccatacttatattgaatcattcacacattcttgaattgaaaccaatttgatcaaggtaaatgacattttttatgtgcttttaaatttgattcaaaagtattttgttgagaaataatgcatttatactcaggtgcctgaacaagttacttttttggttacattttttcaggttttactcacagacatattagctgcataaaataacttttggtatgatggcttctcttataaatttttttgaggaccattggtattatttccgttttaaagtgtagcaggggatctatctagtctttggtttgtttgttttttctttgttggaagacttcttcctacagcttcaatatcactactcattactgatatattagtcatgttttagtgcaatttttatagcatctatgcccagagatgtgttcatgtctagattttccaatatatttacatataattcaatagaatattttctaatgaggctatgaatttcagtggtatctggcattagttttaaaaactaattatctattttgaatttttaaatattaatcttttgtatggtcttcacgtttctctttttgctgcactatttttctgcactacttattatttctcttgtacttatttgggatttcgttttggccttgtccttttttttaaatttatttattcattttacatcccaattatagaccctatccctcctctcctcccagtcccaccctcacacattctttccaccattacccctccccttgaagggaaacccccccttgggtactatcccactctttcccatctagtcacagcagtactaagcaccttctctcccactgaggcccaaccaggtagtccagttagggcaaggggatccaaagtcaggcaacagagtcagaggcagccaatggtgtagttgttagcagacccatatgaaaaccaagctgcacatctgcgaatgtgtaggaggcctatgtctagcccctacacctccccatcccaggactctggctggtattagagatcctcctgactacagatttcctttctctggcctagccctctcctgatcctgatcctggttgttcccttcctcaccttctctcctacccagcttcctctctcgatccacctctgacaactactttatttccttttctgagatagagtcatttatacttccttgggacctcctcattatccagtttcattgcgtctgtggactgtagcatgggtatcctgtactgtatagctaatatccacttatcagtgagtgcatactatgtatgtccttttgtgtctgggtcacctcactcagggtgatattttctagttccatccatttgcctgaaaatttcatgatgtctttgtttttaatagctgaatagtactccattacgtagattaccatactttttttatccattcattcttcagtggagggacatctaggttgtttacagtttctggctatgaacatagtagttgagtaagtgacattgtttttgtaggtatctatttaaaatctctctgtactactgatataacatgttgatgtaaacatccctcttatgaaggaaggccatttcctacttcatttgagagaataattttataatttcttttgacttcttaaataactcaccaatcagaaactactgtgttgtctaactacagcatgtataaataggttattcagtttcttttggtattgatttctattttaattccattgagattataaatgattataatacagtattatatttaattcagtaataatttctttgtagattaatacccgctgtgtgttagtaatgtgctgatgatcaaatatgtattctgcagctgttaaatgaaatatgaggtagcagttgtggtgtagagaccaaactcagttccttgcacatgctatacaaacattcttctactttttaacccttagttctatcttctttatgaattcttttgttccatgtgtagtgcacttttttgtgtcttaaagtctatttttgctagttatgataaagttacttctgctccattacatttgcttggattctcatttcctatgttttctctcagtctgtttctttgcagagattattttcttgtaaacatcatgcttctggaatgtgtcttaacccaagtagattctctgtgtcttttaattggagaatttggattattatacttgggtgataactataattttattcttcttccaaatattttgagtttgtttcttcctctcattttataagttttatgttttgttttactgttaacgtctgattctcttccttttctcatttgcatgtctacttttctaatgggaaattgtctttcaggagcagtcatgttcgtgcctatatttcttctccttctgagcagaggtttccttaagcacctccctaatgcatctagtggtcgtgcattcacacaatttatgtttttctgagatcacatttctcccttttttctggagaatgatcttgctgtgtatactaatctcagtggaaagttgctttcgttgaggatttgaaatgcatcatcagtgcccttctgtccttgaaagtttcacatgaagtgacaatcaactgtctggacctggtgggtggattcaaaggagggtggaggaggaaggcacaggacatgatgctcctgggaagatgctcttgagagctgggtgggagccaggagagccctagttaggcacaagggcaatcaggcggcagcagccaccaggaagacctgtctgtctctaaagcccactggagaacttcccagctctgaaaagcctcagatccgatccagtagtagtcctggaaagtgttggaggttggttgcgtcccacaccctatatgaccccccacggacggaaataccccatattttaaaagaactgaggaaaaaaaggtgtttacttgtcaggtggaggcgaacggatgctcagctgcactacatccaccatgcccggaatgatctgcaagaactcagacctggagtttgactcgctgaaaccctgcttctacccggaagacgatgacatctactttggtggtcgcaactcgacgcctccaggggaggacatctggaagaagtttgaactgttgcccaccccgcggctgtcacctggccgtgccttggcagaggacagcctggagccggcgaactgggccacggagatgctgctgcctgaggccgacctatggagtaacccggccgaggaggaggatattttcggcctgaaaggactcagcggctcctccagcaacccggtcgtccttcaggactgcatgtggagcggcttctcctctcgggaaaagccagagactgtggtgagcgagaagctgccaggaggctgtgggtccctggccgtcggcgcaggcaccttggtcccgggagcggccgccgccacctccgctggccacgcgcgcagtgggacagcaggtgtggggcgtaggaaagccgcctggctcacagagctctcccacctggactcggagtgtgtggactctgctgtgatcttcccagcgaataaacgcgagtctatgcctgtagccaccatccctgccagtgctggcgcagcgataagccttggtgaccaccaggggctcagcagctccctagaggacttcttgagcaactcaggttatgtggaggaaggcggagaggaaatctatgtggtcatgctgggggagacacagttctccaagactgtcaccaagctccccaccgcggcgcattcggagaacgcagcgctgactcccgagtgcgcgcagtctggcgagctgatcctcaagcgcagcgacctcattcaggaacaacacaactatgcggcgccaccgttgccctacgcggaagacgcgcggcctctcaagaagcccaggagccaggatcctctagggcccctcaaatgcgttctcaggccaaaggctccgagattgagatcccggagcaactcagacttggaggacatcgagcgccgccgcaaccacaacaggatggagcgtcaacgccgtgacattatgcgctccagcttcctgaacctcagggaccttgtgcctgagctggtgcacaatgagaaggccgccaaggtggtcatcctgaaaaaagccaccgagtacatccacactttgcagactgatgagtccaagctcctggtggaaagggagaaactgtatgaaagaaaacagcagctgctagagaaaatcaaacaatctgctgtgtgctaagtgtttcttaaatggacagtcactgttactttgcacatgttaacttgaaaaaaaaagctattgtgttgacattaagaatgttggtttaccttcatattaattggtcccttgttaagtttgaatctgaataggggcaagtcatggagttctagtggggttttggaaagcccaggaattggacgctgctatgtgacttctttcctctaacctcagtgaatgctccatcccgatcatgaatgttgggaatttttacagggtattgaagtcaggtttactccaagtttccagagccactcctttttacaagagtgattagatttcaatagatgctatgaaaagggtttggcatttgaggtctatggggaaacatttctgtaaattctgttgactcacccaccaagaagtcggtactatactggaagttcactcataagtatcgtaaacacctcaatgtttgaggagcatgttttgtatacagatatattttcaatttctgttatgtactgtactaattcttacactgtctgtgaacttttgtatgatgctaatacgtgattaaatttgatacttatgttttcatatgaaaatgaatagtgaaaggttttagtagattatttataacttttcgaattaagaaaaaattttaaagaaattatatatgcgtgtgtatatataggttccttttttctaagtttgtatcttcctgttagtgtatttgttcatatgtgatgtgtagaaatgattgaactcaaagttgtgtgtttaatttctacaaaatatgtgcactttgaaatacctcatgttcttatgaaataaatgcttttttttttaaagaaactttctggtgggagaaatgcttttcagcttttgcagtttgctcttaaatgtgatttggcactttttgtttcatagagtttatatttaatagtaataacaataataacagatttaatattatttctctaagctgcatctttggtcatttagtcataatatgccatgagaggttctctcggtcagatccattggaaagaaacacttcttgtacttgcatattcatggatttcctaaaatgtgggaacattgttgctgctctttcattgagtatggttaatatacccttcacctttagcttaacctttcttagatttgccagtgatccagatatttaagttcagatattctttactcaattcagcctaatcaggtagcaaataatggattcattatatcatatacatacacaaagtacaatgttaatatttatattcatcaacctcttttggtcctttcttattctatatttctatcttttcaaatctgggttctatataggacagaaaacatgatgtttatctgaagtgacttattaagcattatatttttcattttcatatcaatgacatagtttcttctgtttagctgaatatacttctttgtatatgtgtgtgtgtagctttttttattttatatagatgaatctatttcttctatatgctttctccaaggtcttatttttcatggtaggatttattttttattttaatattgagaatttcatacatgaatatactgttaaattttctttacacatttacctattgttgataggctaggaaaaatccctgacatggcttttgtaaatagtgcaacaattaacatgagtgtccaggtatgtattcttcatgggaagtttggttcttttgaacacacacacacacacacacacacacacacacaggtgttatagaattatctcacatagttctaccattagcttctgagaaaactgcatagtgatttccatagtacgttaactcatttacattactgttgaaagtgtaatcagtgttccatttttaccatactctcaccattgtttgttgtttaccattatgttggtaatagacattaactggagagaagtagaatttctatgtagttttaatttgaatttccataacaggtatagatttatggcagcgtctacttcataatgatctgttcgattcatttggccgtttactgctgagattgtttattttcattgattagccatttgagttctttatatattaatattaataatatatattctgttggaagaagagctggcagagatttctctcactttctaggctatctggtaaattggttgttgtgcttctgatactggatggaattttacttgcccattctagttcttaattcttgaggtattggagattaattcagaaaatagttgactatgttcatgtcttaatgtcttttccatatagtacttccaaagtttctgcacatattaaagatgttcatcatgtttttgaataaaattctgtgtagcataggagagagttctcaaactacggacttcccacatatcaacattcagttttcacagcatttaatttttgggccaggtctgtacagttcaaattactctcagcaacaaagtcttccagattcctactaggatagctcattcagccccatttaaagcattccgccactttccaaatctaaagtccccaaatctacattcttccataaataagcacaggcagacctatcatagcaatagccagtacctggtacc

SEQ ID NO: 2603 - DNA, 2956 bp, Rattus norvegicus
cgcgaggctgtcagatctcctaacttcgcatacgacatttccccaatggagatcaccagacccctgcttgagattggcagagcctccactggggtcgacgacgacaccgctgtcaatatggacagccccccaatcgcaagtgatggcccgcccatcgaagtctcgggagccccagttaagagcgagcacgcaaagagacccccacttgagcgacaagcagccgagacaggaaacagccctatcagcagcaccactgcagaggaggcaaaagtcccctccctcgagcgaggagaaggatcccccacccaacctgaaacagtgcatatcaagccagctcctgttgcggagtccggaacggactcttccaaagccgatccggactcagctacacacgcagttcttcagatcggtcctgaggaagtcggaggagtcccaaccatgcccaccgatcttccgcctgcttctgaagatgcgggcccagatgtccgggcagaaccagacggagggacagccccagccacccctgccgagtccgaagacaacagagaaccagccgccgccgccgccgccgagccagccgccgagccagccgctgagccagccgccgagccagccgccgagccagccgccgagccagctgccgaggcagtccctgacaccgaagccgagtctgcctccggggcagtccccgacacccaagaggagcccgcagccgcggcagcctctgccacgccggcggagcctgccgcccgggcagcccccgtcacccctacggagcccgctacccgggctgtcccttctgccagagcccatccagccgccggggctgtccctggagcctcagcgatgtcagccgctgctagggcagccgccgctagagcagcctatgcaggtcctctggtctggggagccaggtcactctcggctactccagccgctcgggcatccctccctgcccgcgcagcagctgccgcccgagcagcctctgctgcccgcgcagtcgctgccggccggtcagcctctgccgccccaagcagggcccatcttagaccccccagcccggagatccaggttgctgacccgcctactccgcggcctgctccgcggccgagtgcctggcctgacaaatacgaacgtggccgaagctgctgcaggtatgaggctgcgtccggcatctgcgagatcgagtcctccagcgatgagtcggaagaaggggccactggctgcttccagtggcttctgcggcgaaaccgccgccctggccagccccggagccacacagtcgggagcaacccggtccgcaacttcttcgcccgagccttcggaagctgcttcggtctatctgagtgtacccgatcacgatccctcagccccgggaaggccaaggatcctatggaagagaggcgcaaacagatgcgcaaagaagccatggagatgcgagagcagaagcgcgcagataagaaacgcagcaagctcatcgacaagcaactggaggaggagaagatggactacatgtgtacacaccgcctgctgcttctaggtgctggagagtctggcaaaagcaccattgtgaagcagatgaggatcctacatgttaatgggtttaacggagagggcggcgaagaggaccyrcakgytrmwrggwkyaacrgmgatrgtgagaaggccaccaaagtgcaggacatcaaaaacaacctgaaggaggccattgaaaccattgyggccgccatgagcaacctggtgccccccgtggagctggccaacccyrasarcsagktsagagkssacyamatkcwgrrcrtsawraacrwscyraaskwkgmcwtysmacctgaattctatgagcatgccaaggctctgtgggaggatgagggagttcgtgcctgctacgagcgctccaacgagtaccagctgatcgactgtgcccagtacttcctggacaagattgatgtgatcaagcaggccgactacgtgccaagtgaccaggacctgcytcgctgccgcgtcctgacctctggaatctttgagaccaagttccaggtggacaaagtcaacttccacatgttcgatgtgggcggccagcgcgatgaacgccgcaagtggatccagtgcttcaatgatgtgactgccatcatcttcgtggtggccagcagcagctacaacatggtcatccgggaggacaaccagaccaaccgtytkcaggaggctytgaacctcttcaagagcatytggaacaacagatggctgcgtaccatctctgtgatyctcttcctcaacaagcaagatctgcttgctgagaaggtcctcgctgggaaatcgaagattgaggactactttccagagttcgctcgctacaccactcctgaggatgcgactcccgagcccggagaggacccacgcgtgacccgggccaagtacttcatccgggatgagtttctgagaatcagcactgctagtggagatggacgtcactactgctaccctcactttacctgcgccgtggacactgagaacatccgccgtgtcttcaacgactgccgtgacatcatccagcgcatgcatcttcgccaatacgagctgctctaagaagggaacgcccaaatttaattcagccttaagcacaattaattaagagtgaaacgcaatcgtacaagcagttgatcacccaccatagggcatgatcaacaccgcaacctttcccttttctccccagtgattctgaaaaccccctcttcccttcagcttgcttagatgttccaaatttagtaagcttaaggcggcctacagaagaaaaagaaaaagaaaaaggccacaaaagttccctctcactttcagtaaataaaataaaagcagcaacaaacagaaataaagaaataaatgaaataaatgaaactcaaaatgaaataaatattgtgttgtgcagcattaaaaaatcaaaataaaaattaaactttag

SEQ ID NO: 2604 - DNA, 1136 bp, Rattus norvegicus
atgtttggccttcggagaaacgcggtaatcggcttgaacctgtactgcggcggcgctagcctcggcgcgggcggcggctctccggccgggacgcgcctggcggccgaggaggccaaggcgcggcgcgaggggggaggggaggccgctctgctgcccggcgcgcgggtggtcgcccggccgcctccggtgggcgccgaggaccccgacgtcaccgcgtcggcagagaggcggctgctcaagtcgcccggcctcctcgccgtgccgcctgaggagatggccgcgtcggccgccgccatcatgtctcccgaggaggagctggacggctgtgagccggaggtgctcagcaaacgcccggcggtgctgcccctactggagcgcgtgagcgaggcggctaagagctccggagctgacggctcgctgccctccacgccgccgccgcctgaggaggaagacgacgagctgtaccaccagtcgctggagatcatctcccgctacctgcgggagcaggcgacgggctccaaggacgcgaagcctctgggcgaggccggcgcagcgggccggagggcgctggarwcsswrcggmgmgtgggmgacggmgtgcagcgcaaccacgagacggccttccagggcatgcttcggaaactggacattaaaaacgaggamgatgttaaatctttttctcgagtgatgahccatgttttmaaagatggcgtaacaaactggggcaggattgtgactcttatttcttttggtgcctttgtggccaaacacttaaagagcataaaccaagamagctgcatcgmacctttagcagaaagtatcacagacgttcttgtaaggacgaagcgggactggcttgtgaaacaaagaggctgggatgggtttgtggagttcttccacgtacaggacctagaaggcggcatcagaaatgtgctgctggcttttgygggtgttgctggagtaggggctggtctggcatatctaataaggtagcttgtgagtgcaataggtgactctaaaacctccagccaccaactacatgcttccgtgagaacaaatgtgtttatgaaggtgctcttgaagctgcccgggattttaacagggcagaaagaaagtggctacaggattgtggctaa

SEQ ID NO: 2605 - DNA, 1757 bp, Rattus norvegicus
aacacttcctctctggacaaggaggagtgcaggaggccaccgcctgcagtacatcttggagtgttggagggatgtgcctgcacttgtgaacgggcgccaggagaatgaggccccaaccaagcccggcagtgcccagtagatgcagagaggcacccgtgccccgagtgagggcacagccagtgggcatccctgaggcccaggggcccgttcctctccactcccaacagatgcgtctgctgtggggccctgggaggcccttcctcgccctgcttctgctggtttccatcaagcaagttacaggatcgctcctcaaggagacaactcagaagtgggctaattataaggagaagtgtctggaagacttgcacaatagactttctggcatattttgtaatgggacatttgatcggtatgtgtgctggcctcattcttatcctggaaatgtctctgttccctgtccttcatacttaccttggtggaatgcagagagcccaggaagggcctacagacactgcttggctcaggggacttggcagacgcgagagaacaccacagatatttggcaggatgaatcagaatgctcagagaaccacagcttcagacaaaacgtggatcactacgccttgctatacaccttgcagctgatgtacactgtgggctactccgtgtctctcatctccctcttcttggctcttacactcttcttgttccttcgaaaactgcattgcacacgcaattacatccacatgaacctgttcgcttcgttcatcctgaaagttctggctgtcctggtgaaggacatggtctcccacaactcttactccaagaggcccgatgatgagagtggatggatgtcatatctgtcagagacatccgtctcctgtcgctccgtccaggtcctcctgcactactttgtgggcaccaatcacttgtggctgctggttgaaggactttacctccacactctgctggagcccacagtgtttcctgaaaggcggctgtggcccaagtacctggtggtgggttgggccttccccatgctgtttgttattccctggggttttgcccgtgcacacctggagaacacacggtgctgggccacaaatgggaacctgaaaatctggtggatcatcagaggacccatgctgctttgtgtaacagttaatttcttcatcttcctcaagattctcaagcttctcatttctaagctcaaagctcatcagatgtgcttcagagactacaaatacagattggcgaaatcaacgttgctcctcattcctttgttgggggttcatgaggtcctcttcactttcttccccgacgaccaagttcaaggattttcaaaacgtattcgactcttcatccagctgacactgagctctgtccacggatttctggtggccttgcagtatggctttgccaatggagaggtgaaggcagagctgcgaaagtcatggggccgcttcttattagcccgccactggggctgcagaacctgtgtcctggggaagaatttccggttcctggggaagtgttccaagaagctgtcggagggagatggctctgagacactccagaagctgcggttctccacatgcagctcacacctggcctctgagaccctgggagacgttggggtacagcctcacaggggccgtggagcttggccccggggaagcagcctgtctgagagcagtgagggagacttcaccctggccaatacgatggaggagattctggaagagagtgagatctaa

SEQ ID NO: 2606 - DNA, 1005 bp, Rattus norvegicus
atgagccgtgtgcggcgagtgctgtgccgggcctgcctcgcgctggccgcggtcctggctgtgttgctgctactaccgctgccgctaccactaccgctgccgctgcctcgcgctcccgcaccagacccaggtcgtgtcccgaccgggagcctgaccctcgaggtctcccgcctgcaaccggacgacgtcttcattgcagtcaagaccactcggaagaaccacggcccgcgcctgcgcctgctgttgcgtacctggatctcacgagccccacggcagacgttcattttcaccgatggagacgaccctgagctccagctgctggcaggcagccaaatgatcaacaccaattgttccgctgtgcgaacccgccaggcgctgtgctgtaagatgtcagtggagtatgacaagttcatagagtctggacggaaatggttctgccacgtggatgatgacaactacgtgaaccccaaaagcctgctgcacctgctttccaccttctcttccaaccaggacatctacctggggcgacctagtctggaccaccccatcgaagccacagagagggtccagggcggtggcacctcaaacacagtgaaattctggtttgctactggtggggctgggttctgcctgagcaggggccttgccctcaaaatgagcccgtgggccagcctaggcagtttcatgagcacagcagaacgggttcgactgcctgacgactgcacggtgggatacattgtggaagggctcctgggtgcccgtctgcttcatagccccctgttccactcccacctggagaacttgcagaagctgccatctggtgctgttctgcagcaggttaccctgagctatgggggtcctgagaacccgcacaacgtggtgaatgtagctggaagtttcagcattcgacaggaccctacacggtttcagtcagtgcactgccttctctacccagacacccactggtgtcctatgaaaaacaggggtaaggaagcttttcagtaa

SEQ ID NO: 2607 - DNA, 1242 bp, Rattus norvegicus
atgatgrcgtatatgaacccgggacctcactattcggtcaatgccttggccctgagtggccccagtgtggacctgatgcaccaggctgtcccatactcaagtgcccctaggaagcagaggcgggagcggaccacgttcaccaggagccagctggaggagctggaggccctgtttgccaagacccagtacccggatgtgtatgcacgtgaggaggttgctctcaagatcaacctgcctgagtccagggtccaggtctggttcaagaatcgcagggcgaaatgcagacagcagaggcagcagcagaaacagcagcagcagcccccaggggtacaagccaaggctcgtcctgcgaagaggaaggcaggcacatccccgagaccctctacagatgtttgtacagatcctttgggcatctcagattcctacagcccatctctgcctggtccctcaggttcacctaccacagcagtggccaccgtatccatctggagtccggcctcagagtctcctttgcctgaggcccagagagctggcctagtggcttcagggtcctctctcacctcagccccttatgccatgacctatgcccctgcttctgctttctgttcttcaccttcagcttatgcatctccaagctcctatttcagtgggttggatccatacctttctcccatggtgccccagctagggggtccggctctcagccccctctcgggcccctctgtggggccatccttggcccagtcccccacctccttgtcaggccagagctatagcacctacagccccgtggacagcctggaattcaaggaccctacaggcacctggaaattcacctacaatcccatggaccctctggactacaaagatcagagtgcctggaagtttcagatcttgtagaagaggcttcatattctcccttccagcggaatcaccctctytggactccggctgccacctcctgcttagattccaggagagtagctctcagcaagcatcagcaagtagcaatcctgccaaaggctgtgaaaaattcagccccaggtgtaggccaccctcagctccattagagtttaacccctttaccacctaccccaagcaatgaaagggacttcctctcccaagacagtccagcagcaaccagtagatagcatgaccgatgtgtatatctgatgctttycccagtcttcagtaaaggtgctgagaacttgcwmwrrararaaaraaaaaaaaaaaaaaaaa

SEQ ID NO: 2608 - DNA, 1496 bp, Rattus norvegicus
aaaaacatgcacatatttttttaaaatgttctaaaaatagaagagaacaatacttgaaaccttctctgaactatgtttccccctcctttgttacaggtattcatttcttcaactatgtaaaccttttaaacaaaaaaatggattttctaaactcatcagaccaaaatttaacctcagaggaactgttaaaccgaatgccatccaaaattctggtatccctcactctgtctggcctggccttgatgacaaccaccatcaactgcctcgtgatcactgcaatcattgtgactcggaagctgcaccacccagccaactatttaatctgttccttggcagttacagactttcttgttgctgtcctggttatgccctttagcatcgtgtacattgtgagagagagttggattatgggacaaggactctgtgacctttggctgagtgttgacatcatctgctgtacctgctccatcttgcacctgtcggctatagcgttggataggtaccgagcaatcacagacgcagtcgagtatgccaggaagaggactcccaggcatgctggcatcacgattacaacagtgtgggttatatctgtgttcatctccgtgcctcctctcttctggaggcaccaaggaaatagccgtgatgatcagtgtatcatcaaacatgaccatattgtttccacaatttactccacgtttggagccttctacatcccacttgtgttgatattgatcctctactacaaaatatacagagcagcaaggacactataccacaagagacaagcaagtcggatgataaaggaggaactgaatgsccaagtccttttggagagtggtgagaagagcattaaactggtctccacatcctacatgttagaaaaatccttatctgatccatcaacagactttgatagaattcacagcacmgtgaaaagtyccagatctgagctgaagcacgagaaatcttggagaagacagaaaatctcaggcactcgagaacgcaaagcagccactaccctgggattgatcttgggcgcatttgtaatatgttggttgcccttttttgtaaaggaattggttgttaatatctgtgaaaaatgtaaaatttctgaagaaatgtcaaattttttggcatggcttggttacctgaattctcttataaacccactgatttataccatctttaatgaagactttaagaaagccttccaaaaacttgtacgatgtcgaaattaggatttaaaaaaaagcctatttttaaagggtagaggctgtatttcttggggggggagggataactaaatgaatgtaaagtaataaaagattgaaatttttagagaaaawawawaaaramwgctaaaattataagaggataaatttatttttaatagtaccaagaaaataagatatactaatttggccatcattttaatgttctcaaaattaggaaataatttaggcagctcagctcataatattttttctatgcaatat

SEQ ID NO: 2609 - DNA, 1846 bp, Rattus norvegicus
ggcacgaggttgggtccagatggagtcccgtctgggccgcgcagctcgctgaagccgcgaagagccgcagcatctgaccctcccgccccaagtcccgtccccacggggaaggggaccccgtgcagaccaactgaggccagtgcacagggctggacccaaaataggccggaagccggcctagccgccagggtgctaaaggctggacccaggctgcggatgcagggagcgttgctaggagacaaggtgaaccctcaattctaaggagcttggcaccccacgcctgctgcagctaagatgccaacgcaacgctgggcccctgggactcaatgtatgaccaagtgcgagaactcacgccccaagcccggtgagctagcctttcgaaagggtgacatggtgaccatcttggaggcctgtgaggacaagagctggtaccgagccaagcaccacagcagtgggcaggaagggctgctggcggctgctgctctgcgacagagggaggccctttccacagaccccaagctcagcctcatgccatggttccatggcaagatttccggtcaggaagccatacagcagctgcagccacccgaggatgggctgttcctcgtgagggaatcggcccgtcaccctggtgactatgtcctgtgtgtcagtttcggccgtgatgtcatccactaccgtgtcttgcatcgagatgggcacctcaccattgatgaggccgtgtgtttctgtaatctgatggacatggtagagcactacaccagggacaagggcgccatctgcaccaagctggtgaagcccaagaggaaacagggcgcaaagtccgcagaggaagagctcgccaaggctggctggctgctagacctgcagcatctgactctgggagcacagattggagagggagagtttggagccgtcctgcagggcgagtacttgggacagaaggtggccgtgaagaatataaagtgtgatgtgacagcccaggccttcctggatgagacggctgtgatgacaaagctgcagcacaggaacctagtgcgactcctgggtgtgatcctgcaccacggcctgtacattgtcatggaacacgtgagcaagggcaacctggtgaacttcctgcgcacgcggggccgtgcgcttgtgagcacctctcagctcctgcagtttgctcttcacgttgctgaaggcatggagtacctggagagcaagaagctggtacacagggacctggctgctcgaaacatcctggtctctgaggacttagtggccaaggtcagtgactttggcctagcaaaggcagagcttaggaaggggctggactcaagtcggctgccagtcaagtggacagcacccgaggctctcaaaaatgggaggttctccagcaagtcggatgtctggagttttggggtgctactgtgggaagtcttctcatatggaagagccccataccccaagatgtcgctaaaggaggtttcagagrytgtggagaaggkttaccgcrtggasccccccgacagctgsccaggcyctgtgcacaccmtcatggrcagctgctgggaggmtgagccytmgcgcagmccaccgttcmgcaaaatagtggagaagctgggycgtgagctccrcagtgtgggcgtcgcagcccccsccgggggacaggaggctgagggctcagctccmacacggagccaggacccctgacccytgaactggaaagcaagaggacacagatgtagggtcacagggccagggtgagccagtgcacaggctccggagcccctggratccccgktactgggacaccccataaagagtgwttggaaggawwwwrwamaaaaaaaaaaaaaaa

SEQ ID NO: 2610 - DNA, 1365 bp, Rattus norvegicus
gaattccaagaatgttaaggaaatggtcgcagagttgacaagttgtgacttctgttaggaataaaagaaaagtgatggtcacagggggtcaagaagatgactataaaggagaaaccaaagacagggatgctgcttaaatggagcaaggctaattgaattaaggaatttggcatttgcattacaagtaatcattttgttctctgtccacagaatcaaaggaaatggaagacagtaatatgttacctcagttcatccatggcatactatcaacatctcattctctatttccaagaagtatccaagagcttgatgagggggccaccacaccgtatgactatgatgatggtgaaccttgtcataaaaccagtgtgaagcaaattggagcttggatcctgcccccactctactccctggtattcatctttggttttgtgggcaacatgttggtcattataattctgataagctgtaaaaagctgaagagcatgactgatatctacctgttcaacctggccatctctgacctgctcttcctgctcacactcccattctgggctcactatgctgcaaatgagtgggtctttgggaatataatgtgcaaattattcacagggctttatcacattgggtattttggtggaatcttcttcattatcctcctgacaattgatagatatttggctattgtccatgctgtctttgctttaaaagccaggacagttacctttggggtaataacaagtgtagtcacttgggtggtggctgtgtttgcctctctaccaggaatcatatttactaaatctgaacaagaagatgatcagcatacttgtggcccttattttccaacaatctggaagaatttccaaacaataatgaggaatatcttgagtttgatcctgcccctacttgtcatggtcatctgctactcaggaatcctccacaccctgtttcgctgtaggaatgagaaaaagaggcatagggctgtgaggctcatctttgccatcatgattgtctactttctcttctggactccatacaatattgttctcttcctgaccaccttccaggaattcttgggaatgagtaactgtgtggttgacatgcacttagaccaggccatgcaggtgacagagactcttggaatgacacactgctgcgttaatcctatcatttatgcctttgttggtgagaagttccgaaggtatctctccatatttttcagaaagcacattgccaaaaatctctgcaaacaatgcccagttttctatagggagacagcagaccgagtgagctcaacatttaccccttctactggggagcaagaagtctcagttgggttgtaaagtaagtagcagtccccctttt

SEQ ID NO: 2611 - DNA, 624 bp, Rattus norvegicus
atggcggaggtcgggggcgtctttgcctccttggactgggacctgcaaggcttctcctcctctctggggaacgtgcccttagctgactccccgggtttcctgaacgagcgcctgggccagatcgaggggaagctgcagcgcggctcgcccacagacttcgcccacctgaaggggatcctgcggcgccgccagctctactgccgcacgggcttccaccttgaaatcttccccaatggcacggtgcatggcacccgccacgaccacagccgcttcggaattctggaatttatcagcttggctgtggggctgatcagcatccggggagtagactctggcctatacctaggaatgaatgagcgaggagagctgtttggatcgaagaaactcacacgagaatgtgttttccgggaacagtttgaagaaaactggtacaacacctatgcatccaccttgtacaaacactcggactcggagagacagtattatgtggccctgaataaagacggctcaccccgggagggatacaggactaaacgacaccagaaattcactcactttttacccaggccagtagatccttctaagttgccctccatgtccagagacctcttccgctataggtaa

SEQ ID NO: 2612 - DNA, 786 bp, Rattus norvegicus
atgtcttacactccggggattggtggggaccctgcccagctggcgcaacgcatctcctctaacatccaaaagatcacacagtgctccgcggaaatacaaaggactctgaatcaactgggaacacctcaggatacaccggagttgaggcaacagctgcagcaggagcagcagtatactaaccaacttgcgaaagaaacagataagtacattaaggagtttggctttctgcccaccacccccagtgaacagcgtcaaaggaagatacagaaagaccgattggtggcagaattcaccacagcgctaacaaactttcagaaagtgcagaggcaagctgctgagagagagaaagagttcgtggcccgagtgcgagccakttccagagtatcgggtggctttcctgaagacagctcaaaagmgaagaattttgtatcttgggaaagccaaacacagcctcaagtgcaagtccaagatgaagaaatcacagaggatgacctccggctcattcatgagagagagtcttcaatcagacagctggaagctgacattatggacattaacgaaatattcaaagacttggggatgatgattcatgaacaaggagatgttattgacagcatagaagccaatgtagaaagtgcggaagttcacgtacagcaggcaaaccagcagctgtcaagagcggcaaattatcagcgcaaatccagaaaaaccctctgcatcatcattttaatcctggtggtcggaatcgtgatcatcttcttcatcgtatggggtctgaaaggctga

SEQ ID NO: 2613 - DNA, 1820 bp, Rattus norvegicus
  misc_feature (721)..(721): n is a, c, g, or t
  misc_feature (1050)..(1050): n is a, c, g, or t
  misc_feature (1060)..(1060): n is a, c, g, or t
  misc_feature (1089)..(1089): n is a, c, g, or t
  misc_feature (1112)..(1112): n is a, c, g, or t
gaattccggtagaaggcagmggagsmgscgagccgrgctgcgcycgctcgsckccccctagcctctttcttctccgccgggtgcactgccctgcgctgtcccctcgcctcttcgcccccttgacaaagaggacagaaagtttgcgcgggggagcgggccaggtgaggaggggcgtgccggcgccagcccgcgccccagcagccggacccaggcccctagcgcgcccgccatgggcgccgcggcccgcassctscggctggcgctcggcctcctgctgctggccacgctgctgcgcccggccgacgcctgcagctgctccccggtgcacccgcaacaggcgttttgcaatgcagacgtagtgatcagggccaaagcagtgagcgagaaggaggtgsaykmsgggaatgacatctatggcaaccccatcaagaggattcaatatgagatcargcagakraagatgttywwwkkwyytkwywwkgamatygawkttwtmtwcayggcysyytcctcagsartgtgcgrkgtctcgctggacgttggaggaaagaaggaatatctaattgcagggaaggcggaaggagatggcaagatgcacattaccctctgtgactttattgtgccctgggacacgsttagcatcacccrgargaagascctaawccacaggtaccagwtgggstgssartgcaagatmacacgctgccytrtgatcccatgntamatctcctcccsggatgagtgcctstggatsgactgggycacagagaagagcatcaatgggcaccagkccaagttctytgcmtgcatcaagagaagtgatggttcttgcgcgtggtaccgcggggcggcacccccgaagcaggagtttcttgacatcgaggacccgtaagcaggctgacagagccccctgygsccaaktgaaaagcctctgagggttcagactggtccmgctttgacatcccttcctggaaacagcwtgaataaaacrtcaatcwtcmmrrrrwwmamrmwarwgtgattctgcccccccacccccattttccctanacatggtagngggtctagagggacaggcgggccagggtncctgccataccccctccctctgncggcctgagcactgtgtgtctcagtctttgatccttggtacagcaggagtagagcacaggctttaccaggcctctctggccctgttgcgtcagcagacagcagcattaagggtcccctagcaccgttagggcagagcctgggaacgtgcattttgcagaaactcttgaaggttgttataagactgtgtagccggcctaccaggtccttttcatcctgagagggtcatgtccctcattttctgcagtggccatccctctggcccaaggcccttgcaaatgctccccatccctcctgcacssagtctccctcaggtctaagaattgccctccaaccagtgtttcatttgcctaggagtcccagtcagccctacgaacccacagacgtccgtgaatggaagccctccctgagccgtgtttctggcttcatatttcttccttcctctctcttcccctgtctctacacaccccctcagtggggatctgtgaggtctcatgctgagggcaggaacctgtggtgaggggtgcttggctgtcctcgtaatcactctcaaggttcccaagcttcttcacccccttccaagcttcaggcacctggggtgagcagcacagctcatctctctgycgcgttatgccctcccgctgttggggtgctgcttctggcaccccctcttgttgcacaaactgaagaggtaaaaggccagtcctagg

SEQ ID NO: 2614 - DNA, 4847 bp, Rattus norvegicus
cgccctcggggccgcaacgagcggccgagcttacagaatcggcccctccctctatcccttctggccgtagagcctgtccgaggcccggactcagaacgcggagaacgggttagggtagcggccgggcgtgaggggaccgcacagcatccttgttcccaggacgcgcggaccaagaggaagcgaggggtgtcgggtcctgttcgctgctggagctccaaggtgaccaaggatggcagagaggatatgaccggcggctgccgtcgtctgccctcctagtggcatcaccatgcagaagcccagtggcctgaagccccctggccgaggggggaagcactccagtcccgtgggtaggccctccatcgggtctgcctcatcttctgtggtggcatcggcgagcggctccaaagaagggtctcccctgcacaagcaggcgtcgggcccctcctcggctggagccaccactactgtctccgagaagccaggtccaaaggcagccgaagtgggtgatgacttcttgggagacttcgtggtgggcgagagggtgtgggtgaatggcgtgaagcccggcgtggtgcagtacctgggtgagacacagtttgcgccaggccagtgggccggcgtggtcttggatgatcctgtgggcaagaacgatggagctgtgggtgggctgcgctacttcgagtgcccagctctacagggcatcttcacacggccctccaagctgacccgccagcccgcagctgagggctccggcagtgacggccactcagtggaatccctcaccgcccagaacctgtccctgcattctggcacggccacgcccccactcaccggccgagtcatccccctgcgggagagtgttctcaacagctccgtgaagacgggcaatgagtctggctccaacctctcggacagtggttctgtgaagcgtggtgacaaggacctccacctgggagaccgtgtgctggttggtgggacgaagaccggtgtggtacgatatgttggggagacggactttgccaaaggcgagtggtgtggtgtggagctggacgagccccttgggaagaacgatggggcagtggcaggcaccaggtacttccagtgcccacccaagttcggtctctttgcaccaatccacaaggtcatccgaattggcttcccatctaccagtccagccaaggccaagaagaccaagcgcatggctatgggtgtctcagccttgacccacagccccagcagttcttccatcagctctgtcagctctgtggcctcctctgttggtggccggccgagccgtagtggcctgctcacagagacctcttcacgctatgcccggaagatctcaggcaccacagccctgcaggaggcactgaaggagaaacagcagcacatcgaacagctgctggctgagcgtgacttggagagggcagaagtagccaaggctaccagtcatatctgtgaggtggagaaggaaattgccctgctgaaggcacagcatgagcagtatgttgcagaagctgaggagaagctgcagcgggcacggttgctggtggaaaacgtgaggaaggagaaggtggatctgtccaatcagctggaggaggagaggaggaaggtggaggacctgcagttccgggtggaagaagagtccatcaccaaaggagacttggagacccagacccagctggagcacgcgcgcattggggagctggagcagagtctgctattggagaaggcgcaggccgagcggctgctcagagaattagcggataacaggctgaccacagtggctgagaagtctcgggtgctgcagttagaagaagagctgagcctgcggcgtggtgagatcgaagagctacaacactgcctcctccagtcaggtccaccacctgcggaccacccagaggccgctgagaccctgcggctgcgagagcggctgctgtcggctagcaaggagcaccagcgggacagcaccctgctccaggacaagtatgagcacatgctaaagacgtaccagacagaagtggacaagcttcgggcagccaacgagaagtacgctcaggaagtggcagacctcaaggccaaggtccagcaggccaccaccgagaacatggggctcatggacaactggaaatccaagctggactctctggcctccgatcaccagaaatctttagaagacctgaaggccacgctgaactctggcccaggcgcccagcagaaggagattggcgagctgaaggccctggtggagggcatcaaaatggagcaccaactggagttagggaacctgcaggccaagcatgacttagagacggccatgcatgggaaggagaaagagggcctgcggcagaagctgcaagaggcccaggaggagctggccgggctgcagcagcactggagggcacagctggaggagcaggcagcagcaccggctgagctacaagaagcccaggaccaatgtcgtgacgcccagctacgtgtgcaggagctggagggactggatgtggaataccgcggccaggctcaggccatcgagttcctcaaagaacagatctcgctggctgaaaagaagatgctggattacgagatgttgcagagggcggaagcccagagcaggcaggaggccgagcggctgcgggaaaagcttctggtggctgagaatagactgcaggctgtcgagtccctgtgctcagcccagcacagccatgtgatcgagtccaatgacctttctgaggagaagattcggatgaaggagactgtggagggcctgcaggacaagctgaacaagagggacaaagaggtggcagccttgacatcccagatggacatgctcagggcccaagtaagtgctctcgagaacaagtgcaaatcaggagagaagaagatagactctctcctgaaggagaagaggcggctggaggcagagctggaggccgtgtctcggaagacccatgatgcctctggccagctggtccacatcagccaagagttgctacggaaggagaggagtctgaatgagctgagggtgttgctgttagaagccaatcggcactccccagggcccgagagagacctgagccgtgaggtacacaaagctgaatggcggataaaggaacaaaaactgaaagatgacatccggggcctgcgtgaaaagctgaccgggctggacaaggagaagtccctgtcggagcagaaacgctactccctcattgacccagcttcagcgcccgagttgctgagactgcaacatcagttagtgagcacggagggatgcctgcgggacgcactggaccaggcccagcaggtggagaggctggtggaggccctgaggggctgctcagataggactcagaccatcagcaattccggttctgccaatggtatccaccagccagacaaggcccacaaacaggaggacaaacactgacccccaagggacaccatggaccggccctactcacaccagaagccctgccaggcttcccagcagcgccaccttcaggcaggagccagaactttccctttggagatgagactgtgtttgtaacgataattgtcctcactgccgtggacacatcccacctgaaccccctgccggaccaggaggctcccacagacacggccttccacagagcgcggtacagctgggcccagccctggaggacctctcttgtcccaaggagcttcttgaatttgcggaggctgaagcgatccagttgggcctctcttggctatagcaggctgccccgaggcttgtctgggcacccgggtacttccccatctccctttccttctggtgtcccccaggtcccctgcaggcccctgagaggtggagcagggctcctgcttggacgcgtaacacaccaagaagggcttcagtcttcagaaactagggaggggatgcttgacttcatatgctgatcctctaacacaatggtacaaggtcgcttgggcctctagccaggsamgakktgggggtgacaggttccttattcctcgacaccacgctagtatgcgttacccacttcccctctgctgcccagaaagcattgagcagacagcttcagtattaggtgagctcgcaaacccactcttcttaccttgaccttgagctgggactggctcaggggcttacagccaagagcgggaagaaaactctttaaacaaagcattcacgcggtgttttgctgggtgagaggaatcacgctggttccctttatttccgggaacccctgccatgttactccaaagaccccagcaacccacagagggtcctgcttctatcttcccagggcgggaaccacagtgggtgacaggtatggtaagtccttaggattggcccaggtggcctctgtgagcaccattagacaccagcaggtgcggtcacgctcttgtccttagggagaagctgaattagcagccccacagcccaaccccytgcttcctgttggcttttgggtagcacttgccgttaacaacagcagcctagagcctagaattgacgctttagtggcccaactgcagagccagtatatcgctctttccagcacaatcgggcagctcacagattaggaattaacagccaaaggctcccacagtagggaccagacggggctgagccccaccctggagtgggcttgcacctggtaggtgtgcaagaagccatttccccataagcactggcctttgacggccccctcagcctacccggtgtggccacccagtggtggctcagccattccctcccctccccctcccctcagtggaattgtggaagtgtggcaagtccatgttcggacaataaagcttgtgattaaggwwaaaaaaaaaaaaaaaaaaaaaaaaaa

SEQ ID NO: 2615 - DNA, 5649 bp, Rattus norvegicus
crgccgccacgcgagctgcggcmysmgccyaggcggggggcgtcggcgctgggcccgccatggccgcgtccgagctctacaccaagtttgccmgggtttggatmcctgatcctgaggaagtgtggaaatcrgcwgagttgctcaaggaytataarcctggagataargtgctcctgcttcaccttgaggaagggaaggatttggaataccgtctagatycaaagaccagcgagctccctcacctacggaaccctgacatacttgttggmgaaaatgacctcacagscctcagctacctkcacgascctgctgtgctgcacaatctccgcgtccgsttcatcgactccaaactcatttatacgtaytgkgggayastcctggtagctataaatccctatgagcagctgcctatctatggagaagatatcattaatgcatacagtggccagaacatgggtgacatggrmcctcacatctttgcagtagctgaagaggcctataaacaaatggcaagggacgaacgaaatcagtccatcattgtaagtggagagtcaggtgcagggaagacagtctcggctaagtatgccatgaggtacttcgcaactgtaagtggctctgccagtgaggccaatgttgaggaaaaggtcttggcctccaaccccatcatggagtcaattggaaatgctaaaacaaccaggaatgataatagcagccggtttgggaaatatattgaaattggttttgacaagagatatcgaatcatcggtgccaatatgagaacttaccttttagagaaatccagagtggtgttccaggcagaagaggagagaaactaccatatcttctatcagctctgtgcttcggcaaagctacctgagtttaagatgctgcggttaggaaatgcagatagtttccattacacgaagcaaggaggcagccctatgatagaaggagtggacgatgcgaaggagatggcacacaccaggcaggcctgcactctgctgggaattagtgaatcttaccaaatgggaatttttcggatacttgctggcattcttcacttaggcaatgttgggtttgcgtctcgagattcagacagctgcacaatacctcccaagcacgagcctcttatcattttctgtgatcttatgggtgtggattatgaagagatgtgtcactggctctgccaccgaaagctagctaccgccacagagacgtacatcaagcccatctccaagctgcaggccacaaatgcccgagacgctttagcaaagcatatctatgcaaagctctttaactggattgtcggccatgtcaatcaggctctccattcagctgtcaagcagcactctttcatcggcgtgctggacatttatggatttgaaacatttgagataaatagttttgaacagttctgcataaattatgcaaatgaaaagctacagcaacaattcaacatgcatgtcttcaaactggaacaggaggagtacatgaaggaacaaattccatggacactcatagatttctatgataatcagccttgtatcaatcttatagaatctaaactgggtattctagatttgctggatgaggaatgtaagatgcctaaaggtaccgatgacacatgggcccaaaaactatacaacacacatttgaacaaatgtgctctctttgagaagccccgcatgtcaaacaaagctttcatcatcaaacattttgctgacaaagtggagtaccagtgtgaaggttttcttgaaaagaataaagacactgtttttgaagaacaaattaaagtccttaagtcaagcaagtttaagatgctaccagaactatttcaagatgacgagaaggccatcagtcccacctctgccacttcctcaggacgcacacctctcacacgggtacctgtaaagcccaccaagggtcgacctggccagactgccaaagagcacaagaagacagtgggacttcagtttcgaaactcccttcacctgcttatggaaacccttaacgccactactcctcactatgttcgctgtattaagcccaatgatttcaagtttccattcacatttgatgagaagagagcagtacagcagctaagagcatgtggtgtcctggagaccatccggatcagcgcagcagggtttccctcaaggtggacttatcaagagtttttcagccggtaccgggtcctaatgaagcaaaaggatgtgctgggagatagaaagcaaacatgccagaatgtattagagaaactgatactggacaaggataaataccagtttggtaagacaaagatcttttttcgtgctggtcaagtggcctatctagaaaaattgagggctgacaaactgagggcggcctgcatccggatccagaagacgattcgtgggtggctgctgaggaagagatacctgtgtatgcagagggcagccatcacagtgcagcgatacgtgcgtggctatcaggctcgatgctatgctaagtttctgcgcagaaccaaggcagcaaccaccattcagaagtactggcgcatgtatgtggtccgcaggaagtacaagattagacgagctgccaccattgttcttcagtcttatttgagaggctacttggcaagaaataggtatcgcaagatactccgtgagcacaaagcagtcatcattcagaaacgtgtccgtggctggctggctcgtacacattataagaggaccatgaaagccatcatctaccttcaatgctgcttccggcggatgatggccaagcgtgagctgaagaaactcaaaattgaggctcgctctgtggaacgctacaagaagctccatattggcatggaaaacaagattatgcagctgcaacgcaaagtggatgagcagaataaagactacaaatgcctcatggagaaactgaccaatctagaaggagtatacaactctgagactgaaaaactacgaaatgatgtagaacgtcttcagctaagcgaggaggaagctaaggttgccactgggagagtgcttagtctgcaggaagaaattgcaaaactccgaaaagacctggagcaaactcgatcggagaaaaagtccattgaagaacgagcagataaatacaaacaagaaactgagcagctggtgtcaaacttgaaggaagaaaacactctgctgaagcaggaaaaggagaccctcaatcacctcatggtggagcaggctaaggagatgacagaaactatggagaggaagttagtagaagaaacaaaacaactggagctcgacctgaatgatgagaggctgaggtatcaaaacctcctgaatgagttcagtcgtctggaggagcgctatgacgacctcaaggaagagatgaccctgatgctgaatgtgcctaagccaggacacaagagaacagactctacccacagcagcaatgagtctgaatacaccttcagctcagaatttgcagaaactgaagacattgcaccaaggacagaggagccaactgagaagaaggtgcctttggatatgtcattgttccttaagctccagaagcgtgttacagagctgggacaggagaagcagttgatgcaggatgagctggaccgaaaggaggagcaggtgttgcgcagcaaggcaaagggaggagaaagaccacagattagaggtgctgaactgggatatgagtccctcaagcgtcaggaactggagtcagaaaacaaaaagctgaagaatgagctgaatgagctacgcaaagccctgagtgagaagagtgcccccgaagtgaatgcgccaggcgcgcccgcttaccgcgtcctcatggagcagctgacggccgtgagcgaggagctcgatgtccgcaaggaggaagtcctcattttaaggtctcagctggtgagccagaaagaagccatccaacccaaggatgacaagaatacaatgacagattccacaatacttttggaagatgtacagaaaatgaaagacaaaggtgaaatagcacaagcatatattggtttgaaagaaacgaacaggctcttagaatcccagctacagtcgcagaagaggagccatgaaaatgaggctgaggccctccgtggggagatccagagcctaaaggaagaaaacaaccggcaacagcagctgctggcccagaacctgcagctgccccctgaggcccgcattgaggccagcctgcagcatgagatcacccggctgaccaatgaaaacctggatctgatggaacaacttgaaaagcaggataaaaccgtccggaaactgaagaaacaactaaaagtctttgccaaaaaaatcggtgaactagaagtggggcagatggagaacatatccccaggacagatcatcgatgagcctatccggccggtcaacattccccggaaagraaaggattyccaagggatgctggagtacaagcgggaggacgaacagaagcttgttaagaacctgattctagaactaaagccacgtggtgtggctgtcaatctgattycagggttaccggcatatatcttgtttatgtgtgtgcgacatgccgactacctgracgatgatcagaaagtaagatcattgctgacatcaacaattaacagcwtcaaaaaarwmmwraaraaaagaggtgacgattttgaaactgtctccttctggctctctaacacatgtcgatttttgcactgtttgaagcaatatagtggagaagagggcttcatgaaacacaacacgtctcgccagaatgaacactgcctcaccaattttgaccttgctgagtatcggcaagtactgagtgacttggccattcagatctatcagcagcttgtgagggtgttagagaacattcttcagccaatgatagtctcaggcatgctagagcatgaaacaattcagggagtatctggggtgaagcccacaggactcagaaagcgaacctccagtatcgccgatgagggcacctacacactggactccatcctgcggcagctcaactccttccattccgtcatgtgtcagcatggcatggacccagagctaatcaagcaggtggtcaagcagatgttctacatcgtgggcgccatcaccctgaacaacctcctgctgcgcaaggacatgtgctcctggagcaaaggcatgcagatmmggtacaatgtcagtcaattggaagaatggctacgtgacaagaatctaatgaacagtggggcaaaagagactctggaacctcttatccaggctgctcagcttttgcaagtgaaaaagaaaactgacgatgacgcggaagccatctgctccatgtgcaacgctctgmccacagcccagatygtcaaagtgttgaatctgtacacacccgttaatgagtttgaggaaagggtctctgtttcatttatccgcactatacaggtgcggttacgagacaggaaagactctccacagctgctcatggatgcaaaacacatctttcctgtcactttcccctttaacccatcctccctggccctagaaaccatccagattccagccagcctgggcctgggcttcattgcaagggtctgaagggctacccaagcaaatgtagagaacgcatttctcctcaaaacatgaacagttgtttccagtgagctactgaaaatacatttttaaaaaaaaaaaaaaaaaa

SEQ ID NO: 2616 - DNA, 3715 bp, Rattus norvegicus
  misc_feature (3675)..(3675): n is a, c, g, or t
gtcgtcttatttgggagctgagacttgaggaaggtgataacttctgaatccccccaggtagtcaataccattgtggaaacatggccgccattgagccttctggtctgcacccgggagaaagagactcaagctgcccccaggagggcattccaaggccctcaggtagcttagaactggcacaggaatacttgcaacaattcaaggtgaccatgacacagctgcagcagatccaagccagtcttctgtgttccatggagcaggcgctgaagggacaggacagtcccgctccttctgtccggatgttgcccacatacgtgaggtccacaccacatggcaccgagcaaggagacttcctggtgctggagctgggggccacaggagcctcactacgtgtgttgtgggtaacactgacgggcaccaaggaacacagcgtggagaccaggagccaggagtttgtgatccctcaagaggtgatcctaggtgctggccagcagctctttgactttgctgcccgctgcctctctgaattcctggatgcataccccgtggagaatcagggtctgaagcttgggtttaatttctcttttccttgtcaccagacaggcttggacaagagcaccctcatttcctggacaaaaggttttaggtgcagtggtgtggaaggccaggatgtggtccagttgctaagggatgccattcagaggcaggggacctacaatattgatgtggtagccatggtgaatgacacagtgggtaccatgatgggctgtgagctgggcaccaggccatgtgaagtcgggcttattgtagacactggtaccaatgcctgttatatggaggaagcgaggcacgtggcagctctggatgaggaccgcggccgtacctgtgtcagcatcgagtggggctccttctatgacgaagaggccctagggccagtactgaccaccttcgacgatgccctggaccacgagtccctggttcctggtgctcagaggtttgagaagatgattggtggcctttacttgggtgagctggtaaggctggtgctggtccacttgtcccagcatggggtcctctttggtggctgcgcctctcctgcgttgctgagtcaaaacagcatcctcctggaacatgtggccaaaatggaggaccctgccactgggatagcccacgtccacacagtcctgcagggcttgggtctgagccctcaggcctcagatgctgagctcgtgcagcgcgtgtgcatggctgtgtgcacgcgagctgcccagctctgtgcctctgccctggctgcagtcctatcccgcctccagcacagcagggagcagcagacactgcacgtggccgtggccactggagggcgagtgttcgaatggcaccccaggttcctctgcatcctaaaggagacggtaatgctcttggccccagagtgtgatgtctccttcatcccctctgtggatggtggtggccggggtgtggcaatggtgactgctgtggcagcccgcctggctacccacaggcgcatcctggaagagaccctggcaccatttcagctgagcttggagcagctgacagcggtgcaggcacaaatgcgggaagccatgatcagggggcttcaaggagagagctcctccctccgcatgctgcccacttacgtccgagcaacgcccgatggcagcgaacgaggtgacttcctggctttggacctagggggcaccaacttccgtgtcctgttggtacgcgtggccgagggcagtgttcagatcaccaaccaggtctactctattcctgagtatgtagcccagggctctggacagaagctctttgatcatattgtggactgcatcgtggacttccagaagaggcaaggccttagcggacagagcctacccctgggtttcaccttctcttttccttgcaagcagcttggcctggaccagggcatcctcctcaactggactaaggggttcaatgcatcaggctgcgagggccaagatgttgtgtatttattacgggaagccattaggcgcagacaggcagtggagctgaatgtggttgccattgtcaatgacacggtggggaccatgatgtcctgtggctatgatgatccctgttgtgagatgggcctcattgtcggaaccggtaccaacgcctgctatatggaagaactccggaatgtggcgagtgtgcccggggactcaggccacatgtgtatcaacatggagtggggtgcctttggggatgacggctcactgagcatgctcggcacctgctttgatgctagcgtggaccaggcatccatcaacccaggcaaacagaggtttgagaaaatgatcagcggaatgtacctgggggagatcgtccgccatatcctcctgcacttaaccagtcttggagttctcttccggggccagaagacgcaatgccttcagaccagggacatctttaagaccaagtttctctccgagattgagagcgacagcctggccctgcgtcaggtccgagccatcctggaggacctggggctgactctgacgtctgatgatgccttgatggtcctagaggtgtgccaggctgtgtcccgcagggccgcccaactctgcggggcaggtgtggctgcagtggtggaaaagatacgggagaaccggggcctgcaggagctgacagtgtctgtgggagtggatgggacgctctacaagctacatccccacttctccaggctggtgtcagtgacagttcggaagctagcccctcagtgcacagtcacctttttgcaatcggaggatgggtctgggaaaggggcagcgttggtcactsstgtcgcttgccgcctgacccagatggcctgcgtttgaggaaaatctccaaagagcaattgggatctccctggactaaggattcagcccacacggaccctctggcgggcccagccacccacaactcccaaagaaacccacgggtggtgccctcataactgtccgcccacacccaatggctttctgagagaagcaccactctsgttagcaakdhrkhhvhmbamkwtrrmrrarrrrmarrwwmtagtmttggatggccggrgmcatcttctggsmcrcmkggccvwttgtggccaacwgstvbkcwsgtarssgaaaggtggtggttgwacsctgtgagggcatcaacatttytggaaatttytwyagaaacaagttaaagtatytgsccttytccgaaagcggwtraacmccaacccgtytsgagscccctrscamwkscgagccccaagccgcattttttggcgyactktgsgmggcatkytbccgmacaagdccaaawgrgkccaggytkccmtgraacscctcaaggtgktggdtggratcccbycmccytwtgmcaagaaaaascggrtsbtggtccvtsctgcchtmaaggktgtgcgsbtgaagcmymccagaaarwttgcttacytggggsgthtgsctcatgaggtcgggtggaartmccmggcvgtgmcarbtactytggrggrgaaacggaaggaaaaggcaaagayccmttwccggaagwagragcagctyttgrggbtaaggaaaymggchgaaamgaatktkgdgaagaaaatytgcaagkwywcagrssycctcragrcyarwsraswyttkgtgtgaaccaataaagactgtttgtgccthnwrmmhrmharrmwrmhvwhmmhymawaaaaaaaaaaaaaa

SEQ ID NO: 2617 - DNA, 1910 bp, Rattus norvegicus
cacgasrgggggctgagggrtssgtagaggagaatgcgactctctaaaaccctcsccgacatggacatggctgactacagtgctgccttggacccagcctacaccaccctggagtttgaaaatgtgcaggtgttgaccatgggcaatgacacatccccatctgaaggtgccaacctcaactcatccaacagcctgggtgtcagtgccctgtgtgccatctgtggcgatcgggccactggcaaacactacggagcctcaagctgtgacggctgcaagggattcttcaggaggagcgtgaggaagaaccacatgtactcctgcaggtttagcaggcagtgcgtggtagacaaagataagaggaaccagtgtcgttactgcaggctcaagaagtgcttccgggctggcatgaagaaagaagccgtccaaaatgagcgggatcggatcagcacgcggaggtcaagctacgaggacagcagcctaccctccattaatgcgctcctgcaggcagaggtcctgtctcagcagatcacctcccccatctctgggatcaatggcgacattcgggccaagargattgccarcatcacggatgtgtgtgagtctatgaaggagcagctgctggttctggtcgaatgggccaagtacatcccggccttctgtgaacttcttctggatgaccaggtggcgctgctcagagcccacgctggtgagcacctgctgcttggagccaccaagaggtccatggtgttcaaggatgtgctgctcctaggcaatgactacatcgtccctcggcactgtccagagctagcagagatgagccgtgtgtccattcgcatcctcgatgagctggtcttgcccttccaagagctgcagatcgatgataatgaatacgcctgcctcaaagccatcatcttctttgacccagatgccaaggggctgagtgacccaggcaagatcaagcggctgcggtcacaggtgcaggtgagcctggaggattacatcaacgaccggcagtatgactctcggggtcgttttggagagctgctgctgctcctgcccactctrcagagcattacctggcagatgatcgagcagatccagttcatcaagctctttggcatggccaagattgacaacctgctgcaggagatgctgcttggagggtctgccagtgacgcgccccacgcccaccaccccctgcaccctcacctgatgcaagaacacatgggcaccaatgtcatagttgccaacacgatgccctctcacctcagcaatggacagatgtgtgagtggccccggcccagggggcaggcagccacccctgagactccacagccatcaccaccaagtggctctggatctgaatcctacaagctcctgccaggagccatcaccaccatcgtcaagcctccctctgccatcccccagccaacgatcaccaagcaggaagccatctagmawkccgccggggggtgggggtgaggcttctgctggctcacaccctcagagagcgcctgggtgtaacttagtcacggcaaagaggatgtgacaagagggaccagtcccagagcagccactgaaagggcttgtaggcccaaaaacatgcgytgaggmtcgcatgcattgccacccctgaccccacatccgkagggcagggctttgccttgagkagaccccggcggggggatgtcttccgctgcctggactsttytcaagttkaagctgccgtcttcatcttcccctcatatcttccctcaacttcttcacccctaaaggacaaccatctgcagatgttgcaggaccttgtttaaaaacaactcccttctctctcarmwrrrrmmwmwwmmwtcctggtgctggtcagggggcctggaaacaaaccttctggggtcaaaaaaaaaaaaaaaaaa

SEQ ID NO: 2618 - DNA, 2262 bp, Rattus norvegicus
atggcaggtgctgaaggcttccagtacagggctgtatacccattccgccgggagcggcctgaggacctggagcttcttcctggtgacctcctggtggtgagccgggtggctctgcaggcactaggtgtggctgatggaggagagcgctgcccacacaacgtgggctggatgcctggcttcaatgagcgcacccgacagcgaggggacttccctggaacatatgtggagttcctaggacctgtggctctggctcgaccaggccctcgcccacgggggccccgtccattgcctgccaggcccttggatggaccttctgagtcaggtcacacactggcaagcctggcagagcagttctccccacctgagtctgcgcccccgattctggtgaagctgatagaagccattgagcaagcagagctggacagtgaattttacagtaggccggagctgcccgcaccacggacagactggtccctgagtgacttggagcagtgggaccgcaccaccttgtacgatgctgttaagggcttcctgctggcattgcctgcagctgtggtgactcctgaggctgcatcggaggcttatcgggcgatgcgggaggttacggggcctgtggggctggtgctggaacccccaacgctgccgttgcaccaggccctcactctgcggttcctgctgcagcacctgggccgcgtggcccgcagagcaccctcaccagctacagctgtccacgcactggccagtgccttcgggccgctgctgctgcgtgcgcctccgccagggggcgagggtgatgggagtgagcctgcacctgacttccctgtgctgcttctagagaggctggtgcaggagcatgtggatgagcaagacaccgccccgccagcactgccacccaaaccctctaaggtaaagccggcacccacagccctggccaatggagggagtacaccctcgcttcaggatgcagagtggtactggggggacatttccagggaagaggtgaatgagaggctccgagacacacctgatggtaccttcttagtccgagatgcatccagcaagatccaaggagagtacacgctcaccctcaggaaaggcgggaacaacaagctaatcaaagtcttccaccgggacggtcactatggcttctcagagccccttaccttctgctccgtggtagagctcatctcccactaccgacatgagtcactggcccagtacaacgccaagctggacacgcgccttctctaccctgtgtccaagtaccagcaagaccaggtggtgaaggaggacagtgtagaggctgtgggtgcccagctcaaggtctaccaccagcagtaccaggacaagagccgcgagtatgaccagctctatgaggaatacacacgaacctcccaggagcttcagatgaagcgcacagccatagaggccttcaacgagaccatcttgatcttcgaagaacagggccagacacaggagaagtgcagcaaggagtatttggagcgcttccggcgagagggcaatgagaaggagatgcagaggatcctgctgaactcggagcgactcaagtctcgaatcgcggagatacatgaaagccgcacgaagctggagcaggatctgcgggcgcaggcctcggacaatcgagagattgacaagcgcatgaacagcctcaagcctgatctcatgcagctgcgcaagatcagggaccagtacctcgtgtggctcacccagaaaggtgcccgacagaggaagatcaacgagtggctgggaatcaagaatgagactgaggaccagtattcactgatggaggatgaggacgccctcccccaccatgaggagcgcacgtggtacgtgggcaagatcaaccgcacacaggcggaggagatgctgagtgccaaacgagacgggaccttcctcatccgggagagcagccagcggggctgttacgcatgctctgtggtggtggatggcgacacgaagcactgtgtcatctaccgcacagccactggctttggcttcgcagagccctataacctgtacggatccctgaaggagctggtattgcactaccagcacgcatcacttgtgcagcacaatgacgcgctcaccgtcaccctcgcacaccctgtgcgtgcccccgggcctggcccgccccctgcagcacgctgagcgccccacctcacctgcctccctgtccatgtctgtcttctaatcccttcccctggtgaacacacgcaggatgccaaaaaaaaaaaaaaaaaa

SEQ ID NO: 2619 - DNA, 1777 bp, Rattus norvegicus
ccggctccgggttctgcttggagcctcctgccagccgccgcgtctccctgccctcgctgcccctccatgtgcccaggtgccgccgctccgcctcgggccgccgctcaccccggggtctatggaagtgatggaaggacccctcaaccttgctcaccaacagagccgacgggcagaccgtttgttagctgctgggaaatacgaagaagcgatttcttgtcacaaaaaggcgacagcctatctctctgaagccatgaagctgacacagtctgaacaggctcacttatcactggaactgcaaagggatagccacatgaagcagcttctcctcatccaggagaggtggaagagagcgaagcgagaggagcggttgaaagcgcagcagagcacagaccgggatggagtcccccacctgcaggcatctcacagaccctctgaggactcggaaggccagagccctcttctttctcagacatacatcccttccacagagaagcgcctccctgaggagcagggggtctttgacagggatccagacacgttgctatttttacttcagcaaaagaatgagccgtcagagccctgtattggaagcaaggccccaaaagatgataagacgattatagaggagcaggcaaccaagattgcagagttgaagaggcacgtggagttccttgtggcggagaacgaaagactaaggaaagaaaataaacagctaaaggctgaaaaggccaggctcctgaagggcccagccgagaaggagctggatgtcgatgcggactttgtggagaagtcggagctgtggggcttgccgccacactcggacaccgccactgcctcttctacctggcagaagtttgcagctaacacggggaaagccaaggacattccaatacccaacctcccgcctctggatttcccgtctccagaactccctctgatggagctctcggaggacattctgaaaggattcatgaatgactgaatggaaggctggccacacagctgatccagcagagaatacaaagggaaagccaggccccgggggaggccagccatgctggagatgctccttcctctggagtgctgtgggagaggtggcggtgccaggacctgggaaagtcactgtgaaacatcacttatcttcttcacgactaaagctcatgattccgacttggcagacactgaactcttggaggtcgctttcttatgatacaaaccaaatggctacctggaataatttttcaaacacttatttttcttatcttcagggttaaatgtataaaagtatgtcatgtgtaattaatctataatgccataaatgataatgcaaaagctaactatggtggcctgagaggctcacttgtatttggaacatgctttctatcatgcgttgactgtatgcatttcatgcacattttgtttgtttgagatatggtgtgtaagatacacgcttccagacggaactgtacgtgccacagtttgcactactcgtaacataatgataacctcaagactatcaggagaaatatttaaatttccagtttatgaagaaaggaaccaaattattagttacgcttttaaaaaaaattaccagtttacataattaatcagggtgcattttcagttctaactttgtgttatatatgcatcatttgaaaatactgaggaactcttcctctcgttctgaatgatgcatgtgtgaaagtaatgctagttagcagtatttgattgtaagaaatcaataaaataattgtgtttcawaaaaaaaaaaaaaaaa

SEQ ID NO: 2620 - DNA, 4956 bp, Rattus norvegicus
  misc_feature (3423)..(3423): n is a, c, g, or t
atgaaatggaaacatcttcctcttctggtcatgatatctctcctcactctatcaaaaaagcatctccttctggcccagcttattccagaccctgaggacctagagagggggaacgacaacgggacgccagcccccacctctgataatgatgacaattcgctgggctacacaggctcccgtctccgtcaggaagatttcccaccgcgcattgttgagcacccttcagacctgatcgtctctaaaggggaacccgccaccctcaactgtaaagctgaaggccgccctaccccgactatagaatggtacaagggcggcgaaagagtggaaacggacaaagacgaccctcgctcacaccgaatgctgctgccaagtggatctttatttttcttacgcatagtgcatggacggaagagtaggcctgacgaaggggtctacatctgtgtagcaaggaattacctcggagaggctgtgagccacaatgcatcgctggaggtagctatactacgggatgacttcagacaaaacccttcagatgttatggtggcggtgggcgagcctgcagtaatggaatgccagcctcctcggggccacccagagcccaccatctcctggaaaaaggatggctcacccctggatgataaagacgagcgaatcactatccgaggcgggaagctcatgatcacgtacacccgtaaaagcgatgctggcaagtatgtttgtgttggtaccaacatggtaggggagcgggagagcaaagtcgcggacgtgactgtcttagagagaccgtcctttgtaaagagacccagtaatttggcagtgactgtggatgacagtgctgagtttaagtgtgaggcccgaggagaccccgtgcctacgttcgggtggaggaaagatgacggagagctgcccaaatccagatatgagatccgagatgatcatactttgaaaattcggaaggtgacagctggcgacatgggatcatacacttgtgttgcagaaaatatggttgggaaagccgaagcatcagccactttgacagttcaagagccaccacattttgtcgtgaagcctcgagaccaggtggttgccttggggcgaactgtgacttttcagtgtgaagcaactggaaatcctcaaccagctatcttttggcggagagaggggagtcagaatctgcttttctcataccagcctccacagtcctctagccggttttcagtttcccagacgggggacctcactgttacgaacgtccagaggtctgatgtcggttactatatctgtcagactttgaacgtggctggaagcatcatcacaaaggcatatttggaagttactgatgtgattgcggaccggcctcccccagtcatccgacaaggtcctgtgaatcagactgtagcagtggatggtactttaactctcagctgtgtggccacaggcagtcccgtgcccacaattctgtggaggaaggatggagtccttgtttcaacccaagattctcggatcaaacagctggagagcggggtcctgcagatccgctacgctaagctgggtgacaccggtcggtacacctgcactgcttcgacccccagtggtgaggccacgtggagcgcttacatcgaagtccaggaatttggagttccagttcaacctccaagacccaccgaccccaatttaatccccagtgcgccttcaaagcctgaagtcacagatgtgagcaaaaacacagtcactttattgtggcagcctaacctgaactcaggagcaaccccaacgtcttatattatagaagccttcagccatgcatctggtagcagctggcagaccgtggcagaaaatgtgaaaacagaaacattcgccatcaaagggctcaaacctaatgcgatctaccttttcctggtgagggcagcaaatgcctatgggattagcgatccaagccaaatatccgatccagtgaaaacacaagatgtcccaccaaccacccaaggggtggaccacaagcaggtccagagagaactgggcaatgttgtcttgcatctccacaaccctaccatcctttcttcctcttctgtcgaagtgcactggacggtggaccaacaatctcaatatattcaaggttataaaattctctaccgaccatctggagccagccatggcgaatcggagtggttagtttttgaagtgaggaccccaaccaaaaatagtgtggtgatccccgatctgagaaaaggcgtcaactacgagattaaggcccgcccattttttaatgagttccaaggagcagatagtgaaatcaaatttgccaaaaccttagaagaacgaccaagtgcccctccccgaagtgtcactgtatccaagaatgatggaaatgggacagcaattctggtcacttggcaaccgcctcctgaagacacacagaatggaatggtccaagaatataaggtttggtgtctcgggaatgagactaggtatcacataaacaagacagtagatggctctaccttttcggtggtcattccctttcttgttcctggaatccgctacagtgtagaagtggctgcaagcactggggctggccctggggtgaagagtgagccccagttcatccagttggattcccatggaaaccccgtgtctcccgaggaccaagtgagcctggctcagcagatctccgacgtggtgaagcagccagccttcattgcgggcatcggggccgcctgttggatcattctcatggtcttcagtatctggctttaccgacaccgcaagaagagaaacgggctcagcagcacgtacgcggggatccggaaagtcccgtcctttaccttcacaccaacagtaacttatcaaagaggaggcgaagccgtcagcagtggagggaggccgggactcctcaacatcagtgaacctgccacacagccatggctggcggacacgtggcccaacacaggcaacagtcacaatgactgctccatcaactgctgcacagccagcaacggcaacagcgacagcaacctgaccacctacagtcgcccagctgattgtatagcaaattataacaaccaactggataacaaacaaacaaatctgatgctccctgagtcaactgtttatggtgatgtggaccttagtaacaaaatcaatgagatgaaaaccttcaatagcccaaatctgaaggatgggcgttttgtcaatccatcagggcagcccactccctacgccaccacgcagctcatccaggcaaatctcatcaacaatatgaataacggcggcggggactccagcgagaaacactggaagcctccggggcagcagaaacaggaagtggcaccaattcagtataacatcatggagcaaaacaagttgaacaaagattatcgggcaaatgacacaatccttccaaccatcccgtacaaccattcntatgaccagaatacaggaggatcctacaacagctcagatcggggcagtagtacatctgggagtcaaggccacaagaaaggggcacggacaccaaaggcacccaagcagggtggcatgaactgggcagacttgctgccccctcccccagcgcatcctcccccacacagcaacagcgaggaatacagcatgtctgtagatgaaagctatgatcaagaaatgccgtgccctgttccgcctgcacggatgtatttgcaacaggatgaattagaagaagaggaagctgaaagaggccccacgccccctgtccggggggcagcttcgtccccagctgctgtgtcctacagccatcagtccacggccactctcaccccgtctccccaggaagagctccagcctatgttacaggattgtccggaggacctcggccacatgccccacccaccagacaggaggcggcagccggtgagtcctcctccaccaccacggccaatttccccaccacatacttacggctacatttcaggacccctggtctcagacatggatacggatgccccagaagaggaggaagacgaagctgacatggaagttgctaagatgcagacccgaaggctgttgttacgtgggcttgaacagaccccagcatctagtgttggggacctcgagagctcggtcactggctccatgatcaatggctggggctcagcctcagaagaggacaacatttccagtgggcgctccagtgtcagttcatcggatggttcctttttcactgacgcggattttgcccaggcagttgcagcagccgccgagtatgcgggcctgaaggtggctcgccgccagatgcaggatgctgctggccgccgacacttccatgcctcccagtgccctaggcccacgagtcctgtgtctacagacagcaacatgagtgctgctgtaatccagaaagccagacccaccaagaaacagaagcaccagccaggacatctgcgcagagaggcctacacagatgatcttccaccacctccagtgccaccgcctgctataaaatcgcccagtgtccagtccaaggcacagctggaggcacggcctataatggggccaaagctcgcttctatagaagcgagagcagacagatcatcagacagaaaaggcggcagttacaaggggagagaagctctggacggaagacaagtcactgacctgcgaacaagcccaggtgaccccagagaagcacaggagcagccaaacgaagggaaagcacgagggacgaagacagcaaagcgagaccttccaccagcgaagacacacctcatcccagaggatatccttccgtactgtaggcctactttcccaacgtcaaacaaccctagggatcccagttcttcaagctcaatgtcatcaagaggctcaggaagccgacagagagagcaagcaaatgtgggccgaagaaatatggcagaaatgcaagtacttgggggatttgaaagaggagatgagaataatgaagaattagaggaaactgaaagctga

SEQ ID NO: 2621 - DNA, 1346 bp, Rattus norvegicus
tggtacctgccccagaacaataggcaagtgcgatgattcttctgtggtcctgcctcctggtggctgtcgtaggtattctaggcacagcgacacctcagcctgggaattcctctctgcatcgcctcaccaggcagctgctacagcagtaccacaaggaggtcagaccagtttacaactgggctgaggccaccactgtctacctggacctttgcgtccatgctgtattggatgtggatgtacagaatcaaaaattaaagacaagcatgtggtaccgagaggtttggaatgatgagtttctgtcctggaactctagtctgttcgatgatattcaagagatctctctccctctcagtgccatctgggcccctgatatcatcattaatgagtttgtggatgtcgaaaggtctcctgacctgccctatgtatacgtgaactcttccggaacgattagaaaccacaagcccatccaggtggtctccgcatgcagtttgcagacatacgctttcccctttgatatccagaactgcagtctcaccttcaatagcatcctgcatacagtggaagacatagacctgggcttcctgaggaaccaagaagacattgagaacgacaaaaggtcttttctgaatgacagcgagtggcagcttctttctgtgaccwcsacttaccacatccggcagagcagcgctggtgacttcgcacagattcggtttaatgtaktgattcgcagatgtccattggcctatgttgtgagcctcttgattcctakcatcttcctgatgctcgtggacctgggaagcttctacttgccccccaactgtcgtgccagaattgtgttcaagaccaatgtgctggtgggctatacagtcttcagggtcaacatktctgatgaggtgccaagaagcgcagggtgcacatctctgattggggtcttctttaccgtctgcatggccctcttggttctcagtttatccaaatccatcttgttgatcaaattcctctatgaggagcggcacagtgagcaagaacggcctcttatgtgccttcgaggggactctgatgccaatgagtctagattgtacctcagagctccatgtgctgaggacacagagtccccggttcgtcaggagcaccaggtcccatcagatactctgaaggatttctggttccagctccaatccatcaacaactctctccgaactcgggatcaggtttaccagaaggaggtggagtggctcgccatcctgtgccactttgatcagctgctcttccgaatctaccttgccgtgctggggctctatactgtcaccttatgctctctctgggcactgtggagcaggatgtga

SEQ ID NO: 2622 - DNA, 7231 bp, Rattus norvegicus
acctacctccccgcggtgccagaggggctcacagagctgaggacgcgtgcagtaccgcccaaggtccctcattctccgcggctagcatctgacgcaggtgccgagggaactcggggcacctttctgtgtcccttccctccatcgaccctgctccgaaacccagccagccagctaccactgcggccaccgcccgaggggacttgcggaggagacgccggcgggaggagggcttcgcagcccccacccccacccccacccccagcccagagcatccctgctgcagcgcagcaagacccggggctgccagcccccaggaatccctagctgcttagcagggataacggactgaagttcttggaggagcgagttcaactcttcaagctgaactatgaccactttactcttggtctttgtgactctgcgggtcatcgctgcagtgatctcagaagaagttccagaccatgacaactcactgagtgtgagcatccctcaaccatccccactgaaggccctcctagggacttccctcaccatcccctgctacttcatcgaccccatgcatcctgtgaccactgctccctccactgcccccctcaccccaagaatcaagtggagccgtgtttccaaggaaaaggaggtggtactgttggtggccactgaaggacaggttcgagtgaacagcatctaccaagacaaggtgtcacttcccaactatccagccatccccagcgatgccaccttggaaatccagaaccttcgctccaatgactctgggatctatcggtgtgaagtgatgcatggcattgaggacagcgaagccaccctggaggtcatagtaaaaggcattgtgttccactacagagctatttccacacgctacacactggactttgaccgagcccagcgggcttgccttcagaacagcgccatcatcgccacccctgagcaactgcaggccgcctatgaggatggcttccaccagtgtgatgcaggctggctggctgatcagacagtcagataccccatccacactccccgggaaggttgctatggtgacaaggacgagttccctggagtgaggacctatggaatccgagacaccaacgagacctatgatgtgtactgcttcgctgaagagatggagggtgaggtcttttatgccacatccccggagaaattcaccttccaggaggcagccaacgagtgccggaggctgggggcacggttggccaccacaggccagctctaccttgcctggcagggcggtatggacatgtgcagcgctggctggctggcggaccgcagcgttcgctaccccatctccaaggctcggcccaactgcggaggcaacctcctgggtgtaaggactgtctatctgcacgccaaccagacaggctaccctgatccctcatcccgctacgacgccatctgctacacaggtgaagactttgtagacatcccagaaaacttcttcggagtgggtggtgaagaggacatcaccatccagacagtgacctggccagatctggagctgcccctgccccgtaatattacggagggagaagcccggggcaatgtgatcctcactgcaaagcccatcttcgacatgtcccccactgtctcagagcctggggaggccctcacacttgcccctgaagtggggaccacagtcttccctgaggctggggagagaactgaaaagaccaccaggccctggggctttcccgaggaagccacacgtgggcctgattctgccactgccttcgccagtgaggacctggtggtgcgagtgaccatctctccaggtgcagttgaggtccctggtcagccccgcttgccagggggagttgtattccactaccgcccgggctctaccagatactctctgacatttgaggaggcacagcaggcctgcattcgcacgggagcagccatagcttctcctgagcaactccaggctgcctatgaggcaggctatgagcagtgtgatgctggctggctgcaggaccagactgtcagataccccattgtgagcccacggaccccatgtgtgggtgacaaggacagcagccccggagtcaggacctatggcgtgcgcccatcatcagaaacctatgatgtctactgctacgtggacaagcttgagggggaagtgttcttcgccacacaaatggagcagttcaccttccaggaagctcaggccttctgtgcagctcaaaatgctaccctggcctccactggccagctctacgctgcctggagccagggcctggacaagtgctatgctggctggttggcagatggcaccctccgataccccatcgtcaaccctcggcctgcctgtggtggtgacaagccgggcgtgagaactgtctacctctaccccaaccagaccggcctccctgatccactgtccaagcaccatgccttctgcttccgaggtgtgtcagtggtgccctctccaggtggtacacccacatcgccctctgacatagaggactggatcgtcactcgagtggagcctggcgtggatgctgtccccttggagccggagacgacagaagtaccatatttcaccactgagccagaaaaacagactgaatgggagccagcctacaccccagtgggcacatccccattgccagggatccctcccacatggcttcccaccgtcccagcagcagaggaacacaccgaaagtccctctgcctctcaagagccctctgcctcgcaagtcccttccacatcagaagagccatacacaccttcacttgcagtgccaagcgggaccgagctgcccagctcaggggacacatcaggggcacctgacctcagtggtgacttcacaggcagcacagacacttcaggacgccttgactccagtggggagccatcaggaggcagtgaaagtggacttccctctggcgaccttgactccagtggtctcggccccacagtgagctcaggcttgcctgtagaaagtgggtcagcctcgggagatggagaaatcccctggtcgagcactcccacagttgacagactgccctctggaggtgagagccttgaaggttctgcctctgcctctggaacaggagaccttagtgggctgccttcaggaggggaaattacagaaacttctgcttctgggacagaagaaatcagtggacttccttctggaggagacgatctagaaacttctacctctggaatagatggagccagtgtgcttcctactggaagaggaggtctagagacgtctgcctctggagtagaggacctcagtggacttccttctggagaagaaggttcagaaacatctacctctggaatagaggacattagtgtacttccgactggagaaagtccagaaacttctgcttctggagtgggagacttgagtggacttccctcaggaggagaaagtctagaaacatctgcttcaggtgtagaggatgtcacccagcttcctactgaaagaggaggtctagagacttctgcctctggaatagaggacatcactgtgcttcctactggaagagaaaatctagaaacttctgcctctggagtagaggatgtcagtggacttccttctggaaaagaaggtctagagacttctgcctctggaatagaggacattagtgtgttccctactgaagcagaaggtctagaaacttctgcctccgggggatatgtcagtgggattccttctggagaagatggtacagaaacctctacttctggagtagagggtgtgagtggtcttccttctggaggagagggtctagaaacgtctgcctctggagtagaagatcttggtcttcctacaagagatagtctagagacttctgcctcaggagtagatgttactgggtatccttctggaagagaggacacagaaacctctgttcctggggtaggtgatgaccttagtggacttccttctggacaagaaggcctagagacctcagcttcaggagctgaggaccttggtggcttgccttctggaaaagaagacttggtagggtctgcttctggagccctggacttcggcaagctaccttctggaactctaggaagtggtcaaactccagaagctagtggccttccctctggatttagtggtgaatattctggagtggacattggaagtggcccatcctctggcctgcctgactttagtggacttccatccggcttcccaacagtctcccttgtggacagtaccttagtggaagtgatcacagccaccactgccagtgaactggaaggaagggggaccatcagcgtcagtggttcaggagaagagtcagggccgcccctcagtgagttggacagtagtgcggacattagtggtctcccttcaggaactgaactcagtggccaaacatccggatctcttgatgtcagtggagaaacatctggattttttgatgttagtggacagccatttgggtcttctggcactggtgagggaacatctgggattcctgaagtcagtggacaggccgtcaggagtcctgacaccactgagatatctgagcttagtggactgtcctctgggcaaccagatgtcagtggagaagggtctggaattctctttggcagtggccaatcctctggcataacatctgtgagtggagaaacctctgggatttctgatctcagtgggcaaccttcagggttcccagtgctcagcggaacaacacctggaacccctgacctggcttctggcgccatgagtggcagtggagattcttctggcattacgtttgtggacaccagtcttattgaagtgacccctaccacatttagagaagaagaggggttagggtctgtggaactcagtggcctcccttctggggagacagatctgtctggcacatctgggatggtggatgtcagtggacaatcttctggagcaatcgattccagtggactcatatcccccactccagaattcagtggcctcccaagcggagtagctgaggtcagtggagaggtctctggagttgagactgggagcagcttgtcctcgggagcattcgatggcagtggacttgtctcaggtttccctacggtgtctcttgtagacagaactttggtggagtctataaccctggctcctactgctcaagaagctggagaagggccttccagcattttggaattcagtggtgcccattctggaacaccagacatatctggggacctctctgggtctttagaccaaagcacatggcagcctgggtggacagaagccagcacagagccaccaagctccccatattttagtggggacttctctagcaccactgatgcaagtggagaatccataactgccccaactggcagtggggaaacctcggggcttccggaagtcactttaatcacttcagagttagtggagggcgtgactgaaccaactgtttcccaggaacttggccatggtccttctatgacatatactccccggctctttgaggccagtggggaagcctcagcatctggggaccttggtggacctgtaacaatctttcccgggtctggggtagaagcttcagtcccagaaggcagcagtgacccatctgcttaccctgaggctggagtgggagtgtctgctgcccctgaggccagcagtcaattgtctgagttcccagatctgcatggaatcacctctgcctcccgtgaaacagatctggagatgacaaccccaggcacggaggtgagcagcaacccatggacctttcaggaaggcaccagggagggatccgctgctccagaagtgagtggagaatctagcactacctccgacatagatgcaggcacttcaggtgtgccttttgccacgcccatgacttctggagacaggactgaaatcagtggagaatggtctgatcatacctcagaggtgaatgttaccgtcagcaccaccgtcccagagtccaggtgggcccagtctacccagcaccctacagagacacttcaagaaatcggatccccaaatccctcatactcaggagaagagacccaaacagcagaaacagccaagtccctgacagacacccctacccttgcttctccagaagggtcaggagaaacagagtcaaccgctgcagacattgatgagtgcctctcaagcccttgtctgaatggagccacctgcgtggatgccttggacactttcacatgcttatgccttccgagctacagaggggacctgtgtgagatcgaccaggagcaatgtgaggaggggtggaccaagttccagggccactgttatcgccactttcccgaccgcgagacctgggtggatgcagagagacggtgtcgggagcagcagtcacatctgagcagcatcgtcacccctgaggaacaggagttcgtcaacaaaaatgctcaagactaccagtggatcggtctgaatgacagaaccatcgaaggggacttccgctggtctgatggacactccctgcaatttgagaagtggcgtccaaaccaacccgacaatttctttgccactggagaggactgcgtagtgatgatctggcatgagaggggtgaatggaacgatgtcccctgcaattaccagytscccttcacatgtaaaaagggcacagtggcctgtggagaacccccagcggtggagcatgccagaacccttgggcasamgarrgatcgctatgagatcagctccctggtgcggtaccagtgtactgagggctttgtccagcgccatgtgcccaccatccggtgtcagcccagtgsgsactgggaagagcctcgaatcacttgcacagaccccaacacctacaagcacaggctacagaagcggassatgagacccacacggaggagccgccccagcatggcccactgagaggagcttccacaatgtgcccaggatgctgagcccagcggccagccatgctgaccgtgcatcccactcacatggtgtcttcttgtcgctttttgtcatataaggaatccattaaaraarraaaaaaaarccacattgtgtgtgccccactccccatatcacccaaactgcatctaatttatccaccaccatcaccgccccccataaaaaaccgccaaagcaaattcactgtaacccatggactgagtttagagacatttctttcatttcccaccgtgcctttccagggaccagtgcagggacagggtgagaagagttaaattaaataaagaagattaaaaaaaaaaaaaaaaa

SEQ ID NO: 2623 - DNA, 2314 bp, Rattus norvegicus
ttgaaaagaaagaaaaaagtgatttctatggagttgggacttgaaacccaagacctacatacgacatgttaaccaagagttccccattgacctatatataccctagctcaaggaacagtggatgaataatagatatttggggggaccctgcggggaagtgattaaaagcagagccgagcctcagggggccgccgcggggagggtcttttgggggcctccttgccccgccccagtccggccgcggctagagttcgagtcactgctccgcagccctgaggatccggggcatgagcggagtttggggggccggagggcctcggtgccaggcggcgctcgcggtcctggcctctctgtgccgggcccggccgccccctctcgggctggacgtggagacttgtcagagcttcgagctgcagcccccggagcagagtccaagcgcggccgactcaggcacctctgtcagcctcctcgcagtggtagttattgtgtgtggtgtggccctggtggcagtttttttctttctcttttggmmgctgtgctggatgccctgkaggaacaaggaggyctccagcccttcttctgctaacccygyktcakwkatcctycawagccccagmtccagaggcaacatggcggataasctgaaggaccccagtgccctgggcttcctggaggcagctgtaaagatcagccatacttcccyagatatcccagccgaggtgcagwtgtcggtcaaagagcacattatgcgccacaccaaactgcagcgacagaccacagagccagcgtcgtctaccagacacacgtccttcaagcgccacctgccacggcagatgcatgtctccagtgtggactacggcaatgaactgccgccggccgccgctgaacagcccaccagtattggccgtatcaagcctgagctctacaagcagaagtcagtggatggggatgaggccaagtctgaggccgccaagagctgtgggaagatcaacttcagcctccgctatgactatgagagtgagaccctgattgtacgaatcctgaaggcctttgacctccctgccaaggacttttgtggaagttctgacccttacgttaaaatctacctcttgcctgaccgcaagtgcaagctgcagacccgggtgcaccgcaagacgctgaaccccacctttgatgagaacttccacttccccgtgccctatgaggagctggctgaccgcaagctgcatctcagtgtctttgactttgaccgcttctcccgccatgacatgattggcgaggtcatcctggacaatctcttcgaggcctctgacctgtcccgggagacctccatctggaaggacatccagtacgctactagtgaaagtgtggacttgggagagatcatgttctccctctgctacctgcccacagcaggcaggctcaccctcacggtgatcaagtgtcgcaatctcaaagcaatggatatcacgggctactcagatccctacgtcaaagtgtccctactatgtgatgggcggagactgaaaaaraaraaaamammcvtvrwraagaacaccctcaaccctgtcyacarsgaggccatcatctttgatatccccccagaaaacatggatcaagtgagcctgctcatctccgttatggactatgacagagttggccacaacgagatcataggagtgtgtagagtggggatcagtgctgaaggtcttggcagggaccactggaatgagatgttggcatacccacgaaagcccatcgcacactggcactgcttggcggaggtaaagaaatccttcaaagaggkrrsycmccggytgyswkkycrttsrcrtgkwtrctgcargcggcgtgggctgcagaatggcargcggctgctctgagtccttggscttttatggaaaagggggcmtggggagcatccagtgtataacatggtatatatgatgaggaaggacacagatgctgcctggcaaaaagttcctgattttgagcattttatattttgagcatttatggtgatggggscagggatgctatagttcagttggtagactcctggtctagcatgcatgaaaccccgagttcaatccccagcactgcctaaagttaggcgtggcagcacacactgcaacccaagtacttggcaggaagattcaaagtttaaggtcattctcagcttcatagcaggtttgagggcaatgtgggctacacaggaccttgtcttgaaagaaagaaagaaaggaagaaagaaagaaaggaagaaagaaagaaagagaaagaaagaaggaagaaagaaagaaaaaaaaaaaaa

SEQ ID NO: 2624 - DNA, 761 bp, Rattus norvegicus
atggaaatctgcaggggaccttacagtcacctaatctctctccttctcatccttctgtttcgttcagagtcagctggccaccctgctgggaaaagaccctgcaagatgcaagccttcagaatctgggatactaaccagaagaccttctacctgaggaacaaccagctcattgctgggtacttacaaggaccaaataccaaactagaagaaaagatagacatggtgcctattgactttcggaatgtgttcttgggcatccacgggggcaagctgtgcctgtcttgtgtcaagtctggagatgacaccaagctccagctggaggaggttaacatcactgatctgaacaagaacaaagaagaagacaagcgctttaccttcatccgctccgagacaggccctaccaccagcttcgaatcacttgcctgtccaggatggttcctctgcacaacactagaggctgatcatcccgtgagcctcaccaacacaccaaaagagccctgtacagtcacaaagttctacttccaggaagaccaatagcactgcctcggcctgtccttccccactcccaggccagcaatgaccaccaactgcctgatcactctggccatcattggggtctgaggaacaatttttgcagggtgtacagtagaaggagacagaagagtcctgatgatagatctctgccttcagtctgttggctaacccaatccccatgatgatttcagaataatctttcaaactgcaaaaaaaaaaaaaaaaaa

SEQ ID NO: 2625 - DNA, 1707 bp, Rattus norvegicus
atgtcccatcaacacacagtgccagtgactgttccagctgtggttcaggaatctctcaagactgtatgttctccagctcaaactcagcaggaacaaacaaagcaaccaactccatatcctgcacaatgccaggtcttcactgacactcaagagaagggctttcccaaacatgaggagaaggaggcaaaccccgtgaaagatctgcctgagcaagagagtgagcaccaccagcagccaggaccacagaagcagcagctgcaggtgaaaaagccagagcaggagctgcaggaacaggaactgcattcggagaagcagccacaggagccacaggggctcctgtgcctgggacagcaacagcagcgagagccacaagagcaagaacagcaccttagacagcaccagcagccacagcaagagtcacaggggcaggggctgtgcttggggcagcagcaagatgtgctggcaccacaggagctgcatatgggacagcaccagaaggagaagctgcaggagccagaactgcctctgggtcagcagcagaaaactccagaggaacaggaactgattctaggagaaaagcagcagaagctgcacctggtagagaggcaccaagagccacaggagcaggagctgcaccacggacagaaacagaagcaacagcaaccacaagaacaggagttgcagttggtacagcaccagaagcagaagcagcatgaaccagaattgtgcctgaggaagcagcagcagcaggagtcacatgagcgagaactgcacctgggaaagcagcagcagcaggagtcacatgagccagaactgcacctgggaaagcagcagcatcaggagtcacatgaaccagaactgcacctgggaaagcagcagcatcaggagtcatgtgagccagaactgcacctaggggaacagcagcatcaggagcagcagcagcatcaggagtcatgtgagccagaactgcacctagggaaacagcagcatcaagagactcaggagtcagaactgcaactgggaaagcagcagaaaccacatgagccagatatggtactggatccgaaagagaagcagaaacttcatgacccagaactgcacctgggaaagcagcagcaccaggagtctcaggagtcagaactgcaagtggaaaagaaacagcatgagaagtccccagagccagaactgcacctgggaaagcagcaggagttacatgagcctgatatgacagaggatcagaaagagaagcagagtcttcatgaaccagaactgcacctgggaaagcagcaggagtcacatgagcctgatatgacagaggatcagaaagagaagcagagtctttatgaaccagaactgcacctgggaaagcagcaggaacaacagatagagtatgaaggctaccaaagatcaaaaagtctgaatcagttacttaagcaagagaaagcttccaggggacaggagctggatgactcacatctagaacaggagaaggagctcttggaccagcgattggatcaagaactagtaaataaggatgagcaactggaaagaaagaagcacaaattggagaacctgacacagaaggagaagcagataaagcaattagtaccaagcactgacagagtccaagagactcagccaatccaaccagtgaaagaagactctctcactacaaagaagcagcagcacagccatgaagtgcagtga

SEQ ID NO: 2626 - DNA, 609 bp, Rattus norvegicus
atgaaggtcttggccrcagggattgtgcccctactgctcattctgcactggaaacacggggcagggagcccccttcccatcacccctgtaaatgccacctgcgccatacgccacccgtgtcacggcaacctcatgaaccagatcaagagtcaactggctcaactcaacggcagtgccaatgccctctttatttcctattacacagctcaaggggaaccatttcccaacaacgtggataagctatgtgcgccmaacatgacggatttcccacctttccatgccaatgggacagagaagaccaagttggtcgagctgtatcggatggtcrcgtacctgggagcctccctgaccaacatcacctgggatcagaaaaacctcaaccccactgccgtgagcctccagatcaaactcaatgcgactacagacgtcatgagggggctccttagcarcgtgctttgccgtctgtgcaacaagtaccatgtgggccatgtggatgtgccctgtgtccccgacaactctagcaaagaagccttccaaaggaagaagttgggctgccagctcctggggacatacaagcaagtcatwagtgygktggyccaggccttctag

SEQ ID NO: 2627 - DNA, 2244 bp, Rattus norvegicus
atggacttccttgatgagcccttccctgatgtggggacctatgaagacttccacaccatagactggctgagggaaaagtcccgggacactgacagacatagaaagataaccagcaaaagtaaagagtctatttgggagttcatcaagagtctgctggacgcatggtcaggatgggtggtgatgctacttattggtctgctagcaggtaccctggctggagttatcgatctcgctgttgactggatgacagacctcaaggagggcgtctgtctgtctgcattctggtacagccatgagcaatgctgctggacctccaatgagaccacttttgaggacagggacaagtgtcccctgtggcagaagtggtcagagcttcttctgagccagtcagagggtgctagcgcttacattctgaattacttaatgtacattctatgggcattgctgtttgcatttctggctgtctccctggtacgtgtgtttgcaccatatgcctgtggctctggcatacctgagataaagactattttgagtggctttatcatcaggggctacttggggaaatggactcttctaatcaagactgtcactctcgtgctggttgtatcctctggcctgagtcttgggaaagaggggccactggtgcatgtggcatgttgctgtggcaacttctttagcagccttttctccaagtatagcaagaatgaaggcaagaggcgtgaggtgctttccgctgcagctgctgctggtgtctctgtggcctttggtgctcccataggaggtgtactcttcagtctagaggaggtcagttactactttcccttgaaaaccttgtggaggtcattttttgcagccctggtggctgccttcacactgcgctccatcaacccctttggaaatagccgcctggttctcttttatgtggagtatcatacaccttggtacatggctgaactcttccctttcatcctgcttggagtctttgggggtttgtggggaaccgtcttcacacgctgcaacattgcctggtgcaggaggcgtaaaaccaccaggctggggaagtatccagtgttggaggtcattgtggtgacagccatcactgccatcattgcttatcccaatccctacactcgccagagcaccagtgagctcatatctgagctattcaatgattgtggggctcttgagtcttctcagctctgtgactacatcaatgaccccaacatgactcggcctgtggatgacattccggaccggccagctggggttggagtttacacagccatgtggcagctggccttggcactgatcttcaaaatagtcattactatatttacctttggcatgaagattccctcaggtctcttcatccccagtatggctgtaggagccatggcaggccggatggtgggaattggtgtggagcagctggcctaccatcatcatgactggatcatcttcaggaactggtgcaggcctggagcggactgtgtcacaccagggctttatgcgatggtgggagctgcagcctgtctaggtggagtgactaggatgacagtgtctctggtagtcatcatgtttgaactgactggaggtctggaatatattgtacccctgatggcagcggctgttaccagcaagtgggtggctgatgcctttgggaaagaagggatttatgaagcccacatccatctgaatgggtacccatttcttgatgtgaaggatgagttcactcaccgtaccctagccactgatgtgatgcggccccgcaggggagaaccacctttgtcagtactaacccaggacagcatgactgtggaggatgtggagactctcataaaagagacagactacaatgggtttcctgtggtggtctcgagagattcggagcgcctcataggctttgcccagaggcgggagctaatcttggctataaaaaatgccagacagaggcaagagggcatcgkgagcaattccatcatgtacttcacagaggagccccctgagctgcctgccaacagcccacatccactgaagctgaggcgcattctgaacctgagcccttttactgtcacagaccacacccccatggagacagtggtggacattttccggaaactggggctccgacaatgcctggtgacacggagtgggaggcttcttgggatcatcacaaaaaaagacgttctgagacacatggcgcagatggcaaaccaggaccctgaatccatcatttttaattag

SEQ ID NO: 2628 - DNA, 2793 bp, Rattus norvegicus
gctaccccttcttctgtggcaagaataaacttctggtcgctgactgcaataccccccgtggagaaaatggtatgcgagggaaagcgcttagcctcttgcccttgcttcttcctcttgactgccaagttctactggatcctcacaatgatgcaaagaactcacagccaagagtatgcccattccatccgggtggatggggacatcattttggggggtctttttcctgttcatgccaagggagaaagaggggtgccttgtggggagctgaagaaggaaaaggggatccacagacttgaggccatgctttatgcaatcgaccagattaacaaagaccctgatcttctctccaatatcactctgggggtccggatccttgacacgtgttccagggacacctacgctttggagcagtcactgaccttcgtgcaggcactgatagagaaagatgcgtctgatgtgaagtgtgctaatggagatccgcccatattcaccaagcccgacaagatttctggcgtcataggtgctgcagcaagctctgtgtccatcatggtggctaacattttaagactatttaagatacctcagattagctatgcatccacagccccagagctaagtgacaacaccaggtatgatttcttttctcgggtggtcccgcctgactcctaccaagcccaagccatggtggacattgtgacggccctgggatggaattatgtgtcaacactggcttccgaggggaactatggagagagtggtgttgaggccttcactcagatctcaagggagattggtggtgtttgcattgctcaatcacagaaaatcccacgtgaaccaagacctggggaatttgaaaaaattatcaaacgcctgctggagacacctaacgctcgcgcagtgattatgtttgccaacgaggatgacatcaggaggatattggaagcagcaaaaaaattaaaccagagtgggcattttctatggattggctctgatagttggggatccaaaattgcgcccgtctaccagcaggaggagatcgcagaaggagcggtgacaattttgcctaaaagagcatcaattgatgggtttgatcgatactttagaagccgaactcttgctaataatcgaagaaatgtgtggtttgcagaattttgggaggagaattttggatgcaaattaggatcacatgggaagaggaacagtcacataaagaaatgcacagggctggagcgaattgcacgggattcatcttatgaacaagaaggaaaggttcaatttgttattgatgcagtgtattccatggcttatgcactgcataacatgcacaaagagcgctgtcctggatacataggtctttgcccaagaatggtcaccatcgatgggaaagagctactgggttacatcagggccgtgaattttaatggcagtgctggtacacctgtcacttttaatgaaaatggagatgctcctggacgctacgatatcttccagtatcagataaacaacaaaagtacagagtacaaaatcatcgggcactggacaaatcaacttcatctaaaggtggaagatatgcagtgggctaatagagagcacacgcacccagcatctgtctgcagcctgccgtgcaagcccggggagaggaagaaaaccgtgaaaggggtcccttgctgctggcactgtgaacgttgtgagggttataactaccaggtggatgaactgtcctgtgaactttgccctttggatcagagaccaaacatcaaccgcacaggctgccagaggatccccatcatcaagttggagtggcattcgccctgggctgtggtacctgtgttcatagcaatattgggaatcattgctaccacctttgtgattgtgacctttgtccgctataatgacacgcccatcgtgagagcttctgggcgggaacttagttacgtgctcctaacggggatttttctctgttactccatcacctttttgatgattgccgcacctgacacgatcatctgctccttccgacggatcttcttgggacttggtatgtgtttcagctatgcagcacttttgaccaaaacaaaccgtatccaccgaatattcgagcaagggaagaaatctgtcacagcacctaagtttatcagcccagcatcccaactggtgatcaccttcagcctcatctctgtccagctcctcggagtgtttgtgtggtttgtcgtggatcccccccacaccatcattgactatggcgaacagcgaacgctggatcctgagaacgccaggggagtgctcaagtgtgatatttcggatctgtcactcatttgttccctgggatacagtatcctcctgatggtcacctgtactgtttatgccattaaaaccagaggggtcccagagacgttcaatgaagccaaacctattggctttacaatgtacaccacgtgcatcatttggttagctttcatccccatcttttttggtacagcccagtcagcagaaaagatgtacatccagacaacgacacttactgtttccatgagtttaagtgcttcagtgtctctgggaatgctctatatgcccaaagtttatattataatttttcatccagagcagaatgttcaaaaacgcaagagaagcttcaaggctgtggtcacagctgctaccatgcaaagcaaactgatccaaaagggaaatgacagaccaaatggcgaggtgaaaagtgaactctgtgagagtcttgaaaccaacacgtcttctaccaagacaacatacatcagctacagtaatcattcgatctga

SEQ ID NO: 2629 - DNA, 576 bp, Rattus norvegicus
atgggaaagaagctggtgatggcccagaagcggggagaggctcgagccctttgcctgggtgtggccatggtggtgtgtgctgtcgttgcctactatatcctgggcacgaccatgctgcccctctaccagaaaagcgtgtggacccaggaatccacgtgccacctgattgagtccaacatcagggaccaagaggagctggagggcaaaaaggtgccccagtacccatgcctgtgggtcaatgtgtcagctgtgggccggtgggctgtgctgtaccacacggaggacactcgtgaccagaaccaacagtgctcctacatcccacgcagcctggaaaactaccaggtggcccgggccgatgtggagaaggtcagaacgaacttccacgagcatcggattttctactgcttctcaacgactcgggagaatgagaccactgtcctgtaccggcgcctctatggaccccagaccctgctcttctctctcttctggcccaccttcctgctgaccggtggcctcctcattatcgccatggtgaagatcaaccagtccctttccatcctggcggcccagaggtag

SEQ ID NO: 2630 - DNA, 1651 bp, Rattus norvegicus
atggaaatatacacttcggataactactccgaagaagtagggtctggagactatgactccaacaaggaaccctgcttccgggatgaaaacgaaaacttcaacaggatcttcctgcccaccatctattttatcatcttcttgactggcatagtgggcaatgggttggtaatcctggtcatgggttaccagaagaagctgaggagcatgacagacaagtaccggctgcacctgtccgtggctgacctcctctttgtcatcacactccccttctgggcagtggacgccatggctgactggtactttgggaaatttttatgtaaggctgtgcatatcatctacaccgtcaacctttacagcagtgttctcatcctggccttcatcagcctggaccgctaccttgccattgtccacgccaccaacagccagagcgcgaggaagctgctggctgaaaaggccgtctatgtgggtgtctggatccccgccctcctcctgactatccctgacatcatcttcgccgatgtcagccagggggacggcaggtacatctgtgaccgcctttaccccgacagcctgtggatggtggtgttccagttccagcacatcatggtgggtctcatcctgccgggcatcgtcatcctgtcctgttactgcatcatcatctccaagctgtcacactccaagggccaccagaagcgcaaggccctcaagactacggtcatccttatcctggctttctttgcctgctggctaccgtattacgtggggatcagcatcgattccttcatccttttggaggtcatcaagcaaggatgtgagttcgagagcgtcgtgcacragtggatctccatcacggaggccctcgccttcttccactgttgcctgaaccccatcctctacgccttcctcggggccaaattcaagagctccgcgcagcatgcactcaattccatgagcagaggctccagcctcaagatcctttccaaagggaaacggggtggacactcttccgtctccacagagtcagaatcctcaagttttcactccagctaacacttacgcaaagacatatataatatatatatatatatatatatatgacaaagaacttttttttatgttacacatttcccagatataaaagactgaccaatcttgtacagttttttttattgactgttggagttwatgtttctcyagttyytgtgtgtgtgtgtgtgtgtgaggtttgacttaatttatataaatattggtttttktctgttgtttgtctgtttcacgtgaatgagtgtctaggcaggacctgtggccaagttcttagtcgctgtgtgtctgtgtgtaggactgtagagctgtagaggaaggaactgaacgctccagaatgtgtggtaaatcggataaagctagaagtgaccctagctgtcgctgcataatctcttcgccccgcccaccccgttcctgaattgtttggttgtgctgtgtggtttctctgtagaagatggcacttaaaaccaaagcctgaaatggtatagaaatgctgggttttttctttcagttttcaagggtggattgatttcagtacctacaaatgtacagtcttgtattatgttgttaataaaagtcaatggtaaacttgcaaaaaaaaaaaaaaaaa

SEQ ID NO: 2631 - DNA, 483 bp, Rattus norvegicus
atgagcgataacgatgacatcgaggtggagagcgayramgagmmaycgaggtkkmrakckrcggctgacaaacgggctcaccataatgcactggaacgaaaacgtagggaccacatcaaagacagctttcacagtttgcgggactcagtcccatcactccaaggagagaaggcatcccgggcccaaatcctagacaaagcaacagagtatatccagtatatgcgaaggaaaaaccatacgcaccagcaagacattgatgacctcaagcggcagaatgctcttctggagcaacaagtccgtgcactggagaaggcaagatcaagtgcccaactgcagaccaactacccctcctcagacaacagcctctacaccaacgccaagggcggcaccatctctgccttcgatgggggttcagactccagctcagagtccgagcctgaggagccccagaacaggaagaaactgcggatggaggccagctaa

SEQ ID NO: 2632 - DNA, 801 bp, Rattus norvegicus
atgagcctgtccttgctcttcctcatcttctgcagccacctgatcctcagcgctccggctcaaggggagaagcgtctcactcccgaagggcaacccgcgcctcctaggaacccgggagactccagcggcagccggggcagaagtagcgcgacgtttgcttcgtcttctgcctcttccccagtcgcagcttctccgggcagccaaggaagcggctcggagcacagcagtttccagtggagcccttcggggcgccggaccggcagcctgtactgcagagtgggcatcggtttccatctgcagatctacccggatggcaaagtcaatggatcccacgaagccagtgtgttaagwawtttrsaratatttgctgtgtctcaggggattgtaggaatacgaggagttttcagcaacaaatttttagcgatgtcaaaaaaaggaaaactccatgcaagtgccaaatttacagatgactgtaagttcagggagagattccaagaaaacagctataatacctatgcgtcagcgattcacagaactgaaaagacaggccgggagtggtatgtggccctgaacaagagagggaaagccaaaagaggctgcagcccacgggtcaaaccccagcacgtctccacccacttcctacccaggttcaagcagtccgagcaaccggaactttccttcaccgtcactgttccagaaaagaaaaagccacctaggccctggaaaccaaaggttcccctgtcgccatctcgtagaagccccagtccagtgaagtacagactgaagtttcgcttcggatga

SEQ ID NO: 2633 - DNA, 1410 bp, Rattus norvegicus
atggcagtgcctgctctgtggccctggggagtatacttgcttatgagcctgctgtccttgggatcttgcctggacacactggaggtgtgccccagtcttgacatccgctcggaggtgacagagctccgtcggctggagaactgcagtgtggtggagggtcacctacagatcctcctcatgtttgccgccacgggagaggacttccgaggcctcagctttcctcgcctcacccaggtgactgactacctgctgctgttccgagtctatggcctagagagccttcgagacctcttccccaaccttgctgtgatccgaggtgcgcgcctcttcctgggctatgcacttataatcttcgagatgccccacttgagggacattgggctgccgtcacttggggccgtgctgcgtggggccgttcgtgtggagaagaaccaggaactttgccatctctccaccattgactggggcctgctgcagcctgcacctggtgccaaccacattgttgggaacaagctgggtgaggagtgtgctgacgtgtgccctggtgtgctgggggctgctggtgagccctgtgtgagaaccaccttcggtgggcacaccgactacaggtgttggacctccagccactgtcagagagtgtgtccctgcccccgtgggctggcctgcacagtaggtggcgagtgctgccacagtgaatgtctcgggggctgcagtcagcctgaagaccctcgagcctgcgtagcttgccgccacctctacttccaaggagtctgcctccccgcctgccctccgggcacctaccagtatgagtcttggcggtgtgtcactgcggagctctgtggccatctgcgagaggttcctggacatgccaccgcctttggcatctacgagggcagctgcctagctcagtgccctccaggcttcacccgtaatggcagcagcattttctgccataagtgtgagggcctgtgccccaaagagtgcaaggttgggacaaagaccatcgactctgtccaagccacacaggacctagtgggctgcacccatgtggaggggagcctcatcctcaaccttcgacaaggctgtcagtattcttcctggtcacgcccttggccacgccctccgtggtcacaccctccctcccttgcatggttccccctcatccctccgttcctacctcctcgtttgtccctccagctcccttccctgtggacccatcaccttccctgggctgctccactcctatctttctcatccccagacaatctggagccagagcttcaacgcaacctggggctggtggagaccatcaccggcttcctcaaaatcaagcactcttttgcactcgtgaccctgggatttttcaagaacctcaaactaatccggggagattccatggtggatgggtaa

SEQ ID NO: 2634 - DNA, 1386 bp, Rattus norvegicus
atgtacaatacggtgtggagtatggaccgcgatgacgcagactggagggaggtgatgatgccctattcgacagaactgatattttatattgaaatggatcctccagctcttccaccaaagccacctaagccagtgacgtcagcagttacaaacggaatgaaggactgtttcgtttctcttcaagatgcagagtggtactggggagacatttccagggaagaggtaaatgacaaattgcgggacatgccagacggtactttcttagttcgagatgcctcaacaaaaatgcagggagactatacactgactttgaggaagggaggaaataataaattaataaagatctatcatcgggatggtaattatggcttttctgagcccctgacgtttaattctgtggtggagctcattaaccactatcaccatgaatctctcgctcagtacaatcccaaacttgatgtgaagctgatgtacccagtgtccagataccaacaggatcagttggtaaaagaagataacattgatgcggtaggtaaaaacctgcaagaattccactctcagtaccaggagaagagtaaagagtacgataggctgtatgaagagtacaccaggacgtcacaggaaatacaaatgaagagaactgccattgaagcctttaatgaaacgattaaaatatttgaggagcagtgtcatacccaagaacaacacagtaaagactatattgagcggtttcgcagagaggggaatgagaaggagattgagcggattatgatgaattacgataaattgaaatcccgtctgggtgagattcacgatagcaaagtgcgtcttgagcaggacttgaagaaacaagctttggacaaccgggaaatagataaaaaaatgaatagcatcaagcctgacctgatccagctgcgtaagatccgagaccagcacctcgtatggctcaatcacaggggagtgaggcagaggcgcctgaacgcctggctggggatcaagagtgaggacacagatgagagctattttatcaatgaggacgatgagagcctcccgcattatgatgagaagacctggtttgtggaggatgtgaaccgagtacaggcagaggacctgctttatgggaagccagacggtgcattcttaattcgtgagagtagcaagaaaggatgttacgcttgttctgtggttgcagacggggaggtgaagccctgtgtcatctacagccctgctcgaggatatggctttgcagaaccctacaacctgtacggctcgctgaaggagctggtgctccactaccagcagacatccctggtccagcacaacgactccctcaacgtcacgctcgcctaccctgtccacgcacagatgccctcgctctgcagataa

SEQ ID NO: 2635 - DNA, 393 bp, Rattus norvegicus
atgagcttccagctccgcagctccgcccgcatccctagccggtcctgctcgtcattcaccctgctggcatttctgctgctgttcacactgccacagcatcgagctcaagctgctcctttctcggccatggttgcaacggagctacgctgtgtttgcttaaccttagctccaagaattaaccccaaaatgatcgctaatttggaggtgatccctgcaggtccacattgccccaaggtggaagtcatagctaagttgaagaaccagaaggataatgtttgtcttgacccacaagctccgttgataaagaaagtcattcagaaaatattgggcagtgaaaataagaaaacaaagcggaatgcacttgcactggtcagatcagccagtactcaataa

SEQ ID NO: 2636 - DNA, 1493 bp, Rattus norvegicus
gcatggagcagaaaagaaagcacagtagttaagggacttcctgagacggtgcagctaggacatgtaggagctagccctgaactcacatagcagccccgtgtgttggcttttctctggagtctgaggacagtcctccgtgcaaacttttgtctatccagcaagcttgattgagctctggagtctcagcaccttgccccatacactcagtacagtgtctgggtgggatggagggagctgggtgaaacagaagcatgtgttggggaatgccagatacctggcactgactcctttgtttgcttccaggctgggggttcactgaccatggccatgccctctgcgttgtcttcgaggccctgggatgctgtgttccccaataccactacagcagcatggaccaatggaagtgtgccagagactcccctgttctacctattcgcccggctggatgaggaacttcatgccaccttccccagcctgtggctggcactaatggtcgtgcatggcaccatcttccttgccgggctgttcctcaatggactggcgctgtacgtcttctgctgccgcacgcgggccaagacaccttcagtcaccatatccatcaacctggtggtgactgacctgctggtgggcctgtccctgcccacacgctttgcagtcttctacggtgcccgcggctgcctacactgtgccttccctcacgtcctgggctacttcctcaacatgcactgttctatcctcttcctcacctgcatctgtgtggaccgctacctggccattgtgcaacctgagggctcccatcgctggcgccagccggcctgcgccaaggctgtgtgcgtctttgtgtggctggcagcgggagtcgtgaccctgtctgtattgggtgtgaagactggtggacggtcatgctgccgggtctttgctctgaccgttctggagttcctgctgccgctactggtcatcagcgtgttcacaggccgtatcatgtgtgcactgtcgaggccaggcctcgtacgccagggtcgtcagcggcgcatgagggccatgcagctgctgctcacggtgctggtcatcttcctggtctgtttcacacccttccatgcccgccaggtgactgtggcactgtggcccaatgtgccttaccataccagccttgtggcttaccatgtggccgtcaccctcagcagcctcaacagctgcatggaccccatcgtctactgttttatcaccagtggtttccaggccactgtccaaggcctcttctaccagcgtggagaagaattcaagcccagcactatggatatggtcagcatgcacaagagcaccaagggctcagccccattcacatcctcagcaccggttctcacaccctcacccagcctttgaccaacgggcctgagcataggtagcagtactccaccaagggtcgaaggtcaaggctctgaaaggttaccaaccagacatatcctggtcctgggacagcagttaatttctat

SEQ ID NO: 2637 - DNA, 2530 bp, Rattus norvegicus
atggccgacatcaagacgggcatcttcgccaaaaacgtgcaaaagcggctcaaccgggcacaggaaaaggtcctccagaagctgggaaaggcagatgaaacaaaagatgaacagtttgaagaatatgttcagaacttcaagcggcaagaggcagagggtaccagacttcagcgagaactgcgaggatatttagcggcaatcaaaggtatgcaggaggcctcaatgaagcttaccgagtcactacatgaagtctacgagccagattggtatggacgggaagatgtaaagatggttggtgagaagtgtgatgtgctgtgggaagacttccatcaaaagctagtggatgggtccttgctgacactggacacgtacctgggccagtttcctgacataaagaatcgcatcgctaagcgcagcaggaagctcgtggattacgacagtgcccgccatcacctggaggctctgcagagttccaaaaggaaggatgagagtcggatctctaaggcagaagaggagtttcagaaagcacagaaagtgtttgaagagttcaatgttgacttacaagaagaattgccatcactatggtcaagacgagttgggttttatgtcaatactttcaaaaacgtctctagccttgaggccaagtttcacaaggaaatcgcagtgctttgccacaagctttatgaagtgatgacgaaacttggtgatcagcacgctgacaaggccttcagcattcaaggagctcccagtgattcgggtcctcttcgcattgcaaagacaccatcacccccagaggaggcttcacccctccccagcccaacggctagtcccaaccacacattagcacctgcatctcctgccccagtgcgacccagatcaccttcacagacaaggaaagggcctcctgtcccacctctgcctaaagtcaccccaacaaaggaactacagcaggagaacatcatcaatttctttgaggacaactttgtaccagaaatcaatgtgacaacaccttcccagaatgaagtcctggaggtgaagaaggaggagactttgctggatttggactttgaccctttcaaacctgatgtgaccccagcaggttctgctgcagcgacccactcacccatgtctcagacattgccctgggacttatggacgacaagcactgatttggtacaaccggcttctggaggttcgtttaatgattttacccagccccaggatacttcattattcacgatgcagacagatcagaatatggctgaaactgagcaggctctacctacagagccccaggcagaggagcctcccaccactgctgctgcacctactgctgggctggaccttgggctagagatggaggagccaaaggaggaggcagcgatccctcctggaactgatgctggtgagactgtgggaactgaggggtccacaggggaggaagcagaggcagagaaggcagccctacctgctggagaaggcgaaagtcctgagggagccaaaatcgatgtggaaagcactgagcttgcaagcagtgagagccctcaagcagcagagcttgaagctggtgctcctcaggaaaaggtcatcccttctgttgtcatagagccagcctccaaccatgaaggagaagaacaccaagaaaccactacgggtactgaaacaagggaggccactgaggacgtggctccccagggcccagccggtgagaagcaggaactggctacagagcccacgcctctggattctcaggctgctacgcctgcaccagcaggtgctgtggatgcttcgctgtctgcaggggatgccgctcaggaactgcctcctggctttctctacaaggtggaaactctgcatgacttcgaggcagcgaactctgatgaacttaccctacaaaggggtgatgtggtgctcgtggtgccctcagactcagaagccgaccaggatgcakgctggttggtgggggtgaaggagtcagactggcttcagtacagagacctggccacatacaaaggcctctttccagagaacttcacacgacrcctrgartagggctgcagatgttgtaaaagggtcatgtgactgggtttttaaaccttcatgaaattcagaggagttcacttttgctactacactcttaatgactgacagacaggtgccagatgaggcttgagaagaccgatcaatagagcatgtatgcaaaagctgtaagaggggaaaaaaacaaaataaggaaagagtccttactctgttccctgtgttcagtagaggtctgtttgtgctttgtctaaccatggacactggtacttgattcccctcccaccaaatctaaagtagctttctccagaccagactttgacttctttgtatcaagtgtgtggtgttgagtgattgccctgcagatgtgatgagttatcctgtagtaagacattatcttactcccttgcccgatgtgagtgagcacgtgctctcttttcctttcaagtttactgcgattaaaactgaacagctgcaaaaaaaaaaaaaaaaa

SEQ ID NO: 2638 - DNA, 1116 bp, Rattus norvegicus
atggagtacgagggttacaacgactccagcatctacggtgaggagtattctgacggctcggactacatcgtggacttggaggaggcgggtccactggaggccaaggtggccgaggtcttcctggtggtaatctacagcttggtgtgcttcctcgggatcctaggcaatggcctggtgattgtcatcgccaccttcaagatgaagaagacggtgaacaccgtgtggtttgtcaacctggccgtggctgacttcctgttcaacatcttcttgcccatccacatcacctatgccgctatggactaccactgggtgttcgggaaagccatgtgcaagattagtagctttctgctaagccacaacatgtacaccagcgtcttcctgctcactgtcatcagcttcgaccgctgcatctccgtgctcctccccgtctggtcccagaaccaccgcagcgtgcgtctggcctacatgacctgcgtggttgtctgggtctggctttcttctgagtctcccccgtccctcgtcttcggacacgtcagcaccagccacgggaagataacctgcttcaacaacttcagcctggcggcgcccgagcctttctctcattccacccacccgcgaacagacccggtagggtacagcagacatgtggcggtcaccgtcacccgcttcctctgtggcttcctgatccccgtcttcatcatcacggcctgttacctcaccatcgtcttcaagttgcagcgcaaccgccaggccaagaccaagaagcccttcaagatcatcatcaccatcatcatcaccttcttcctctgctggtgcccctaccacacactctacctgctggagctccaccacacggctgtgccagcctctgtcttcagcctgggactgcccctggccacagccgtcgccatcgccaacagctgtatgaaccccatcctgtacgtcttcatgggccacgacttcaaaaaattcaaggtggcccttttctcccgcctggtgaatgccctgagcgaggacacaggaccctcctcctaccccagtcacaggagcttcaccaagatgtcctcattgattgagaaggcttcagtgaatgagaaagagaccagcaccctctga

SEQ ID NO: 2639 - DNA, 1401 bp, Rattus norvegicus
atgcttcacctgaagacacttccatttctgttcttcttccacacacagcttgccacagccctcccagtgcctccagaacacctggaagagaaaaatatgaaaactgctgagaattacctacgaaaattctaccacttaccaagcaatcagttccggtctgcaaggaatgccactatgattgccgagaagcttaaggagatgcagcgcttcttcggcttgcccgagacagggaagccagatgcagctacaatagagataatggaaaagcctcgctgtggagtgcccgactctggtgatttcttgctaactccgggaagccccaagtggacacacactaacctgacctacaggattataaaccataccccacagatgtcaaaggctgaagtgaaaacagaaatcgagaaagcttttaaaatctggagtgtgccatcaaccctgaccttcactgagaccttagagggagaagcagacatcaacattgctttcgtctcaagagaccatggtgacaattctccatttgatggacccaatggaatccttgcccatgcctttcaaccaggccggggtattggaggagatgcacattttgattcagaagaaacgtggactcaagactccaagaattacaacctgtttctcgtggctgctcatgaatttggacattccttgggactctctcactccactgatcctggtgccttgatgtacccaaactatgcttacagagaacccagcacctattcactacctcaagatgatatcaatggaattcagacaatctatggaccttcagacaaccctgtccaacctactggacccagcacgcccacagcctgtgacccccacctgagatttgatgctgccaccacactccgtggggagatttacttctttaaagacaagtacttctggagacggcatccccagctgagaacagttgacctcaatttcatatctctgttctggcccttcctacctaatggtcttcaggctgcttatgaagactttgatagagacctagttttcttatttaaaggcagacagtactgggctctaagtgcctatgacttgcagcaaggttaccccagagatatatccaactatggattcccaaggagtgtccaagccattgatgcagctgtttcctataacgggaagacatacttcttcgtaaacaaccaatgctggagatacgacaatcaaagaagatccatggatccaggttaccccactagcatagcaagcgtgttcccaggaataaactgtagaattgatgcagttttccagcaggattccttcttcctcttcttcagtggaccacaatattttgcatttaatcttgtcagtcgcagagtcactagagttgcaagaagcaatttatggcttaactgtccatag

SEQ ID NO: 2640 - DNA, 252 bp, Rattus norvegicus
atggccctgaagacgtggcttctgtgcttgctgctgctaagcttggtcctcccaggggcttccagccgagcccaccagcactccatggagacaagaacccctgatatcaatcctgcctggtacacgggccgcgggatcaggcctgtgggccgcttcggcaggagaagggcaaccccgagggatgtcactggacttggccaactcagctgcctcccactggatggacgcaccaagttctctcagcgtggataa

SEQ ID NO: 2641 - DNA, 759 bp, Rattus norvegicus
atggtaaaaccggtgcccctcttcaggagaactgatttcaagttattattatgcaaccacaagggcctcttctttctcagggtgtctaagctgctgggttgcttttcgcccaaatcaatgtggtttctttggaacattttcagcaaaggaacgcatatgctgcagtgtctttgtggcaagagtcttaagaaaaacaagaacccaactgatccccagctcaagggcatagtgaccaggttatattgcaggcaaggttactacttgcagatgcaccccgatggagctctcgatggaactaaggatgacagcaccaattccactctgttcaacctcatcccagtgggactgcgtgttgttgccatccagggagtgaagacagggttgtacatagcaatgaatggagaaggttacctctacccatcagaactttttactcctgaatgcaagtttaaagagtctgtttttgaaaactattatgtaatctactcatccatgctgtacaggcaacaggagtctggcagagcctggtttttgggattaaataaggaagggcaagttatgaaaggaaacagagtaaagaaaaccaaaccagcagctcattttctacccaagccattggaagttgccatgtaccgagaaccatctttgcatgatgttggtgaaacagtcccgaaagctggggtgacaccaagcaaaagtacaagtgcatctgcaataatgaatggaggcaaaccagtcaacaagtgcaagaccacatag

SEQ ID NO: 2642 - DNA, 1860 bp, Rattus norvegicus
aagcttcggtctgcacagccagcaaactcctgcgggcggagtctgcagattccggagcgcccgggttaggagaatctgagacctgagcaattggggtaagaggtcccattagacccagagacccctcttcaaacgatacttagtccttctccactgtttgcctccagggaacctgagagaagctggactgggtgggccagtgctttaatcaccggggcgaagacggggcgtggagaggagctagcagacgcggtggcagcgcctggcgcactggaagtgcaggggacgcgcccgcaggcttggtggccgcgcctgtgacctctcctttcggctgagaacacaggcggaggagtttactgaggaacccacggaactggctagccaaaggagacaagcctatagtctccatgatcctcccgtcctctgttctttccctggtccgctccatgttcaagagctgcgctccgcagccaggacgaggagagctatggaggagcagggtattcagtgcgctccgccgcctcccgccacctcccagacaggggtacctctcgccaacctctcccacaactgcagcgccgacgactacatttaccaggactccatcgccctgccctggaaagtcctgctggttgctttgttagcgctcatcaccttggccaccacgctctccaacgcctttgtaatcgctacggtgtatcggacccggaagctgcacaccccggctaactacctgatcgcctcgctggcagtcactgacctgctcgtgtccatcctggtgatgcccatcagcaccatgtacacggtcactggacgctggacactaggccaggtggtctgcgacttctggctgtcgtcggatatcacctgttgcactgcttccatcatgcatctctgtgtcatcgccctggaccgctactgggccatcactgatgcggtggactattctgctaaaagaactcccaaaagggcggccatcatgatcgtgctggtgtgggtcttctccatctcgatttcgctgccacccttcttctggcgtcaagccaaagcggaggaggaggtgctggactgctttgtgaacaccgaccacgtcctctacacggtctactccacggtgggggctttctatttacccaccctgctcctcatcgccctctatggccgtatctatgtggaagcccgctctcggattttgaaacagacacccaacaagaccggcaagcgcttgacccgagcccagttgataacagactctccaggatccacgtcctcggtcacctccattaactcccgggttccggaggtgcccagtgagtccgggtctcctgtgtacgtgaaccaagtcaaagtgcgagtctcagacgccctgctggaaaagaagaaactcatggccgctagggagcgcaaagccaccaagaccctagggatcattttaggagcatttattgtgtgctggctccccttcttcatcatctccctggtgatgcctatctgcaaggatgcctgctggtttcacatggccatttttgactttttcaattggctaggctatcttaactctctcatcaaccccatcatctacaccatgtccaatgaggacttcaaacaagcattccataaactgatacgctttaagtgcacaggttgacttgtcaatggcattggggtcgcctaagcgmcmtttggggaccaagttgggtcttttcacaggtaggtcaaatcttctttgcctgttactgggtggaagcaaggctctctcaactgggcaagggcagtggatcctcagaggccagggcagaagcctggctgctctgagagagcactctggaatgtgaactgaagcaaactattgtaaagctt

SEQ ID NO: 2643 - DNA, 1851 bp, Rattus norvegicus
cggcgawcacccgcccagtcttctgaagcggacactgtgggtgcagaatgayctggaragtggctgtgcttctcagcctagtgctgggtgctggtgctgttcacatcggtgtggatgaccctgaggacggtggcaagcactgggtggtgattgtggcgggctccaatggctggtataattaccgacaccaggcagacgcatgccacgcctaccagatcatccaccggaacgggattcctgacgagcagatcatagtgatgatgtatgacgacatcgccaacaatgaagaaaacccgactccaggtgttgtgatcaaccgacctaacggcacagacgtgtacaagggagtcccgaaggactacactggagaggatgtgactccagagaatttcctcgcagtgctgagaggcgacgaagaagctgtgaagggcaaagggtccggaaaagtcttgaagagtgggccccgggatcatgtatttgtttacttcaccgaccacggagccactggaatcctggtgtttcctaacgaagatcttcatgtcaaggacctgaataagactattcgctacatgtatgagcacaaaatgtaccagaagatggtgttttacattgaagcatgtgagtccggctccatgatgaaccacctgcccgatgacatcgatgtttatgcaaccactgccgccaaccccaacgagtcatcttacgcctgctactatgacgaggagaggagcacttacctgggtgactggtacagcgtcaactggatggaagattccgatgtggaggatctgaccaaagagacacttcacaagcagtaccacctggtcaagtcccacaccaacaccagtcacgtcatgcagtatgggaacaaatctatctctaccatgaaagtgatgcagtttcaaggaatgaagcacagagccagttcacccatctcgctgcctccagtcacacaccttgacctcacccccagccctgacgtgcccctgaccatcctgaaaaggaagctgctgagaaccaacaacatgaaggaatcccaagttctcgtcgggcagatccagcaccttctggatgccaggcacatcattgagaagtctgtgcaaaagatcgtttccctgctggcaggatttggggaaactgctcagaaacatctgtcagagagagccatgctcacagcacatgactgccatcaggaggccgtgacccacttccgcacacactgctttaactgscactcagtcaygtacgagcatgccttgcggtatttgtacgtgctggccaacctctgtgagaagccatatccgattgacaggataaagatggccatggacaaagtgtgycttagtcactactgaacagctctcttcccagtgcttctagaagagtgagcacagtacactggaatgtgaaccaaccggagtgaaccaagcggagaccggaagggcggagtcagaggcagcacctaagccccgcccccagggataccgtccgcccaccccagggcttgctttctgaggatacctgcttactaagaagccagtttgggtctggaggaaggaacttttgcttcttaggaatttttgggtttgttttgttgtccattagctttcaagagcagattcactgcggattctgtagccagtgaaggaaccggagaaattctcgaagctgaaacctcttgtcgccttcacagtgattttaccgaagagggcwmragcaagtccctactggagaattatttttagaatatataatkwttgatygcttttatattttattctgtaataatggatgtcctaaaacaaataagtgaagtgagacatttgttcctggaaaaaaaaaaaaaaaaaa

SEQ ID NO: 2644 - DNA, 968 bp, Rattus norvegicus
cgccgctgggcatcactgcagtgctcaccggagacagatcgcagagtcagtttctagctctgmrcswkkcctgccaacactaaaactctggctgcatccagatataccctgcaagtactgagagggctgtaggacgtccacgcagagatcctcagaggtgtctcagagccagcagagtctccgaactgtttgatcacattccagctcttcccatacctcgatttctgttgctatggagacttccaacgggactgagacctggtacaagagcctccacgctgtgctaaaggctctgaacacaacccttcacagtcacttgctctgccggcctgggccagggccagggtcaggaacagggccagacaatcaaacagaggatcatcgggctagccttcccggccgtaatgacaactcctacatgtatattctytttgtcatgtycctattcsctgtcactgtgggcagtctcrtcytgggatatacccgttcacgcaaagtggacaaacgtagtgacccytatcatgtgtacatcaaaaaccgtgtgtctatgatctgatgtgaggtgcctgaggmcaatggaagattatgatgtctgaggattgtcttyttgggtctccggaaytcatytmgaccctatcmagccmcagtacyyctgtctatacaagatcaacgwgaaattggtaagagagttaggtcatcactgggaccagagaagaggrgctgataggcctggtcttctggmtgagacatttttctagacacagatgcgcattataaactcagagcccgtgagcacacatataaaagtatggacaaccaacaagtaggagaggaagctgtggtgaagggaaatggagcaggaaaatgctctggaaatataatcttttaatgtatgatctttaacatgagagatcttgmtaaaacagagaatgctacttwaaaaaaaaaaaaaaaaaaaaaaaaaaaaa

SEQ ID NO: 2645 - DNA, 3443 bp, Rattus norvegicus
gaattcggcacgaggcagcggcgggcggcggcggctcttcctttcgcctgcgatccaaggcttgctgctcccagcccgctccgggccccggccacctccaccgccgcggctccccttacacccgggcgcacaccgcgcggactccttgggttttccgggtgccggcgggggctgccctggcctcggccccggctctgcggccggtggccgaactccgtggcggccccgaggcaccgccctcccccttgccactgcctggccgctgctcttcggctccgacatggaagatggaccctctaacaatgcgagttgcttccgaaggctgaccgagtgtttcctcagccccagtttgacggatgaaaaggtgaaggcctatctttccctccatccccaggtattagacgagtttgtttctgaaagtgttagtgcggagactgtggagaagtggctgaagaggaaaaacaacaaagcagaagatgaaccatctcctaaggaagtcagcaggtaccaggacacgaacatgcagggagtcgtgtacgagctgaacagctacatagagcagcgcctggacaccggcggggacaaccacctgctcctgtacgagctaagcagtatcatcaggatagccacaaaagccgacggatttgcactgtacttccttggagagtgcaataatagtctgtgtgtcttcacaccacccggaatgaaggaaggtcaaccccgtctcatccccgcagggcccatcacccagggcaccaccatctctgcctatgtggccaagtctaggaagaccctgctggtagaggacatccttggggatgagcgatttcccagaggcactggtctggagtcaggaacccgaatccagtctgtcctttgcttgcctattgtcactgccattggagacttgattggcatccttgaactgtacaggcactggggcaaagaggccttctgcctcagccatcaggaggttgcaaccgccaatctcgcttgggcttccgtagcaatacaccaggtgcaggtgtgcagaggtctcgccaagcagaccgaactgaatgacttcctgctcgatgtatcaaagacatactttgataacatagtcgccatagactctctacttgaacacatcatgatatatgcaaaaaatctagtgaacgccgaccgctgcgcgctcttccaggtggaccacaagaacaaggagctgtactcggacctgtttgacattggggaggagaaggaggggaagcccgtcttcaagaagaccaaggagatcagattttccattgagaaagggattgctggtcaagtggcaagaacgggagaagtcctgaacattcctgatgcctacgcagacccgcgctttaacagggaggtggacctgtacacaggctataccacgcggaacattctgtgtatgcccatagtgagccgcggcagcgtgatcggtgtggtgcaaatggttaacaagatcagcggcagcgccttctccaagacggatgagaacaacttcaagatgtttgctgtcttctgcgctctggccctgcactgcgctaacatgtaccacaggatccgccactcagagtgcatctacagggttaccatggagaagctgtcttaccacagcatctgcacctctgaggaatggcaaggcctcatgcacttcaacttgccagcacgcatctgccgggacatcgagctattccactttgacattggtcctttcgagaacatgtggcctgggatctttgtctacatgatccatcggtcttgtgggacatcctgttttgaacttgaaaaattgtgccgttttatcatgtctgtgaagaagaactataggcrsgwkscttaccacaactggaagcatgcagtcacggtggcgcactgcatgtacgccatacttcaaaacaacaatggcctcttcacagaccttgagcgcaaaggcctgctaattgcctgtctgtgccatgacctggaccacaggggcttcagtaacagctacctgcagaaattcgaccaccccctggctgcgttgtactccacctccaccatggagcaacaccacttctcccagacggtgtccatcctccagctggaaggacacaacatcttctccaccctgagctccagcgagtacgagcaggtgctggagatcatccgcaaagccatcatcgccactgacctcgcactgtactttgggaacaggaagcagttggaggagatgtaccagacagggtcgctgaacctccacaaccagtcccatcgagaccgcgtcatcggcttgatgatgactgcctgcgatctttgctctgtgacgaaactatggccagttacaaaattgacagcaaatgatatatatgcagagttctgggctgagggggatgagatgaagaagttggggatacagcccatccctatgatggacagagacaagcgagatgaagtccctcaaggacagcttggattctacaatgctgtggccatcccctgctataccaccctgacgcagatcctcccacccacagagcctctgctgaaggcctgcagggataacctcaatcagtgggagaaggtaattcgaggggaagagacagcaatgtggatttcaggcccagcaactagcaaaagcacatctgagaagccgaccaggaaggtcgatgactgatcctgaggtgatgtctgcctagcaactgactcaacctgcttctgtgacttcgttctttttatttttatttttttaacggggtgaaaacctctctcagaaggtaccgtcgcatatccatgtgaagcagatgactccctgcgcacacctcggaccgtgagcaacccgggctccaccgtgttcagacgtcggctattccatggctccgcctgacccccgaatgccatttgctaccaggccagaactgcgctggctggagggggcagagacgacaggaggggttcttacctgcatccttccatgagggtgtgkttctgtgtktcatctctaacagagatgctwskgcwyggkggcgtttgttagaaatgkgacacayscccctgtcgtgaagtttacatgtgaccttcttgtaggtaacttgagttcgtagcctgsgacccctgtaatgaaggttacagtccacaggtgatagagaaattcaagctgtaagttacaggtgcactayaagtgtgttcattcagtttacctgggggcatggaggtgagtcagctccacgaggaaggaagcatacctctgccctcatcaaggggacacagggtacatcccaggcatcagagaactgcagctcacctcaaaccatgtcaaagaattaaaacacacccccatcccctcactgtagcctttggcaacttcgccaaacccttcacacaaagaaaataaaagtaaggcgtataaatttcmwmmarmaarmmwmdwrhcrartwmaaaaaaaaaaaaaaaa

SEQ ID NO: 2646 - DNA, 3321 bp, Rattus norvegicus
gtgtagcggcgcagcgccggctccgagcagagcggtgctcagcgcgggctcagtgagaggcaggatcctgtgtctctgcgtcccgggcacggcgcgtcaccttctgacgactcacctggtggcaggtggcaggtgtggccttacccggctgtcagtgatggccttgccccggtgagccaaagcctgcccctgtcacccgccggccgccagccagcaggatgaggctgtggaaggcggtagtggtgacgctggccttcgtgagcatggacgtcggcgtgaccacggccatctatgccttcagccacctggatcgcagcctgctggaggacatccgacactttaacatcttcgactcggtgctggacctctgggctgcctgcctgtaccgcagctgcctgctgctgggggctaccatcggtgtggccaagaacagcgctctggggccacggcgcctgcgggcctcgtggctcgtcatcaccctcgtgtgcctctttgtgggcatctatgccatggccaaactgctactcttctcagaggtgcgcaggcccatccgggacccatggttctgggcgctcttcgtatggacctacatctcgctggctgcctccttcctgctgtgggggctgctggccaccgtgcggccggacgcggaggccctggagccggggaacgagggcttccacggtgagggtggggcccctgctgagcaggcatcaggggccacgctgcagaagctgctgtcctacacaaagcctgatgtggccttcctagtagctgcctctttcttcctcatcgtagcggctctgggagagaccttcctgccctactacactggccgggccatcgacagcatcgtcatccagaaaagcatggaccagttcaccacggccgtcgtcgtcgtctgcctgctggccatcggcagctcattggccgcaggtattcggggcggcattttcaccctcgtatttgccagactgaacattcgccttcgcaactgtctcttccgctccctggtgtcacaggagacgagcttctttgacgagaatcgcacaggggacctcatctcccgcctcacctctgacaccaccatggtcagcgacctggtctcccagaacatcaacatcttcctgaggaacacggtcaaggtcacgggcgtggtggtcttcatgttcagcctctcctggcagctctccctggtcaccttcatgggcttccccatcatcatgatggtgtccaacatctacggcaagtactacaagaggctctccaaggaggtccagagtgccctggccagagccagcaccacagccgaggagaccatcagcgccatgaagacggtccgcagctttgccaatgaggaagaggaggcagaggtgttcctgcggaagcttcagcaggtctacaagctgaacaggaaggaggccgcagcctacatgtcctacgtctggggcagtgggctcacactcctggtggtccaggtcagtatcctctactacgggggccacctcgtcatctcggggcagatgagcagcggcaacctcatcgccttcatcatctatgagtttgtcctgggagactgcatggagtccgtgggctccgtctatagcggcctgatgcagggagtgggggctgctgagaaggtgttcgagttcattgaccggcagccaaccatggtgcatgacggaagattggcccctgaccatctcgagggcagggtggactttgagaatgtaaccttcacctaccgcactcggccccacacacaggtcctacagaatgtctccttcagcctgtccccaggcaaggtgacggctctggtggggccctcgggcagcggaaagagctcctgtgtgaacatcctggagaacttctaccctctgcagggcggccgggtgttgttggacggcgagcccatcggcgcctatgaccacaagtacctgcaccgcgtgatctcactggtaagccaggagcctgtgctgttcgcccgctccatcacagacaacatctcctacggcctgcctaccgtgcccttcgagatggtggtggaggctgcacagaaggccaatgctcacggcttcatcatggagctgcaggacggatacagcacagagaccggggaaaagggagcccagctgtcaggtggccagaagcagcgggtggccatggcacgtgcactagtgcggaaccctcctgtgctcatcctggacgaagccaccagtgccctggacgcagagagtgaatacctgattcagcaggccatccacggcaacctgcagagacacacggtgctgatcatcgcacaccggctgagtactgtagagcgggcgcacctcatcgtggtgctagacaagggccgtgtggtacagcagggtacacaccagcagctgttggcacagggcggcctctatgccaagctggtgcagcgtcagatgctggggctcgagcaccccttggactacacggctggccacaaggagccacccagcaacactgaacacaaggcctgacagtggccccgggctgaagcgctggaggcgacctgccgagtcccactcttgcttcctgcatcttgcctccttccacttgctccccaggcacccaccagctgccatgggcttacccccttctactgtgtcccatcttggctcctccaggcctgccaaggtagaacagcctttttataccaagctagcagggtttttactgctcagttcaacgcactccagtcaactcctagatttcaaaaacacctttttgggactggcagtgagcaagctcactaggatgttttcaagacttctgasccaggagtgcacgaccctttctaactgcctggaagatgtctgggagagaactaagcactaccctttgcctctgggagaagcagcttccctgtccctagggggacacaagggttggccttccatcctyccagtctcccggctctgtgagtcagsccagaggtggggcaagagagtgggaggtrcccactgchtatcaccccttgccaatcaaagccagtctcaytgtgaaccaccagaacctcagcagaggaggggctggccaggcctgktggscctcggggtgccctcagccccacacccagcacttgaaccsttcatcctttcccctggmtggcaccttcccctcctgtccacccctgcaactytgcagaggaaccttgtttgtaagatgtattctcagattggtggaggggaccgaggcaatgcccagggtctggctttgtcctggtttaagattttgggagaactgggtcaataaagtgtactacctctgammwmwaaaaaaaaaaaaaaaaaa

SEQ ID NO: 2647 - DNA, 850 bp, Rattus norvegicus
ctttggtgtctgagctcagcaagaggcgctcgggggacgctgagggacagctttaacacccgcacaacacagggtacctggttcccagtccagagctgcttggagggcagagatgtcgcgagcagctaatcgccgcccagggctctccgcaggacaattggccgctgcaactgcatctcctctcctgtcactgctgctgctgctcgcctgctgtgcggacgcttgcagaggtacgccaatatcgcctcaaagattaccaccagaacaagaactacaattgtggaatgagattcctgaagcttgtgcgtcctttctgtctgttgattcccagcctcaggcatctgttgcattgaggaagctttgccgtgtcctgatggagattttccagaagcctcaggagcaaactgagaaagataatgctaagaggttcttatttcattattcaaagacacagaagttgggaaattcaaatgttgtgtcgtctgtcgtgcatccgttgctgcagctcgttcctcaactgcatgagagaagaatgaagagatacaaagtgaatgaataccagggtcctgtagctccaagtgggggattctttttatttaggccacgcaatgggaagaggtcaacaagtttcatttaaaatggatgccaaatgatcttttcattgaaaactctgctatgggatataaaatgtactcacattttgttctcaaaaaaaaaaaaatgatccctccgaaatgtagtctgttgcaaacccctgtattgtaacattctctgccatggttgagattatgaatgtttaatttgttgaaaataaaacagcatcttgaaatgtaaaaaaaaaaaaaaaaaa

SEQ ID NO: 2648 - DNA, 1762 bp, Rattus norvegicus
aatggttgagtaacaccttatggtgtaaaacgcaccacattttctttatccaatcttctgttgtgacacatctaggtttccgatttctgattaggaagcatcaatggacaacatggttgggcaagtgtctatcttgaggtagattcccatcctcctgaggaacttccgagctgatttccatagtgactgtacaagtttgcgaacccaccagtaatggatgaatggagacttcattttctgccttggactttagaggcttgggtggaaaggctgctctaaaaggagcttacttagcacacagtcccagcaagcctcacatcaccttccccagaatcagtcattttccctattgccgtggtcctcccatggcgctaccgagcggctggagttagtccgacaccggagctggttactctagccggtgacttggtggcgggcagaggctgcttggcttcctggcgccgccatgttggaagtacagagctctaaccatggctgcgagcgtcaggctccgactaccagccccgccagctcggcagggcacgcggtggaagtgcggcccgggctgtatctgggtkgggcggcggcagtggctggaccggactacctgagggaggcgggcatcaccgccgtgctgacggtggactcggaaccggctttcccggccggggctggtttcgaaggtctccagagcctcttcgtgcccgcgctggacaaacccgagaccgacctgctcagtcacttggatcggtgcgtggctttcatcggccaggctcgctccgaaggccgtgcggtgttggtgcactgtcatgcaggagtcagccgcagtgttgctgtagtgacggctttcataatgaagaccgaacagcttacctttgaaaaagcctatgaaaacctccagaccatcaagccagaggctaagatgaatgaggggttcgagtggcaactgaagctctatgaggcgatgggacacgaagtccatacctccagtgccgtttacaagcagtaccgtttgcaaaaggtgactgagaagtatccagaacttcggaatttgcctcgagaactctttgctgtcgacccaactaccgtttcacaaggattaaaagatgacatcctctacaaatgtagaaagtgcaggcgatctttatttagacgttccagcattttggatcatagtgaaggaagtgggccagtagcctttgctcacaagagaacaggactgtcttccgtacttaccacagggaatcaggctcagtgtacatcttacttcatcgaacctgtgcagtggatggagtctgctttgttgggggttatggatggacagcttctttgcccaaaatgcagtgccaagttgggttcctttaactggtatggtgaacagtgctcgtgtggccgatggataacccctgctttccaaatccacaagaacagagtggatgaagtgaaaacattgccagcgctgggatcacaaacaaagaaaccatgaacttaggactcagcttgggatggaccctgggaaaggcgcttctccattggcatctttcatggcgatgtcaaatttcagttggatgtccaaggataattactgactgtaacagctgtggggtggtggcttattatgtcacacacacacacacacacacacacacacacacacggtactctgcttggccatccagactgttagtcatgtaaattggatttgatattaaaatcttttgggctggaaaaaaaaaaaaaaaaaaaaaaaaaaaaaaaaaaa

SEQ ID NO: 2649 - DNA, 1653 bp, Rattus norvegicus
atgtcaccgaccatctcccacaaggacaacagtcggcagcggcggtcaggcatgttcggtcacgctctggatatgaagagtggccccctgccaccgggcggctgggatgacaatcaccaagactcggtgggcggggaaggggaccgggaagttcttcttggggatgtcggccctggtgacttcccaaaagccaagaggagctatagagccgaactaagtagcattttgttactactctttctttacgtgcttcagggcattcccttaggcctggcggggagcatacccctcattttgcagagcaaaaatgttagctatacagatcaagctttcttcagttttgtcttctggccattcagtcttaagctgctctgggctcccttggttgatgccgtctactttaagaacttcggtcgtcgcaagtcctggcttgtccctactcagtatatactaggaatcttcatgatttatttatccactcaagtggaccgtttgcttggaaatattgatggcagaacaccggatgtagttgctctcactgtgactttctttttgtttgaattcctggccgccacacaggacatcgctgtggacggttgggcattaactatgttatcccgggaaaacgtgggctatgcttcgacatgcaattctgtgggccaaacagcaggctactttttgggcaatgttttgtttttggctcttgaatctgctgacttttgtaacaaatattggcggtttcagcctcaacccaggggaatcgttaccctttcagattttctatttttctggggaactgtatttttaataacaacaacattagtagcccttctgaaaaaagagaccagagaagcgtcagtagtaaaagaagagacacaagggatcacagacacatacaagctgctcttctcaattataaaaatgccagcagttctggcgttttgccttctgattctaacttcaaagattggcttttcagcagcagatgcggtgacaggcctgaaactggtagaagagggagtgcctaaggagcacctggccttactggctgtcccaatggtccccctgcagataatcctgcccctcctcatcagcaagtacacggcaggtccccagcctctgaatatattttacaaagccatgccctacagattgttgcttggattagagtacgccctccttgtttggtggactcctaaagtagagcatcaaggaggattccctatatattactacatcatagtgctgctgagctatgccttacatcaggtcactctgtacagcatgtatgtgtcaataatggctttcaatgccaaggtcagtgatcctcttattggaggaacatacatgacccttttaaatactgtgtccaatctgggaggaaactggccttctacagtggcgctttggctagtggatcccctcacagtgaaggagtgtgtaggagcttcaaaccagaactgtcggacacctgaggctatcgaactttgcaaaaagcttggcggctcgtgcgttacagctctggatggttattatgtggaatccattgtctgtgttctcattggatttggttggtggttctttcttggtccaaaatttaaaaagttacaggatgaaggaccgtcctcatggaagtgcaaaaggaacaactga

SEQ ID NO: 2650 - DNA, 1353 bp, Rattus norvegicus
gagggaagccctctagacccatgtgatctcctgtgaagaaccgagcccacctgctggtcaccccagctcccaccatgggacctgcaggaagcgccctgagcagcgggcagatgcagatgcagatggtgctgtggggaagtctggctgcggtggccatgttcttcctcatcaccttcctcatccttctgtgctccagttgtgacagagacaagaagccacggcagcatagtggagaccatgagagcctgatgaatgtgccttccgacaaggagatgttcagccattcagcgaccagcctgaccacagatgcactggccagcagcgaacagaatggggtgctcaccaacggcgacattctttcagaagacagcacaatgacctgcatgcagcattatgaggaagtccagacctcagcttcagatctgctggactcccaggacagcacgggaaaggccaagtgccaccagagccgggaactgcccagaatcccgcctgagaacgcagtggacgcgatgctcaccgccagggccgcagatggggactccgggcccggcgtggaggggccctacgaggtgctcaaggatagttcctcccaggagaacatggtggaggactgcttgtatgagacagtgaaggaaatcaaggaggtggcagacaaaagccagggcggcaagtccaagtccacttctgccctgaaggagcttcagggggcccacgccgagggcaaggccgactttgctgaatacgcctctgtggacagaaacaaaaagtgccgccacagcacaaatgcagagagcattctgggaacgtccagtgacctggatgaggaaaccccaccgcctgtcccagttaaacttctggatgagaatgccaaccttccagagaagggagagcacggggcagaagagcaagctccagaagcacccagtggacacagcaagagatttagttccttgtcatacaagtctcgagaagaagacccaactcttacagaagaggagatctcagcaatgtattcttcagtgaataagcctggacaatcggcacacaaacctgggccggaatctacctgccagtgcccgcagggtccccctcagaggtcatcatcttcctgtaacgacctctatgccactgtgaaagacttcgagaaaactcccaacagcatcagcatgctgccaccagcaaggaggcccggtgaggaaccagagcctgactatgaagccatacagactctaaacagagaggacgacaaggtccctctggggaccaatggccaccttgtccccaaggagaatgactatgagagcattggggacttgcagcaaggcagggatgtcaccaggctctagcaac

SEQ ID NO: 2651 - DNA, 612 bp, Rattus norvegicus
ccgagagagactcgttcaggggctgccctgccccacacagcacggttgatggactcgactgccccaggcagcggtgtcagctccctgccgctgctcctggcccttgtcctgggtcttgtgattctccagtgcgtggtggcagatgggaacacaaccagaacccctgaaaccaatggctctctttgtggagctcctggggaaaactgcacaggtaccacccctagacagaaatcgaaaacccacttctctcggtgccccaagcaatacaagcattactgcatccatgggagatgccgcttcgtgatggacgaacaaactccctcctgcatctgtgagaaaggctactttggggcccggtgtgagcaggtggacctgttttatctccagcaggacagggggcagatcctggtggtctgcttgataggcgtcatggtgctgttcatcattttagtcattggcgtctgcacctgctgtcatcctcttcggaaacatcgcaaaaagaagaaggaagagaaaatggaaactttgagtaaagataaaactcccataagtgaagatattcaagagaccaatattgcttaacttaatgattataaagttaccacaagctgg

SEQ ID NO: 2652 - DNA, 1063 bp, Rattus norvegicus
cgatgacagacgatcaggactgtgctgcagagctggaaatggcagattcttcgacggaagacggagttgacgctaagccagaccgctccaccatcatctcatcccttctctggaagaagaagaaaaatgcctctatgtgccccgtcagtaccacccgggaccgcgtgcccacttacctgtaccgtatggacttcgagaagatgggcaaatgtatcatcataaataacaagaacttcgacaaagcgacaggtatggacgtccggaatgggacggacaaagacgcagaggccctcttcaagtgcttccgaagcctgggttttgaagtgactgtctataatgactgctcttgcgcaaagatgcaggatctgcttagacgagcctctgaagaggaccacagcaactcagcctgcttcgcctgcgtcctgctgagccacggagaagagaatctgatttatgggaaagacggcgtgacaccgataaaggatctgacagctcattttaggggagaccgatgcaaaaccctgctagagaaacccaagctcttcttcatccaggcgtgccgagggacggagctggatgacgggatccaggctgactcggggcctatcaacgacaccgacgctaatccccgctacaagatcccggtggaagctgactttctctttgcttactccacggttccaggctattattcgtggaggaacccaggaaagggctcctggtttgtgcaggccctctgctccatcctgaatgagcatggcaaggacctggagatcatgcagatcctgaccagggtgaacgacagggtggccagacacttcgagtcccagtctgatgacccccgcttcaatgagaagaagcagattccatgtatggtgtccatgctcaccaaagagctctactttggccgttgaccagcctccaactgagaacctgctgtcattcactgatgaatccagcttttattttatttttgttttgatgctctcaaaatatccagaaatgttaaggagatttaatttcaggaaagtatattgattcagggagggagttctctggtgat

SEQ ID NO: 2653 - DNA, 3816 bp, Rattus norvegicus
gctgtagcagagagakgagctcagagtctagcgcagccaccgcgatgagaggcgctcgcggcgcctgggatctgctctgcgtcctgttggtcctgctccgtggccagrcagggacttctcagccatctgcgagtccaggggagccgtctccaccatccatccagccggcccagtcagagttaatagttgaarccggsgacaccatcaggctgacgwgcactgaccccgcctttgtcaaatggactttcgarrtcctcsatgtwrggattgagaataagcagagcgaayggattcsarraaaagcsgaggcmaytcrcacgggcaaatacacgtgcrkcarcrgcaryggcytcaggarytctatttacgtgttygttagaratcctgccrwacttttcctggttggccttcccttgtttggcaaagaaracarygacgcrctgktccgctgccyyctgacaracccacaggtktccaattaytccytcatygagtgtgatgggaaatctctccccacggacctgamgttygtcccmamccccaaggctggcatcaccatcaaaaacktkargsscgcctaccaccggytstgyrtccgstktgctgcycagcgtgasggyamatggmtgcrktctgacaaattcaccytcaaagtgmgrgcagccatcaargytatcccwgtkgtgtctgtgccygaaacaagtcayctccttaagraaggggacacatttacggtgrtrtgcaccataaaagaygtgtctacatccgtgractccatgtggmtaaagwtgaaccytcagcytcagmrcawagcccaggtaaagcrcaatagctggcaycrgggcgacttcaattacgaacgccaggagacgctgactatcagctcagcaagagttaacgattccggagtgttcatgtgttatgccaataatacttttggatcagcaaatgtcacaacaaccttgaaagtagtagaaaagggattcatcaacatcttccctgtgaagaacactacggtatttgtaactgatggggaaaatgtagacttggttgttgagttcgaggcctaccctaaacctgaacaccagcagtggatctacatgaacaggacgcctactaacagaggggaggattatgtcaaatccgacaaccaaagcaacatcagatatgtgaacgaacttcgcctgaccagattgaaaggcacagaaggaggcacttacacctttctggtgtccaactctgatgtcagtgcttccgtgacatttgatgtttatgtgaacacaaaaccagaaatcctgacatatgacaggctcatgaatggcaggctccagtgtgtggcggcgggattcccggagcccacaatagattggtatttttgtacaggggcagagcaaaggtgtaccgttcctgtcccgccagtagacgtacagatccagaatgcgtctgtgtcaccatttggaaaactggtggttcagagttccatagactccagcgtcttccggcacaacggcacggtggagtgtaaggcctccaacgctgtgggcaagagctctgccttctttaactttgcatttaaaggtaacagcaaagagcaaatccagccccacaccctgttcacgccgctgctcattggcttcgtggtcacagccggcttgatggggatcattgtgatggttcttgcctacaaatatttgcagaaacccatgtatgaagtacaatggaaggttgtcgaggagataaatgggaacaattatgtttacatagaccsracgcarcttccttatgaycacaaatgggagtttcccagaaacaggctgagttttggaaagacmttgggagctggtgccttygggaargtmgttgargccactgcmtatggcttrattaagtcggatgcygccatgacrgttgccgtgaagatgctcaaaccaagtgcccatttaacrgaaagrgaggccctaatgtcvgaactgaaggtcctgagctacctgggyaatcacatgaatatygtsaacctscttggmgcrtgymcsgtgggarggcccaccctggtcwttacagaataytgttgctatggtgatcttttgaatttyttgagaagraagcgtgactcstttattttctcaaagcaagaagarcaggcagamgcsgcactttataagaaccttctgcaytcaamggagycttcctgtgacagytcaaaygartayatggacatraagcctggcgtttcctacgtsgtrccmaccaagacagacaaraggagatccgcaagaatagaytygtayatagaaagagacgtgactccygccatcatggaagatgacgagctggytctggacctggawgatttgctgagcttytcctaccaggtggccaagggcatggcgttcytcgcctccaagaaytgtattcacagagatttggcagccaggaatatcytcctyamtcacgggcggatcacaaagatttgcgatttcggsctagccagagacatcaggaatgattcgaattacgtggtmaaaggaaatgcacgrctgcccgtgaagtggatggcaccrgagagcattttcarctgcgtgtacacatttgaaagtgaygtctggtcctatgggattttcctctgggagctmttctcyytaggaagcagcccctacccagggatgccggtcgaytccaagttttacaagatgatcaaggaaggtttccgaatgctcagccctgagcacgcgcctgccgcaatgtatgaagttatgaagacttgctgggatgctgatcccctgaaaaggccaacattcaagcaggttgttcagctcattgagaagcagatctcagacagcagcaaacatatttactccaacttagcaaactgtaaccccaacccagagaaccccgtggtggtggaccattctgtgagggtcaattccgtcggcagcagcacctcttccacacagcctctcctcgtgcatgaggacgcctgagtagaaacggagcccgatgggcattgctgtggtctccaaccccattctcctggcttctatgatggttattttgttttcctttgacttgcatcctactccagggtagcgggatccccgccccacccccaaccccactgtgattctgccttttatgagcacactttagtggctgatggcctttccttttcgccatcagccaccatcccaccaagaaggtccgaacggtatgtatatattttcccattagcaaagtagcccctactgtaaacggaaggcctcatgctttagaggaggaagggtagggtgcaacggggatgcctggagttcttcacagtgctcctccgagtgtgtttgaaaagtatggccagtagttcatttgaagagtttagaagtagtcccgttttggcccagagagccttccataatgacgggcagatgtatgtagcaagactagaaaggaaacccaagccctgtgtgtggaaagtagaccattattagaacagaggacacatgagaacatctaggcctaagaagtctggtcatgctgagaacgagacctaggctgagacggcgcaagccctggaagcgtggacatagatgctctgttctggggctgcgcgggcttttgcgcaagcttttgtacaactgacctggtttttaaatagtctgctgttggggagtagaattggagacaaggcctcctccctagccagcgtttgtatatactcactgtacgttgtatgcgttcatactttggagcgggggatccccccacaagctttagtttctgtgtacaaccctgggattaggtctgctgtgtgtaagaatagattta

SEQ ID NO: 2654 - DNA, 1544 bp, Rattus norvegicus
gtcggacctgtgctgacctcgctcctccgcgtaccccggcctgcagcagtcgccgccatgagcactggcaccttcgtcgtgtcgcagccgctcaactaccgcggcggggcccgcgtggagccggtggatgcctccggcacggagaaagcgttcgagccagccaccggccgagagatagctactttcaagtgttcgggagaaaaggaagtaaatttggctgttgaaaatgcaaaagctgcctttaaaatctggagtaagaaaagcggcttggagcgttgtcaagtcctcttagaggctgcccggataataaaggaacggagggatgaaattgccattatggagaccatcaacaacgggaagtccatatttgaggctcgcctggatgttgacacttcctggcagtgcctggaatactatgcaggcctggctgcgtccatggcgggagagcacatccagctcccaggagggtcctttggctacaccagaagagaaccacttggggtgtgtttggggataggagcatggaactaccccttccagattgcctgttggaagtctgctccggctttggcttgtggtaatgccatgatctttaagccctctcccttcacgcctgtgtctgctctgctcctggctgagatctacaccaaagccggtgcgcctaacggcctcttcaacgtggtgcaaggtggggctgccacaggccagtttctgtgtcagcatcgtgatgtggccaaagtctccttcactggaagcgtgcccactggcatgaagatcatggagatggccgctaaaggaatcaaacccattactttggaacttgggggcaaatctcctctgatcattttctctgactgtaatatgaagaatgctgtgaagggggccttgctggccaacttcctcacacaaggacaggtgtgctgcaacggcactagagtgtttgtgcaaaaggaaattgctgacgcatttacaaaggaagttgtgaggcagactcagaggataaagattggggacccacttctggaagatacaaggatgggcccactcatcaatgccccgcacctggagcgagtcctcgggtttgtcaggtctgcaaaggagcagggtgccactgtgctgtgtggtggagagccgtatgccccggaggatcctaagttaaaacatggatattacatgacaccttgcattttaactaattgcacagatgacatgacttgtgtaaaagaagagatctttgggccagttatgtccattctaacatttgagactgaagccgaggttctggagcgggccaatgacaccacgtttggactagcagctggggtctttaccagggacattcagagggcgcacagggtggcggctgagctgcaggccggaacgtgctacattaacaactataacgtcagcccggtggagttgccctttggtggatacaagaagtcaggatttggcagagagaacggccgagtgacgattgagtactattcacagctgaagacggtgtgtgtggagatgggggacgtggagtcagccttttgaaa

SEQ ID NO: 2655 - DNA, 904 bp, Rattus norvegicus
gatcatgggtgctacggcgctgcccccgatctggcagatgtaccttaaggaccaccggatctacaccttcaagaactggcccttcctggaggattgctcctgcaccccagagcggatggcggaggctggcttcatccactgccctaccgagaatgagcctgatttggcccagtgttttttctgctttaaggaactggaaggctgggaaccggatgacaaccctatagaggagcataggaagcactcccctggctgcgccttccttacagtcaagaagcagkkggaagaactgaccgtcagcgagtttttgaaactggacaaacaaagagccaagaacaaaattgcaaaggagaccaacaacaaacagaaagagttcgaggagaccssgaggacsgtccgscagtccattgagcagctggctgccttacgctgagcctttgctgggcaacctggacctgagtgacatgccacggctaagccacttgtcccagctttccaggcctgcctggccgccttggtgtcttacaggagaccgtgacatttcgaaactggacrtcagatgatttggggttttgctttaaaggggctcagcctgcgtggccacctctctttggttttgtggctttgctctattgtgacctggacttaagcactgaggaagggagtggatgagggacaggattctctgacaggatctatgggtggggaggggggtgaagggagggttgtgcaaggcctttctggtcttgatgtttccatgcctggcagctgtcgcagcccatgtgtaggtgttggtttatatatgtttgtgctgataattcttcttctgtccttctgatgagtcctcctaccatggggtaatggaataaaataacttaacaaarwrraaaaaaaaaaaaaaaaa

SEQ ID NO: 2656 - DNA, 1314 bp, Rattus norvegicus
ctgatgctatcctttcactctctcagaccttctccaggagcctctgctttcagactccttctggctcagcttgggacagacacccagaacaagggacacctgtggttgtggattttaagctcagtaatgggaaaacttgaaaatgcttcctggatccacgatccactcatgaagtacttgaacagcacagaggagtacttggcccacctgtgtggacccaagcgcagtgacctatcccttccggtgtctgtggcctatgcgctgatcttcctggtgggggtaatgggcaatcttctggtgtgcatggtgattgtccgacatcagactttgaagacacccaccaactactatctcttcagcttggcagtctcagatctgctggtcctgctcttggggatgcctctggaaatctacgagatgtggcacaattaccctttcctgttcgggcctgtgggatgctacttcaagacagccctcttcgagactgtgtgctttgcctccattctcagtgtcaccacggttagcgtagagcgctatgtggccattgtccaccctttccgagccaagctggagagcacgcggcgacgggccctcaggatcctcagcctagtctggagcttctctgtggtcttttctttgcccaataccagcatccatggcatcaagttccagcactttcccaacgggtcctccgtacctggctcagccacctgcacagtcaccaaacccatgtgggtgtataacttgatcatccaagctaccagcttcctcttctacatcctcccaatgaccctcatcagcgtcctctactacctcatggggctcaggctgaagagagatgaatcccttgaggcgaacaaagtggctgtgaatattcacagaccctctagaaagtcagtcaccaagatgctgtttgtcttggtcctcgtgtttgccatctgctggacccccttccatgtggaccggctcttcttcagctttgtggaagagtggacagagtccctggctgctgtgttcaacctcatccatgtggtatcaggtgtcttcttttatctgagctccgcggtcaaccccattatctataacctcctgtctcggcgcttccgggcggcctttcgaaatgttgtctcccctacctgcaaatggtgccatccccggcatcrgccacagggacctccagcccagaagatcatcttcttgacagaatgtcacctcrtggagctgacagaggatgcaggcccccagttccctggtcagtcatccatccacaacaccaaccttaccayggccccctgtgcrggagaggtaccatra

SEQ ID NO: 2657 - DNA, 2003 bp, Rattus norvegicus
aagaactggcgggcgctcctaaggcgggcagagagaagcagcctatgccacctagtgattatcagaaattagtcatttctgctccttagttctctcagttgcctttctcctccctctgacctccggtgttttatagttccgcttctttgaatccatagtaaactttggcggactggccagggaacaggaagtgagcccggctagcggcagccggaggcggagagcgtctcccaggggttgctcgcccgagaggggagctgtgactgscrgrgmagggrctyggsramaggttacagctctcctaccccttggtaagaatggatttccacagttgtctttacgatattgctgaacgtctgggcaacgaagaactggctgccctcaagttcctgtgcttggaccacatcccgcagaagaagcaggagtccatcaatgatgtcctggtgctatttcagaggctgcaggaagaggggatgttggaggaagacaatttgtccttcctgaaggagctgcttttccatatcagtcggcgggatctgctgagcagagtcctaaaaagcagcccagaggaaatggtgagggagctgcaggttctgggcaaagcccaggtttctgcctacagggttatgctctttaagctctcagaagacatggacaaggaggatttgaaatcttttaagttccttttgatcactgagatccctaaatgtaaactgcaagacaactcgagcctgcttgatattttcgtagagatggagaagaggactatcctggcagaaaacaacttggttaccctaaaatcaatctgtttccgggtcaacaggagcttgctgggaaggatcgacgattacgaacgatcaagcacagagagaagaatgagcactgaaggaggggaagagctgccagtttctgttttggatgaggtgaccatcaaaatgcaggacatgtgggactcgccaggagagcaagagagtgagtcactaaattcagacaaygtttaccaaatgaagagcaaacctcgggggtactgtctgatcttcaacaataataatttcagcaaagcacgggaggacatacccaaactcagcaacatgcgggacagaaaaggaaccaactatgatgaagaggctctgagtaagacctttaaggagcttcattttgagatcgtgtccttcagtgattgcacagcaagtcaaatccatgaggttctagtatcctatcaaagcaaggaccacaagggcaaagactgcttcatctgctgcatcctatcacatggggacaagggcatcgtctacggaacggatgggaaggaagcctctatctatgagctgacatcttacttcactggctcaaagtgcccttccctggctggaaaacccaaaatcttttttattcaagcttgtcaaggaaataacttccagaaagcggtgcctgtgcctgatgagacaggcttagaacaggagcacgttttagaagaggattcatcatcttacaagaactatatcccagatgaggcagactttctgctggggatggctactgtgaaaaactgtgtttcctaccgagatcccacgcgtgggacctggtatatccagtcactttgccagagcctgagggaaagatgtcctcgaggtgaggatattctcagcatcctgactggcgtgaactatgatgtgagcaataaagacaacccgaggaacatgggaaagcagatgccacagcccatcttcacactacggaagaagctcttcttccctcctaactgatgtgtgctctctacagttcacatgggttatctgtgcacttttgtgtgtcctaactgatgtgtgctctctacagttcacatgggttatctgtgcacttttgtgtgaaggagagaatcttatttattttttttaccatttcttttgtttttgagtttacatttatgtcatttccgttttctctcttcaaatcttcctatgtaatcttccagtttcaaatacatgacctcttttgtcatc

SEQ ID NO: 2658 - DNA, 3002 bp, Rattus norvegicus
  misc_feature (2885)..(2885): n is a, c, g, or t
gaattccggtgargttckmackwkcggatgctgaatcctcggctaattgaaattactgggcataatgctatatatagccaatgaagagattctgagctctcactcagtgccttcaagacatgtcgttttgtagtcagaggaaacagggatcaatgcattttcaaactgacagagggaacggatgctccttagcagcacatgcccaggatcgtgtgtgtggggcttgcgctgtgctgagaagctgatcaccggcccatatgccccttatttactgcaatgttctttgcatgttattgtgcactccggactaacgtgaagaagtatcgataccaagatgaggacggtccacatgatcattccttacctcggctaactcatgaagtaagaggtccagaactggtgcatgtgtcggaaaagaacctctctcaaatagaaaatgtccacggatatgtcttacagtctcacatttctcctctgaaggctagccctgctcctataattgtcaacacagacactttggacactattccttatgtcaatggaacagaaattgaatatgaatttgaagaaattacattggagaggggaaattcaggtctgggattcagtattgctggagggacagataatcctcacattggagatgaccctggcatatttattacgaagattattccaggaggtgctgcagcagaggatggcagactcagggtcaacgattgtatcttgcgggtgaatgaagttgatgtgtcggaggtttcccacagtaaagcagtggaggccctcaaggaagcaggctctattgttcgactgtatgtacgtagaagacgacccatcctggagactgttgtggaaatcaaacttttcaaagggccaaaaggtttaggcttcagtattgctggaggggtggggaaccagcacattcccggagacaacagcatttatgtaacgaaaattatagatggtggagctgcacagaaagatgggaggttgcaagtaggagacagactgctaatggtaaataactatagtttagaagaagttacacatgaagaggctgtagcgatattgaaaaatacatctgatgttgtttatctaaaagttggcaaacccacaaccatttatatgactgatccttatgggccaccggatattactcactcttattctccaccaatggaaaatcatctactgtctggtaacaatggcacgttagaatacaaaacatccctgccgcccatctctccaggaaggtactcaccaattccaaagcacatgctggttgaagatgastacacaaggcctccggaacctgtttacagcactgtgaataaactgtgtgataaacctgcttctcccaggcactattcccctgttgagtgtgacaaaagcttccttctctcaactccttacccccactaccacctaggcctgctccctgactctgacatgaccagtcattctcagcacagtactgcaactcgtcagccctcagtgactctccaacgggccatctccctggaaggggagccccgaaaggtggtccttcacaaaggctccactggcctgggcttcaacattgtgggtggagaagacggagaaggtatttttgtatccttcattctggccggtggaccagcagacctgagtggggagctccagagaggagaccagattttatcggtgaatggtatcgatctccgaggagcatctcatgaacaggcagctgcagcactgaagggggcggggcagacagtgacaatcatagcacaatatcaacctgaagattacgctcgattcgaggccaaaatccatgacctacgagagcagatgatgaaccacagcatgagttccgggtccgggtcccttcgaaccaatcagaaacgctccctgtatgtcagagccatgtttgactatgacaagagcaaggacagtggactgcctagccaaggacttagttttaaatatggagacatccttcatgtcatcaatgcctctgatgatgagtggtggcaagccagaagggtcatactagatggggacagcgaggagatgggagtcattcccagcaaacggagggtggaaagaaaggagcgtgcccgattgaagacagtgaagttcaatgcaaaacctggtgtgattgattccaaaggggacatccccggattaggtgacgacggttatggaacarmsactctgagaggacaagaagatctcattctttcctatgaacctgtcacgaggcaggaaataaactacacccgaccagtgattatcctgggccccatgaaggatcgaatcaatgatgacttgatatctgaatttcctgataaatttggctcctgtgtgcctcatactacgaggccaaagcgtgactacgaagtcgacggcagagactatcactttgtcatttctagagaacaaatggagaaagatatccaagagcacaaattwatagaagccggccagtacaatgacaatttatatggaaccagtgtgcagtctgtgagatttgtagcagwaaggggcaaacactgtatacttgatgtatcgggaaatgctattaagcggttacaagttgcccagctctatcccattgctatcttcataaagcccaagtctctggaacctctgatggagatgaataagcgtctaacggaggaacaagccaagaaaacctatgaccgggcaattaagctagaacaagaatttggagaatattttacagctattgtccaaggagataccttagaagatatttacaaccaatgcaagcttgttattgaagagcagtctggacctttcatctggattccctcaaaggagaagttataaattagctactgcacctctgacaacgacmgwrsmgmattyagaagaacaanatatatataatataacacttggaggcttttatgtttttgttgcatttatgtttttgcagtcaatgtgaatccttatgaatgtacaacacaaactgtgtgaagccatgaagaaacagg

SEQ ID NO: 2659 - DNA, 1648 bp, Rattus norvegicus
caggccattgggatttgtgtggagcaggaggacaggtgtgaggccagtacacctttgactcaatggggcttaattggttacaaaatgtcctcctatgcatgagatctacagactatatgttcttcaagaactgatcagtggtttcaccttctggaagaacattacaagcataaatatggtgccaaaactcctcattctctgactgtggtgtactggacctacttttgtgttgaagagaactatacacgctgaggtcactcattgttcagagactgtcgtgtaggaacatggaccattctaatagagaaaaggatgatagacaacggacaactaaaaccatggcacaaaggaatacacactgttcccgaccatctggcacttcaacatcctctggggttctcatggtgggacccaacttcagggttggcaagaagatagggtgtgggaacttcggagagctcagattaggtaaaaatctctacaccaatgaatatgtagccattaaactggaaccaataaaatcacgtgctccacaacttcatttagagtacaggttttataaacagctcggcagtgcaggtgaaggtctcccacaggtttattactttggaccatgtgggaagtacaatgccatggtgctggaactcctcggccctagcttggaagacttgtttgacctctgtgaccgaacgtttactttgaagacggtgttaatgatagccatccagttgctttctcgaatggagtatgtacactcaaagaatctcatttaccgagatgtcaaaccagagaacttcttaattggccgacaaggcaataagaaagagcatgtaatacacattatagattttggactggccaaggaatacattgatcctgaaaccaaaaaacacataccttacagagagcacaaaagcttaactggaactgcgcgatacatgtctatcaacacacatctaggcaaagagcaaagccggcgggatgatttggaagccctgggccatatgttcatgtacttccttcgaggcagcctaccctggcaaggactcaaggctgatacattaaaagagagatatcagaaaattggtgataccaaaaggagtactcccatcgaagctctctgtgagaactttccagaggagatgatgacctaccttcgatatgtcaggagattagacttctttgaaaaacctgattatgagtatttacggaacctcttcacagatctgtttgaacggaaaggctatacttttgactatgcctatgattgggttggaaggcctattcctactccagtaggatcagttcatgtagattctggtgcatctgcaataactcgagaaagccacacacacagggatcgaccatcacaacaacagcctcttagaaatcagccaagatctttaacagcagagtggtttgtgctggctcccctttcccaccctccagcacccacataagcaggagtcatgtgctggcagtgaaagcaggtggcaggagcggctgcacaacaagacaagcctgatcgggtccacactaaccagatgacaggagtgggagacagagccttcattgacagttcgggaccatcagtgagcagtgggatgacagtgaacctgaaataaaggccattgaaataagacttgta

SEQ ID NO: 2660 - DNA, 1900 bp, Rattus norvegicus
cgcctaggcgcgaccgatccccagtagcctcatgggacgctccagaggactctctctgtgccctgccaccgtgttccgatcctaggcgtccggactccacggttcaccctgaccgcaacccgcggcctgtccagagtggagtatgcggcccggagccccgtggactccggccaccgggcggcgctggcctagcttcggagcccagagcccgagggcagcaagtgaggagccgcgagaggcagtaaggcgtcggggcgcggagagaagccgctccaagccgggtgtccactgggccgggtgaccggtgggtggcctgaacgccgggcaggaggcggatcgccctgccgtcccggttccggggagactgcagaggggctccgccgcagcccctgtcttctggccaccatcctcacgctcctgctcctgcggcggggatgtcacggccccggctccgagcgccgtcccagccccggggctgagctgcggaccatgtcctcccgcagcccccggcccccgccccgccgctgccgccgccgcctgccgcgcccctcctgctgctgctgctgctgccgccgctcgcacctcaacgaggacaccggacgcttcgtgctgctggccgcgctcattggcctctacctggtggccggcgccaccgtcttctccgcgctcgagagcccgggcgaggcggaggcgcgggcgcgctggggcgccacgctgcgcaacttcagcgctgcgcacggcgtcgcggagccggagctgcgcgccttcctccggcactacgaggccgcgctggccgccggggtccgcgccgacgcgctgcgcccgcgctgggacttccctggagccttctacttcgtgggcaccgtggtgtcgaccayasgmkkcggcatgaccaccccagccacagtgggcgggaaggccttcctcatcgcctacggactgttcggctgcgcggggaccatcctgttcttcaacctctttctggagcgcatcatctcgctgctggccttcatcatgcgcgcctgccgggagcgtcagctgcgccgcagtggcctgctgcccgccaccttccgccgmggctcggcgctgtcggaggccgacagcctggcgggctggaagccctcggtgtatcacgtgctgctcatcctgggcctgttcgccgtgctgctggcctgctgcgcctcggccatgtacaccagcgtggagggctgggactacgtggactcgctctacttctgcttcgtcaccttcagcaccatcggcttcggggacctggtgagcagccagcacgccgcctaccggaaccaggggctctaccgtctgggcaacttccttttcatcctgctcggcgtgtgctgcatctactcgctcttcaacgtcatctccatcctcatcaagcaggtgctcaactggatgctgcgcaagctgagctgccgctgctgcacgcgctgctgcccggctcccggcgcscccctgtcccggcgcaacgccatcaccccgggctcccggmtgcgccgtcgcctggccgcgstgggtaccgaccccgcggctcgcgacagcgacgccgagggccgccgcctgtcgggagagctcatctcaatgcgcgacctcacggcgtccaacaaggtgtcgctggcactgctgcagaagcagctttccgagacggccaacggctacccgcgcagcgtgtgcgtcaacacgcgccagaacggcttctcgggcggcgtgggcgcgctgggcatcatgaacaaccggctggcagagaccagcgcctmcaggtagagcggccgcccgcccccagcgccgcggacctggccggggctgcgcgccgccgggcgggtttgcttcacttctctccgagatggcgctttcttaatctttatccaataaaactcgtgcc

SEQ ID NO: 2661 - DNA, 2100 bp, Rattus norvegicus
aggcagagcgggctaagatccgcagagccggatcttaccaggggcgtgggcacaagtccgcgggcagcgaccctcgcggggttgtcctccagtgccatggctggccgcggttgcagctgcagccccggccacctgaacgaggacaacgcgcgcttcctgctgctcgcggggctcatcctgctttacctgctgggcggcgccgcagtcttctccgcgctggagctagcgcaggagctgcaggccaagcagcgctgggaagagcgcctggccaacttcagcaggggccacaacctgagccgcgaagagctgcgaggcttcctccgccactacgaggaagccaccaaggcgggcatccgcatggacagcgtgcgccctcgctgggacttcacgggcgccttctacttcgtgggcacagtggtaactaccatagggttcgggatgacgaccccagccacaacgggagggaaggtttttctgatcttttatggtctcattggatgtgcgagtaccatcctcttcttcaacctctttctggagcggctgatcaccgtcatcgcctacgtcatgagaacctgccaccaccagcagctgcgcagacgtgggacggtagcccgggacaacaggaaggcccctagaaagggcgaggcagacagcctggctggctggaagccctccgtgtactacgtcatgctgatcctgtgcttggcatcagtagccatctcctgtggagcctcggctctgtacaccaccatggaaggctggagctactttgactccgtctacttctgttttgtggcttcaagcaccattggcttcggggacctggtgagcagccagaacgctcagtatgagaacgaagggctctaccgctttgtcaatttcttcttcatcctcatgggtgtctgctgcatctactccatgtttaacgtcatctccatcctgatcaaacagacagtgaactggatcctgaggaaactggatagcgggtgcttcccacaatgccaaagaggactcctgcggtccaggaggaacgtggtgatgccgggcaacatccggaacaggtgcaacatctccatagagacggacggggtgatggaaagtgacactgatgggcgacgtctctcgggggagatgatctccatgaaggacaccaacaaggtctccctggccatcctgcagaagcagttgtccgagatggccaatggtggaccccaccagaccagcacatcctcccgggatgatgagttctcagggggcgtgggagcctttgcagtaatgaataacaggttggcagagaccagtggggacaggtagggaccagaagtagctgccacatgaagaaacccagggcaagtgggggataggtcactgccacacccccagggacctcagctgtgtctctggctgttggaattagcatctccagtccagcttttgaaatctgaccttggccctgggcagcagtaaacctctcaaggttgggactggagccatcttccctgactcttactttacccttgaattcccaatttcgcgtttggaattgtctgggggagatgggtttccgtccagctttgatcccctaccccaacccggtcatgatccatccctagggagggaaagccccgaaaagcctgactctgtcatgtagtgtgaatggcggctgaacttcacccagcccctcaagaaaaggcagcgaacattcccgaatgcctctrggccttgttctattattggttccactaatagggaaaacatctaactttctctttatatctgcttctctgtttgggagtcttggtttcgttttkttttktttcctatctgactagtgtatctttttggatctcagatgataaggaaaccaaktctaccttcaaacctctaagttgtagcaagatgaaggcagtgagtcaaagaggaggaaagctcccatcttgtaactaaagcctaccgcttactgtgttctttctgaatggttacacggattatgtcattttaccagggcctggagcctgctgtaaaggcaaccgactatttattagaactgaaaatttaataaattcgcattttgttaactatgaaaaaaaaaaaaaaaaa

SEQ ID NO: 2662 - DNA, 1879 bp, Rattus norvegicus
ccacgcgtccgagcatctccacactcccagaggctcgctcctggagtgcccatagcccaggcagcatccagctggcaggtggctcccacaggaccctgagcctacagaggacatgtcagactatgaaaatgacgacgagtgctggagtgccctggagagcttccgggtgaagctaatctctgtcattgacccctcacgaatcacaccctatctgcgccagtgcaaagtcctgaaccccgatgatgaggagcaggtgctcagtgaccccaacctggtcatccgcaagcggaaagtgggtgtgctcctggacatcctgcagcggacaggccacaagggctacgtggcctttcttgagagtctggaactctactaccctcagttatacaggaaagtcactggcaaggagccagcgcgtgtcttctccatgatcatcgacgcatcaggggagtcgggcctgacgcagctgctgatgacagaggtcatgaagctgcagaagaaggttcaggacctgacggcccttctgagctccaaggatgacttcatcaaggagctgagggtaaaggacagcctcctgcgcaagcaccaggagcgggtgcagcggctcaaggaggagtgtgagctgagcagtgccgagctgaagcgctgcaaggatgagaactacgacctggccatgcgcctggctcacctgagtgaagagaagggagcagcactcatgcggaaccgtgacctgcagcttgaggtggaccagctcaggcacagcctcatgaaggcagaggatgactgcaaggtggagcgcaaacacacactgaagctccggcacgccatggagcagcggcctagccaggagctgctgtgggacctgcagcaggagagggacttgttgcaggcccgggtgcaggagctggaggtctccgtgcaggagggtaagctacacaggaatagcccatacatccaggtgctggaggaggactggcgtcaggcactgcaggaacaccaggagcaggccagcaccatcttctccctacgaaaggacctccgccaggctgaggccctccggacccggtgcatggaggaaaaggagatgttcgagctgcagtgcctggccttgcgcaaggatgccaagatgtacaaggaccggatcgaggctatcctgcagcagatggaggaagtctccattgagcgggaccaggctatgacctcaagggaagagctgcatgcacagtgtgcccaaagctttcaggacaaagataagctgcgaaagcaggttcgagaactggatgagaaggccgacgagttgcagctgcagctgttccagaccgagagccgattactggccgctgagggcagactcaagcagcagcaattggacatgctcatcctgagctctgacttggaagacagttcccccaggaactcccaggagctttcactgcctcaggacctggaggaggatgcccagctctcagacaaaggtgtcctggcagacagggagagcccagagcagcccttcgtggttctgaacaagaagcatctttcgcagacccatgacacggtgcccagcagcagcgagcccccggagaaggagcggcggcgcctcaaggagagcttcgagaactaccgcaggaagcgggcgctccgcaagatgcagaacagctggcgacagggagaaggggatcacgggaatacgacaggcagcgacaacaccgacaccgagggctcctagaggaccacgccgaggctgagcgtctgtgtaattgtgaagggatgctgcgggtttttttactgtacgctacacatacgttgtacaagtattagaaaaaaatgcagcctaataaaatgacctctgagctgaaaaaaaaaaaaaaaaaaaaaaaaaaaa

SEQ ID NO: 2663 - DNA, 2703 bp, Rattus norvegicus
ggggccaagcgtcaccccgggcggaccgagcaccgscgrcgcycggwgskcytgcactgggagggagcaagcgggcgcgcgagagagcgtgcggggccggaaagaccgctggcwctggtggggcagaacgaggttgtaagccatggcaatgtggatacaggctcagcagctccagggcgatgcccttcatcagatgcaggccttgtacggccagcatttccccatcgaggtgcgacattatttatcccagtggatcgaaagtcaagcctgggactcaatagatcttgataatccacaggagaacattaaggccacccagctcctggagggcctggtgcaggagctgcagaagaaggcagaacaccaggtgggggaagatgggtttttgctgaagatcaagctggggcactatgccacgcagctccagaacacgtatgaccgctgccccatggagctggttcgctgtatccggcacattctatacaatgaacagaggctggtccgagaagccaacaacggaagctctccggctggaagtcttgctgacgccatgtcccagaagcaccttcagatcaaccaaacgtttgaggagctgcgtctgatcacacaggacacggagagcgagctgaagaagctgcagcagacccaagagtacttcatcatccagtaccaggagagcctrcggatccaagctcagtttgcccagctggcccaactgaacccccaggagcgcatgagcagggagacagccctccagcagaagcaagtgtccctggagacctggctgcagcgagaggcacagacactgcagcagtaccgcgtggagctggctgaraagcaccagaagaccctgcagctgctgmggaagcagcagaccatcatcctggacgacgagctgatccagtggaagcggcgacagcarctggccgggaatgggggtcctcctgagggcagcctggatgtgctgcagtcctggtgtgagaagctggccgagatcatctggcagaaccggcagcagatccgcagggctgagcacctgtgccagcagctgcccatcccaggccccgtggaggagatgctggccgaggtcaacgccaccatcacagacatcatctcagccctggtcaccagcacgttcatcatcgagaagcagcctcctcaggtcctgaagacccagaccaagttcgcggccaccgtgcgcctgctggtgggcgggaagctgaacgtgcacatgaaccctccgcaggtgaaggcraccatyatcagcgagcagcaggccaagtccctrctcaagaacgagaacacccgsratgattatagcggcgagatcctgaacaactgctgcgtcatggagtaccaccaggccacaggcaccctcagcgcccacttcagaaacatgtccctgaaacgaatcaagaggtctgaccgccgtggtgcrgagtcggtcacggaagagaagttcacaatcttgtttgactcacagttcagtgttggtggaaatgagctggtctttcaagtcaagaccttgtcgctcccggtggtggtgatcgtkcayggcagccaggacaacaatgcgacggctacygtcctstgggacaacgcctttssagagcctggcagggtgccatttgccgtgcckgacaaggtgctgtggccgcagctgtgtgaggcgctcaacatgaagttcaaggctgaggtgcagagcaaccggggcytgaccaaggagaacctsgtgttcctggcacagaaactgttcaacagcagcagcaaccacctcgaggactacaacagcatgtccgtgtccykgtcccagttcaaccgggagaatctgscaggacggaattacactttctggcartggtttgacggtgtgatggaggtgttaaagaaacatctcaagcctcactggaacgatggggcmatcttgggtttcgtgaacaagcagcaggcccacgacctgctcatcaacaagccagatgggaccttcctgctgcgcttcagcgactcggaaatcgggggcatcaccattgcttggaagtttgactcccaggagagaatgttttggaatctgatgccttttaccacaagagacttctctatccggtccctcgctgaccgcctggggsacswgrattacctcatmtacgtgttycctgatcggccaaaggatgargtatattctaagtactacacaccagtcccgtgtgagcscscmacsgcgaaagcagctgacggatacgtgaagccgcagatcaagcaagtggtcccmgagtttrtcaatgcttcwrcagatgcagggagcggcgccacytacatggaccaggctccttccccagtggtgtgccctcaggctcactataacatgtacccacagaatcccgactctgtcctcgataccgatggggatttcgatctggaagacacgatggacgtggcacggcgtgtggaagagctcttaggccggcccatggacagtcagtggatccctmacgcgcagtcatgaccagacctcaycgmctgcagcttcactgtcctcctggaggacccttcctgtggatgttttaattccatgaatcgcttctctttggaaacaatattcgtaatrtgaagtgttaawamwarwmrwramwwwarwrwctctgtgcatagtggcactagtgaagggagtgtgcgtgagtgtgagtgtgtgagtttgcacgttgt

SEQ ID NO: 2664 - DNA, 2699 bp, Rattus norvegicus
  misc_feature (2508)..(2508): n is a, c, g, or t
tctagacttgatgaaataaatgagttatttcatcatgatgccacagccctagaatcccagcttctccagaggctgtggcatcaaattgtgagttcaaggccagcatggataacagagtgagtttaaagcaagcctcaaaaaattatggagactcctaacaggctgaggctatggctcaatgataagagttgttatacaatgtcctgcctaaatccccaagccaggaaaagaaaaatcaaacaagacaagctaaagagaaatgctgtaaataagggaagaataaatacacatgatatgtggttaatattttcatacgtaaaccattcctttttcccccttcgtgtcagtcttggtagatagtccaagctgagtttaaatctaggccctcccacctcagccttcccatgtgctggaattagctgtaaaacactcttaccagctaaaacaatccttttaactttctgaaattttatatgtcttattagtaaaaaaaaaaaaatgcaaataaataaaacatcacacaccaaaagttgtgtctacagttagaagaggcattccaaatggaagctggaagttttacacttccactatcaaatatattttatctaccaccaaaaccaagagaaaaagcattagaaatagaaatcatttatatccttttgtaaatgatgcccattacctacattcagttcttctccatcctcataatcaataggaaaaagaagttttagtagaacaaaatgctgcagcccagggacatatgaaagacgcttcacctgcaacagctaatattttcaagatggggctcaggcttgggttcatcttaagcctaaaactaagatgaaaatactaatatctacctttaaaaatataaaagagaaccaaccatacaggaaactaattacgtggtacacatgaactatatatctttgcagaagcgttcgcgttaagaggcatttttttttttaaatctttagggaggaaagttcagagcgaagcacccaggtaagtgttatgaaattggggagtgttcagataagatggcctctttattactcaatattttgcggcatattttttacgcagtagtaaaagaaacgcactccactgtgtttgaaggaactacagtctccctcttcaaggcaggccgccgcgcactgcaagtggctttcatttccgtggcgcagaaacttcctaaggaacatggaaaccacagcctaagctccctccaacaccggcggtgacgacagcctacgcgaaccccgtgatgcccctcgcctcccacgctcttacgcacagctcgctctgtatacgcggcggggcgggccttgctcaaaccacggatacgattggttctagaggagaggtgggtgggtcagcgctgtgacgccamaasctmgcscacygmrrkrgcgmgcgcctaggaasymgyggcatymsmcggytgcrggmrywsrbsaskrgytatcgtccctcctggtcttcacgctacttctgcatcgygagtcggggtaccttgtcagcaagacctcgctccccttacagtaactctcatctagacgtcgcaactccgccaccatgtttgaggcacgcctgatccagggctccatcctgaagaaggtgctggaggccctcaaagacctcatcaatgaggcctgctgggacatcagttcgggcggcgtgaacctacagagcatggattcgtctcacgtctccttagtgcagcttactctgcgctccgaagsyttcgacacataccgctgcgatcgcaacctggccatgggcgtgaacctcaccagcatgtscaaaattytaaaatgtgctggtaatgaagacatcattacattaagggctgaagataatgctgataccttagcactagtatttgaagcaccaaatcaagagaaagtttcagactatgagaygaagttaatggacttagacgttgagcaacttggaatcccagaacaggagtacagctgygtagtaaagatgccatctggtgaatttgcacgtatatgccgggaccttagccatattggagatgctgtggwgatctcctgtgcaaaggacggggtgaagttttctgcgagtggggagcttkgcaatgggamcattaagttgtcccagacaagcaatgttgataaagaagaggaagctgtgtccatagagatgaatgagccagttcagctaacttttgctstgaggtacctgaactttttcacaaaagccactccactgtctcctacagtaacactcagtatgtctgcagatgtaccccttgttgtagagtataaaattgctgacatgggacacttaaagtattatttggctcccaagatcgaagatgaagaaggatcttaggcgttgctagaaattgagaaactaaacctttgacgatcgcttctgagatgccagcgtgtwctgaggtcttttctgtcamcaagtttgtacctgagtattcttaaatattaaaataaaatgtagatatcttcwrwaaawaammwnwwdwwwmmwmwmsakrrkkkgcktacmsaatwmgcycyawagtraaaactggtyytgytaacataaatgtcwctgcctyacaaatactggtgattttcataaatgatcttgacgctaaatgcagttttaagaaatatttttcaakkkaavtaaagttaactgaatttgraaavwmaaamaaaaaaaaaaaa

SEQ ID NO: 2665 - DNA, 1656 bp, Rattus norvegicus
tgcgccgcctcctccctcccctcctcccgccgcggttggcttcgggagcctcgcgtggcgctcgcgtgtgcggccgccgccggcgccttctcggttttaaaagaggaaagggaaaaggaaagcagccgcaaaagtcagcgccgagcgtgctctgccaggtcgagccgctcccggcagcactctctcacttctggccagggaacgtggaaggcgtaccggctaggagccggttagggagggcgaattgggggacgaaagaggaattagaaagaaagggggttcagccaaataatcccagaagtaggctcaagcccagactggagcaggggagagcgagcgcaagagagcgcagtccgggagcggctcgacctggcagagcacgctcggcgctgacttttgcggctgctttccttttccctttcctcttttaaaaccgagaaggcgccggcgccgcacacgcgagcgccacgcgaggctcccgaagccaaccgcggcgggaggaggggagggaggaggcggcgcagagggaagacgatcacccaggcaccttcctccgttgctgctagacaactctgcctccttctgcgcgtttcttcccttttaactttcctccggggctggtttctcccctcttctttttcttcgccccctttgatcgtgcttcgcagtcccgcttccttctagctctctgcgtcccctgagtccccaactcgttctcccccgcgacagtttgggccagcatggagagctctggcaagatggagagcggagccggccagcagccgcagcctccgcagcccttcctgccgcctgcagcctgcttctttgcgaccgcggcggccgcggcsgcggcggyrgcggcagcggcagctcagagcgcgcagcagcaacagcagcagcaggcgccgcagcagcaggcgccgcagctgagcccggtggcggacggccagccctcarggggcggtcacaagtcagcggmcaagcaggtcaagcgccagcgctcgtcctctcccgaactgatgcgctgcaaacgccggctcaacttcagtggcttcggctacagccttccacagcagcagccggmagccgtggcgcgccgcaacgagcgcgagcgcaaccgggtcaagttggttaacctgggctttgccaccctccgggagcatgtccccaacggcgctgcsaacaagaagatgagcaargtggagacgctgcgttcggcggtcgaatacatccgcgcgctgcagcagctgctggacgagcacgatgcsgtgagcgctgccttccargcgggcgtcctgtcgcccaccatctcccccaactactccaacgacttgaactctatggcgggttctccggtttcgtcctactcctccgacgagggatcctacgacccccttagtccagaggaacaagagctgctggactttaccaactggttctgaggggctgacaggccctactgggaatggactttggaagcaggatggcaggagatcctgtgtcttcagtgtttcttgacaacgacgtcaaaagggggaggcagaaaaaaaaaaacaagggaagaggaaaagaaacaaacaaaccagacacccagcctcccacgggcaccaggacttagattcaatgttctcagcaacaggggtgggctccaacagc

SEQ ID NO: 2666 - DNA, 1662 bp, Rattus norvegicus
  misc_feature (1228)..(1228): n is a, c, g, or t
cagtggacgtggcggcgccccgkctcaattaggagtcgctgccgagtcccggcctgtcactgaggatcggcgmkggcgcggcggcggtccatcatgggtggctttttctcaagtatattttcyagtctctttggaaccagggaaatgaggattttwwttttgggattagatggtgctggaaaaacgacamttttgtacagattgcaggttggagaagttgttactaccattcccactattggatttaatgtasagacggtgacatacaaaaatctcaagttccaagtttgggacttaggcggacagacaagtatcaggccatactggagatgttattattmaaacacagatgcagtmatctatgtcgttgacagttgtgaccgagaccgaattggcatttccaagtcagagttagttgccatgttkgaggaagaggagctkaggaaagccattttaswsgwgkttgcaaataaacaggacatggagcaggccatgacgccctcagaaatggccaatgcgcttgggtwacccgccytgaaggaccggaagtggcagatctttaaaacgtcagcaaccaaaggcaccggcctcgacgaggcaatggaatggttagttgaaacactgaaaagcagacagykmgtccrttcacatcagcgcctgtgaaccaaacgctccgtcacagactcactgaaccrgtcagatgkacttctygtgactggtggaagggactgtgtgattctagcatatacagacctgacttcactatttgtaataaatmtaaaamgcaarwawmwrrwrarrrrrttagcttgatcgaatcacccaaatggtttatgtaatgtaaaatatttcttscttgktttcttgtgttaaggtatatattctatttgtatggaattcttactcagatacagktctattaaagaatgtacactcttgggggaaccgtcctacttttaaawwarwrrwwwmawmwtgtttgtataaacactaatatttagctcagactctttcccctaaaatgaattaaggcgttccaaaratgagtcttascaaagtagattagaaacagagygtatggtcgtcatttgcttagcagactcactttactgactcacatwatyykrcamkarkaacgmttcatcagaagcgttttctgtattgacytgaactytgtgcaggaactctgtaaggaagstggggttytgbtagrttgctttgccagccntacagtgaggtgttataggsttcagagtcargcttgkgggtcaggaactgycctaaatcaractgkatytggaaatgscmacactgggagcatwgacagacaccayagtgkggtggsacacgcctgtawtcctaggactyaggagacmgaggcaagamgaccaagaattyagctttgtggtgarkctrargscggcyygggcagcttgaggctatgtctcaaamcawaacagaaaaccawccaaccaaccaaccaaamyattcatgctcaagttgttacggatattcaaagtaatgtttgtatgaactctygtctmtgctagtaaaatgatacagaaggatcccaaatggctgtttgaggagttcaccacacaatacaaaaactgcacatgaaaagaaataaaaatcagttttmwtaaaaaaaaaaaaaaaaaa

SEQ ID NO: 2667 - DNA, 2477 bp, Rattus norvegicus
attctagcttggttggtagggtagaggattgtgtatgtcggttgggggtgaagggcaacgacagtgtaattctttcttggagctaagcctggaaaatagacagcagcaccgtgtttgtagttcccatgagttcaaggctgaggtcgcggctgacagccactccgcgcacgatcacttctggagttcttcatctcagaactctcttatccttgtcaactcccccactccctggacccatggtctcgcccggagttactatcgataactctacgctcggcccggcttctatcgactcgctcctgctcgcctcgccgtcctggactaaggcagagtgcagagcgtgtgttaagccatcaaacaatgaataccaccccaggcacagtgggcagtgaccctgtcatcttagcaactgcaggctatgaccacacagtgcgcttttggcaggctcacagtggaatctgcactcgaacagtgcagcatcaggactctcaggtgaatgcattggagatcactccagaccggagcatgattgctgctacaggttaccaacatatccgcatgtatgatctcaactccaataaccccaaccccatcatcagttatgacggagtcagtaagaacatcgcatcagtgggttttcatgaggatggccgctggatgtatacaggtggagaggactgcacggctcgcatctgggacctcaggtcccggaacctgcagtgtcagcgtatcttccaggtgaatgcacccattaattgcgtgtgtctacatcccaaccaggcagaactcatcgtgggtgaccagagcggcacgagccacatctgggacctgaagacagaccacaatgagcagctgatccctgagcctgagttttccatcacatctgcccacattgaccccgatgccagctacatggcggcagtcaatagtgccggaaactgctttgtctggaacctgacggggggcattggtgacgaggtgactcagctcatccccaagaccaagatcccagcccacacgcgctacgccctgcagtgccgcttcagccctgactccacgttacttgcgacctgttcggctgaccagacgtgtaaaatctggaggacatccaacttctccctgatgacagaactcagcatcaagagtagtaaccccggagagtcatcccgtggctggatgtggggctgcgccttctcaggggattcccagtatatcgtcacagcttcttcagacaacctggcccggctctggtgtgtagagactggagagatcaagagagagtatggtggccatcagaaagctgtcgtctgcttggccttcaacgacagcgtgctgggctagcccctgccccttgagggctgcactgggcaaccaggactgcctggtctagtggctctaagaggatgtacctgaacaataccctgctccaagagagactcaggtcagcctctgcatatcaggccagtgggacctgacccgactaccctcggcccctcttggccaacctagactttttggctactctaccctgggactttctccgtgcccagatctgttgtcagaaagctcacaaagccaggctgcatgtgcctggattgggagtcttctccctttagagagaccagacctagagtgcttggaactgttgaggacatcggaggttgatgcctgtatcccagagctgacaggtactggccttcctgccctctttccactctgcataccctggaagaggtgcttaccttggaagggctgtatgtgaaaccaagaagccctccagccacggcccctgcagtgagcagtgtcagcatcagcagcaagcctgctgctctccagcccctgtagcagggtttggtcttcacctgagggcacagtactagctgtggggcttcgggcttagagactcgggagccgacttgctcagggaaagggctgaggatggtaggtggtgactcctgtctcctcctatggcatccctgagttcttgtcttgggggtggtagagacttacctcaacaggcttggacctgaggctctcagtgaggatgtgcccbtgcttcatgctgcagcccctgctgacaatgcactgattgtctrswgscyctwrgaggagtcagccagggaaacctcaggatgcctttgatgaatcgaactgtatcctcccytcccaaccccaccgcttccttcccagccagtatctgatagcytgcctcagagccaggacaaccctctcccccacttgtgattgctggttaccaggtttgtccctggactcttggcctgtgcagaacatgggattttggagtgtgtgtgagctggccttgatgttagaattggytaggtcttggccagggtgacttttgtctggttgggcagatttttttcttggtgtgttacctctgactcctgagctagacacaggaaccatcaataaakgkgtatgamccmtcmrwawrarrmwamaaaaaaaaaaaaaaa

SEQ ID NO: 2668 - DNA, 2095 bp, Rattus norvegicus
cacctgtgttccaggagccaaaccagcaatgtcttcccctgcacagcctgcagttcctgccccactggccaacttgaagattcaacacaccaagatcttcataaacaatgaatggcatgattcagtgagtggcaagaaatttcctgtccttaaccctgcaactgaggaggtcatctgccatgtggaagaaggggacaaggcagatgttgacaaagctgtgaaggccgcaagacaggctttccagattggctccccatggcgcaccatggatgcttcagagagaggacgcttgctgaacaagctggctgacttaatggagagagatygtctgctgctggctacaatagaggccatcaatggtgggaaagtctttgccaatgcgtacttgtcggatttaggaggcagcataaaagcattaaagtactgtgcaggctgggctgacaagatccatggtcaaacaataccgagtgatggagacattttcacttttacgagacgtgaacctattggggtgtgtggccaaatcatcccttggrawtttccactgcttatgttcatttggaagataggccctgccctcagctgtgggaacacrgtggtcgtcaagccagcagagcaaactcctctcactgctcttcacatggcatctttaataamagaggcagggtttcctcctggcgtggtgaacattgtccctggttatgggccaactgcgggggcagcgatctcctctcacatggatgtggacaaggtggccttcacgggatcaacccaggttggcaaattaatcaaggaagctgcaggaaaaagcaatctgaagagggtcacgctggagcttgggggaaagagcccttgcattgtgtttgcagatgccgacttggacattgctgtcgagtttgcacaccatggagtcttctaccatcaaggccaatgctgcgtcgcggcatcccggattttcgttgaggagtcagtttatgatgagtttgtgagaaagagtgttgagcgagccaagaaatatgtccttggaaaycctctgacccaaggaataaatcagggccctcagattgacaaggagcaacatgataaaatccttgatctcattgagagtgggaagaaagaaggagccaaactggagtgtggtggaggacgctgggggaacaaaggcttctttgtccagcccacagtcttctccaatgtgaccgatgagatgcgcattgccaaagaggagatatttggaccagtgcaacaaatcatgaagtttaagtccatagatgatgtgatcaagagagcaaacaatactacctatggtctagcagcaggagtcttcacaaaagacctggacagggccatcactgtgtcttctgctctgcaggccggggtagtgtgggttaactgctatatgatcttgtcagcccagtgccccttcggtggattcaagatgtctggaaatggacgagaactgggtgaacatggtctttatgagtacactgagctcaagacagttgcaatgaaaatatctcagaagaactcctaagaagcagagtgaagagaaactctcagctgtggctacacgtctcctatcgtcaccagcaaagtgttgttttactataattttttcttctgttgatttctttaacatgatgaatccawcagtgtwrctgttactcatagaaaacatgtagcttaatccwacmaarccactcaccttmtaatatgtgactccagtccttatcccagaataaaaggatagatttaggtgcaarmwmwmwrtaactctgtcatgataggtgctttctgtcgtarctcccygthtagrgtactcatttggtgaggaggaccmgtcgtgatttaagctctgtccctctgtgrccccttkaamtgcttctcggcatgcmtgataamtgcagagtmggctgctytgtttcccaggtgttgtgraatgttttctagaaagccatgcctgcttatcaaatgaaatgcccagctgtaattagaatgcaaagctaataaagggacccttgcmtgawwwwrwwrrwmwrwaawtatttgggaatcaactaggattatggcaataaactctgctggtcaaaaaaaa

SEQ ID NO: 2669 - DNA, 3934 bp, Rattus norvegicus
gtcgcccggtccaaagacactccacatgttggttcctgagctgaggatctagcctgcacaccctgctattcggaaagtctgtgttcccgtctgaccgaggctcctcttgctacaggctcagcacttgtctgctggctctggggctgtgagaagggaagagtggtgcagcttctgaagcagtagttggtttgggtcctgagttgaggactgtcatctcccagagtcacgtctctcaccagcgtccgtcaaacttctggaagagtgaaaccccaggcaactcttcgaggtcaaacactcagtgtctaactggggttgatggtgcatagggtacccacacagacttcacgcggtcgtctcggctccaggttgcccctaccctgagctcccggctgtgcgtgactccagcgtgttctatccagacttcaatctaaacaatcttgattcctgtagccggcctggcgggaccctgaatggcaggaagaggagaccttggtcaccacagctatcacagtttgcagatctcgtcacatctcttctcctcctatctccaaggaccatgaccctggggattttccgaagggtctttttgatgctgtcggtggccttgggcctaactaagggagacttggtgaagccctccaggggtcagctggtaaactgcacttgtgagaacccacactgcaagaggccaatctgccagggggcatggtgcacagtggtgctagttcgagagcagggcaggcacccccaggtctatcggggctgcgggagcctgaaccaggagctctgcctgggacgtcccacggagtttgtgaaccatcactgctgctatagatccttctgcaaccacaatgtgtccctgatgctggaggccacccaaactccttcggaggagccagaagtagatgcccatctgcctctgatcctgggtcccgtgctggccttgctggtcctggtggccctgggcactctgggcttgtggcgtgtccggagaaggcaggagaagcagcggggtctgcacagtgacctgggcgagtccagtctcatcctgaaggcatcggaacagggagacagcatgttgggggacttcctggtcagcgactgtaccacaggcagcggctcagggctacccttcttggtgcagaggacagtagcgcgacaggttgcactggtggagtgtgtgggaaagggccgatatggcgaggtgtggcgcggttcgtggcatggcgagagtgtggcggtcaagattttctcctcacgagatgagcagtcctggttccgggagacagagatctacaacacagttctgcttagacacgacaacatcctaggcttcatcgcctccgacatgacctcgcggaactccagcacgcagctgtggcttatcacccactaccacgagcatggctccctctatgactttctgcagaggcagacgctggagccccagttggccctgaggctggctgtgtccgcggcctgcggcctggcgcacctgcatgtagagatctttggcactcaaggcaaaccagccatcgcccatcgtgacctcaagagccgcaacgtgctggtcaagagcaacttgcagtgttgcattgcagacctgggattggctgtgatgcactcgcaaagcagcgattacctggacattggtaacaacccccgagtgggtaccaagagatacatggcacccgaggtgctggatgagcagatccgcacagactgttttgagtcgtacaagtggacagacatctgggccttcggcttagtgctatgggagattgcccggcggaccatcatcaatggcattgtggaggactacaggccacccttctatgacatggtacccaatgaccccagttttgaggacatgaaaaaggtggtgtgtgttgaccagcagacccccaccatccctaaccgactggcagcagatccggtcctctccgggctggcccagatgatgcgagagtgctggtaccccaacccctccgctcgcctcaccgcactgcgcataaagaagacattacagaagctcagccagaatccagagaaacccaaagtgattcactagcccagcatcaccagactttctctgcctaaagtatgtgctgggccagaagacatagcccgtctgggtagaggtagctcgagtgtgcagggtgccctgcgtgtgcctgctcagcttggcccccagcccattcagccaaaaatacagctgggctgaaattcgatccgcctccgtctggcctgctcaaagtggccggctctctgacgcctggctggattccctgtccccaaggccagcagagcacaccccctaccactcccagggcagggtggccaagccagggaatcccgggcccggatcctgggctttcactccccacccttggtcaaccttgctgccccgtcagagctgccaggatcggacagggccctgtccagattcagcagacattccacctgctggggctcagccagagagatactcagcagcctcagtgtctctctgtgggtgtttattgctcctatgatgcctttccgttgtcctgactagaccccctggctagcgaatgctagtctcttgggagaggtggtacctgacccttccacccaccgtccccttaccacctcagctgactcattaaggcatcaaaacccaagggtcctctgaggagaaggtcaagcatggtagaagggacccagcattgctccctctgataggagaggacttcactgtcttaggatcttttgtcccaatgtcctttgaggtgtctcagaacctgattttccttgaagctcaggctgtgtgaaagctaggtcttgtctactacaccccgttcctatcacttgagtcaagctgtggtttgtaaatagccaccacagtccaggatggcccaacgtgcccctgggctaatctccaggcccctgttcttgccttgagctttgcaagtggccaccctgggacctgggcagcacaggaatttctgactccctctgtggcttggtcttctgcccagggctccgggagggggtggtggtggtgacttcctttggggtcttccaagactaaaaggaaattcggcccctgtcaagaagcctccagcaaccagggttctacacctcctggctgtgactctctggccaaagccacactctgggccaggtcccagaaagtgcaccttgggagaacttggcctacagaaacaccaagagtcccagcatttagaaatgtgaagggtacaccccatcccgaagcctgagttgatggactggagagaagcgggctgtaggcaaggcttatggagggcaaagtagggctcgggcaagagacaagatcagcatcsakcttgggaagacctggcctaraaacccttggcctttgaagggtgaaacaacggagacagttcatcctgctctgcacacgtgccgacccgccggasgcgaccgaccgcttgagttcctccggtgtgtgctcccagctctccrkmaygwsrctcaagactacctttcagcagtgtgcaaggaccarggagaaccaggaagtgaamcgagatggaaaacagaaagtaaacgggactttttcagaccagtggggcaaagtctgaagrttctmtggtcactggagccagggaatcgctttstgacctgaaggatttttatttstamtggacttgggaacaaattcatcctcmgattccacagccagaaacggamgacmgtagctcctccaggycaggaaatcstaagtgcggagaggggtgcgggtgttgaacgactggagatgtggcaaggaagstggcattyyccaaatgcttcctaacgcaggtgtgcaagtggaaccacacmgtttwtggaagcacttagcccgtgacaggcacatagtaggtcctcaataaaccatgtttgaccccctgaaaaaaaaaaaaaaaaa

SEQ ID NO: 2670 - DNA, 1181 bp, Rattus norvegicus
  misc_feature (931)..(931): n is a, c, g, or t
cggcggcgcagagaggagcgcgggtggagggcgcggaccgaccgagcgcaccgaccatggcctccaagtgtcccaagtgtgacaagaccgtgtacttcgccgagaaggtgagctccctgggcaaggactggcacaagttctgcctcaagtgtgagcgctgcaacaagacactsacgmsksgcggmcmkrcygagcatgatgggaaacccttctgccacaagccctgttatgccacactktttggacccaaaggcgtgaatatcgggggcgctggttcctacatctacgagaagcctcskrcgrakbcsscwcrrgtcactggccccatcgaggtccctgtggtacgaactgaagagcggaagaccagcgggccgcccaagggtcccagcaaagcctctagtgtcaccacgttcactggggagcccaacatgtgccctcgatgcaacaagagagtgtacttcgctgagmakgtsmcctsmctskscaaggactggcaccgaccctgyctgykctktgagcgskgstccrwgacwcwgmmcycwskckggcatgcwsagcatgatggccaaccctactgccacaagccctgstatggaatactctttggacccaaaggagtgawtactggtgctgtgggcagytacatctasgacaaggacccggaaggcacagttcakccttagayctgcagakrmtbcsscwbgmggtcmccwmkttsaccytgagrgagmsyraymtgctgcctagtscwrcmwsagwgtgtytcgcmtgcaattccagvacctaagtgatggrggrgaaagccmagvtagtcctrgaatttcrgctccyktggtcmcsttggcatgtchtwtgttgccsgtggytwacwtwctgtvtgtgygkyhcsakagcmccatgggtcmtgtgtccccatgtcsbtgataactynccawrgtggctgtchtwtgatatccctttgmccacaytcgcccrccagtattahttwtgcthtgcttsccggtgwtgggcwtdagmtagctmacagcattcccggggtgacgrmmccccagcaagragccctktghtggttcccmmmbtamtccvtwmttascstcacmtggttcacagvtwtggrgrtktgctgtcaataaatagtttggtttharrdwwrvmdraraammaaaaaaaaaaaaaaaaaa

SEQ ID NO: 2671 - DNA, 2661 bp, Rattus norvegicus
cgaggcgggtgccgtcggtcccgcgctgcgcgctcccttccgcgttccgccgtctgccccgcctggcaacccggccctgctcgggggccgctagccatggccggagtgccctggacacagcgctgacggcggctggcggagtgcgccatgcccagcaggaccgaccccaagatggaccggagcggcggccgcgtccgtctgaaggcgcactacggcggggacatcctgattaccagcgtggaccccacgacaactttccaggacctctgtgaggaagtgcgagacatgtgtggcctgcaccagcagcacccactcaccctcaagtgggtggacagtgaaggtgacccttgtactgtgtcctcacagatggagctggaggaggccttccgcctggcctgtcagggcagggacgaagtgctcatcatccacgttttcccaagcatcccagaaywaccgkgcatgmmkwgkcsyrgagaagmcragtccatctaccgccgtggagccagaagatggaggaagctataccgagccaacggccacctcttccaagccaagcgctttaacaggagagcgtactgtggccagtgcagcgaaaggatatggggcctcgcgaggcaggggtacaggtgcatcaactgcaagctgcttgtccataaacgctgccacgtcctcgtcccgctgacctgcaggaggcatatggattctgtcatgccttcccaagagcctccagtagatgacaagaacgatggtgtagaccttccttcagaagaaactgatggaattgcttatatttcttcatctcggaaacatgacaatatcaaagatgattctgaggaccttaagcctgtcatcgatggggtggatgggatcaaaatctctcaggggctggggctgcaagactttgacctcatcagagtcatcgggcgtggaagctatgccaaggtcctcctggtgcggttgaagaaaaacgaccagatttacgccatgaaggtggtgaagaaggagctcgtccacgacgatgaggatatcgactgggtgcagacagagaagcacgtgttcgagcaggcatccagcaaccccttcctggttggcttacactcctgcttccagacaacgagccggttgttcctggtcatcgagkatgtcaacgggggggacctcatgttccacatgcagaggcagaggaagcttccagaggaacacgccaggttctatgctgctgagatctgtatcgctctcaacttcctacatgagagagggatcatctaccgggacctaaaactggacaacgtcctcctcgatgccgatggacacattaagctgacggactacggcatgtgcaaggaaggcctargccccggcgacacaacaagcactttttgtggaaccccgaactatatcgcccccgaaatcctgcgaggagaagagtacgggttcagcgtggactggtgggcgctgggtgtccttatgtttgagatgatggctgggcgctccccctttgacatcatcacagacaaccctgacatgaatactgaagactaccttttccaagttatcctggaaaagccaattcggattccccgtttcctgtctgtcaaggcctcacacgtcttgaaaggatttttaaataaggatcccaaagagaggcttggctgccggccgcagactgggttttccgacatcaagtcccatgccttcttccgaagcatagactgggacctgctygaaaagaagcagaccctgcctcccttccagccccagatcacagatgactatggcctggacaacttcgacacgcagttcaccagcgagcccgtacagctgaccccagatgatgaggacgtcataaagaggatcgaccagtccgagttcgaaggcttcgagtacatcaacccgcttctgctgtctgctgaggagtccgtgtgaggccatgagcatctctgttgtggacacgtctgtgaatgaccctgtcactttacccttaactacagcatatgcatgccaggccagacaccgaggctccaagcagccagagagggatgctggccaccaagaccgcagagggggcacccaacaggcacttctagacagagcaatctcttgtgtccaggccccagaggctggctttgtgctggaaggaaccacttcctgtgcccatggcggccctaccagagggtgagacagccacgccgtcttgaaaggcgcacatcttccacagagacagaactcgatgcactgatccgctccaggaaaagttagcgtgtaatgcccysaggaatwmagtgtactgatgatgtcgaagcttcctctgatgccttttttctgtggcacccgcctgatgtccccaatgcagccccccacacgaggaggagctgcgctttccaagcaggcagaacgtaggcaggggacgggcacccaagtgcctgcagggatgttgtgctgcaacaagaattgttacagattcggaacgttttctaaatcccggtaagttctgttgttaatatttaacaagtattttcatacctagggcagctaaccgtggtaggctgaagccgaagggacaccccggccaggttggtggcgctgttcccaccagcccagcccgttcggactctgaagggggggaaattggatcacggagattctaaaacattgctcacc

SEQ ID NO: 2672 - DNA, 1284 bp, Rattus norvegicus
gaattcctggcccttctgctccttctctttccccatagttttaactggcaassggtagcttcttcagcatccgtacagcctgctacaaaaatgggtactgcagaagatgtttttagaaaagatctgaagatcattcatggctaccccatggtctatgcttttgcactgggttgggaaaaaatcgaagagttccagagcagaccatgtgacattgtaatacccacttaccctaaatcaggtactacttggcttagtgaaattgtggacatggttctaaatgatggaaatgttgraaaatgtaagcgagatgttattacctctaaagttccaatgttggaacaaaatgttcctggagcaagaagatcaggtgttgaactcttgaagaaaactccatcacctcgaattataaagacacatcttccaattgatctactcccaaaatccttctgggataacaagtgcaagatgatttaccttgctagaaatggcaaggatgttgctgtgtcctattatcattttgatctaatgaataatattcagcctcttcctggcacctgggaagaatatctggagaaattcctcgctggaaatgtggcctatggctcatggttcgatcatgttaagagttggtgggaaaagagggaagggcatcccatacttttcttatactatgaagacttgaaaaagaacccgaagaaagaaatcaagaagattgccaactttctagacaagaccttggatgaacataccttggaaaggatcgtccatcacacctcctttgaagtgatgaaggataaccccctggtcaattacacccatctgcccacagaaataatggatcacagcaagtccccattcatgagaaaaggtgttgttggtgactggaaaaattacttcacaatgacccaaagtgagaaatttgatgccatatataagawgaaattgtctggaacaacacttgagttctgcacagatattcagagtgcctaaacttcaacttgaatatatgatttcttgaaatagtagtttgacagggaaatcagatggatytgtgagggagaaataaatgtgcttttaaaacactgattaaatatgccctgcacatccctcagcaggaattattaataattccgaattatctagggmcaaggtcttttgtgatcttagttttcaaagggtatgtcttcagattccaargtgactactgaattaaataamtaagttttktrarywytgawwaawwawrmmmdvmamawmmmwmadmarraawwrwdwrdmrktccg

SEQ ID NO: 2673 - DNA, 2723 bp, Rattus norvegicus
cgtcccctgcggtctcctctgtgtgccatggacggcatcgtcccagacatagcagtcggtacaaagcggggatccgacgagctcttctccacgtgtgtcagcaacggccccttcatcatgagcagctcggcctcagcagccaacggaaatgatagcaagaagttcaaaggtgataacaggagcacaggagttccttccagagtcatccatgtccgaaagctacctagtgatgtcactgagggcgaggtcatctccctggggctgccctttgggaaagttaccaacctccttatgctgaaggggaagaaccaggccttcattgaaatgagcacagaggaggctgccaacactatggttaactactacacatsggtggcsccagtgcttcgtggacascccatytacatccagttytccaaccacaaggagctcaaaaccgacagytygcccaaccaggcacgtgcccaggcagccctgcaggytgtgaactccgtacagtcaggaaacctggccttggcagcctytgytgctgccgtggatgcaggaatggcaatggcaggccagagcccagtgctcaggatcattgtggagaaccttttytacccagtgacactggrcgtsmwkmamcarmtsttctygaarwwwrrmamarwmmwgaagatcatcacgttcaccaagaacaaccagttccaggcgctgctgcagtatgctgaccctgtgagcgcccagcatgccaagctgtccctggatggccagaacatctacaatgcctgctgcacgctgcgcatcgacttctccaagctcaccagtctcaacgtcaaatacaacaacgacaagagccgagactacacacgccctgacmygmsstcwggagmcrgsywsccatcmcwsswtyagaccatsscwgcagcckywggcctctctgttsctaatgtccatggagccctggcacccctggccataccctctgctgctgctgctgctgctgcagccggccgcattgccatcccasggctggcaggcgccgggaattccgtccttttggtcagcaacttgaaccctgagagagtcacaccccaaagcctctttattctcttcggcgtctacggtgatgtgcakcgggtgaagatcctgttcaacaagaargagaacgcacttgtssagatggcasacggcagccaggcccagctggccatgagccacctgaacgggcacaagctgcatgggaagtcagtgcgcatcaccctgtcawagcaccagagtgtgcagctgcctcgtgasggacakgaggaccagggcctgaccaaggactatggcagctcaccgctgcaccgcttcaagaaacctggctccaagaactttcagaacatctttcctccctcagctaccctgcacctctccaacatcccgccctctgtgtcagaggatgacctcaagagcctcttctccagcaatggcggtgtggtcaaaggcttcaagttcttccagaaggaccgcaagatggcactgatccagatgggctctgtggaggaggcagtgcaggcactaattgagctgcacaaccatgacctgggcgagaaccaccacctgcgagtgtccttttccaagtccaccatctaggtgcctgtgggcctgcgaagcttccgccattccagaaaagccactttaaaaagcagctgaagtgaccttacagaccagagatttatttttttaaagagagatcagtttacctgtttttaaaaaaattaaatctagcccactttgccgtggcaggaaatggcttgggccacagaggcccaggcccagcaaccatgccttgaggggcttaggcgtgaggccacagcggtgccccaacacagccgcttctgtgccttacaaaaccagcgtgcctcacggccgcacacccaccctctaaggccaccagttgtctctagacctgcagtgagccaggcggcctatacttaggctccccaatgccgtgtaagagctggggccactcccctacacccattataatcaagtgacatgattctcccatgtccctggccagcccagagggcccaggccgtcctcagcgccgagccttgtgtgaccttgtattctattccgtggggtcacagacacctgtgcctagcaatctttccacttgaccaaatacccgagtcttttccatttatatgcaagagatagagtttttaagtaactttttatagcagtggtacaattgtatgtgtgtactctaagcttctctgtcccctgcactccttccttccagtgaccaacttgcaggtgggcccaggccagggctggagaagaagctctgaggcttgtgggtgtcctaccttcaaattttggaccaaagttttgttctctgcccgcctctgactatgcccagttgaggggctgacctctaggccttaatgtccttcctggacgcccacctccatcctagcctgtttctatgggaggggttccctgcacctcagtttctgtgaaagtcatggaagagtgtaaatatttatgattttatacctgtggggctgaggcggtgcagcattttttatggtgacagatgtatattttggtaacgactacaggctcagtattgtcctgggccagccctagccacatctaccccagcccagatggtgtattggggggagggggactttccattaaagcagtttataacctttgaaaaaaaaaaaaaaaaaaaaaaaaaa

SEQ ID NO: 2674 - DNA, 2083 bp, Rattus norvegicus
  misc_feature (967)..(967): n is a, c, g, or t
ttttttttttttttttctctcaaaacacaccttttagtgccagctcctgagtgtgaatatacatgattgtagttagatgtccctgcattctgacaagtgatttgacttgggagacaaggggttattgtggtctctttgctttcctaaactgatgtgtgtggccttggggagcatagggagtctggggggacagggctcttttctgccacctgggacctaggatttaattgtgccccatcctcccatgagatatatatcaggagggatagagaaagcttggggtmrsgggctsstasgyrggwaycrcrgggtcymkrctggcrgctrywaaggmcygrvwsbrvkydksykbyckgaggtctctggccagtatcgyttccacctgtccacaaacatggggaatatctttgcaaacctcttcaagggcctttttggcaaaaaagaaatgcgcattctcatggtgggcctggatgctgcakggaaracaacaattctatacaaactgaagctgggcgaaattktgaccaccattcccaccattggtttcwacgtgragactgttgaatacaagawtatcagcttyaccgtktgggatgtgggtggccwggacaarattcggmcgctgtggcgccactacttssagaacacccaaggcttgatcttcgtagtggacagcaatgacwgagagcgtgtgaacgargcccgtgaagagcttatgaggatgctagctgaarwtkadctssgaratkcmgwwctsktkgtrtttgsyrwcrwgsaggacctsyycamtgcywtsaatgcggccgwaatcacagacwagctggggctgcactctctacgccacaggaactggtacattcaggctacctgtgccaccakcggwgacgggctctatgaaggactagatwggctgkctaatcagctccggaaccwgawgtgwaccwgacccctscttycccctcacttnctcttctmcgccctcagmtttcctctcatgtggcaaacgtgcgactytgwggtcctgagtgccagaagctgtctccatgggttggtcacagtgtgcatcgcaccgtgctgtacatgtgcwgacgcagcctgcarccaggtttttatttaatrkaaatagtttctgtttccactgargcagkttctggtactyctatgcaatattacttagctttttttattrkraaaagagaatcaactcactgtcagtacctgagaagggatwtgggtgtaggggcacctggcctycgggagccattgggctgtagactggtgtcsgtatmcatttggkggktggkttttaacccaaactmagkgcattttttaaaaatagkttaaaacacaggacaagaacryytgracacmcagaacggrgacwwkgcywagkgtaggktttgcarktaakggcckgaatgcwagtwatyagatcacyhgwtyccykrkggggmcagraragaargkgasgaamaaaccaccatycghtgywtgkwymmrgwarasccmccgwgaytygcckgkcttkggsdcashygcattcmawagmatkgtgsttgkacttgtgskcacawggkmacywarrrktvggcwsgrrgccatkgdsgrgkgcagggcmtggcttgwacttggtgwgwgsccaggcccaatggcagshtacakrccsagcttactcttgggcccacttgrayrcamtggcagragscytgggtctywccagcaggagtgcgtgcaasgtgggaggrtcggtccattacagacccacatcstggagcaccccmwtytccatgtgtgaagtagcttcctccytcagcctgcaagggtccgatttdccatcgaaagacgaccyctacttttttyktttgtattytgataaacactgaagaagctggagctrttaaatttatcttggggaaatctcagaamtggtttatttggtgtcgtggaacctcytastgctttcaatacacaattwgtaatcaamwrwwwwrwawamwwrktttcagttttcatttcgacaagcactgtaattatagctwttrgaataaagtctyttamctwwwdraaaaaaaaaaaaaaaaaa

SEQ ID NO: 2675 - DNA, 1440 bp, Rattus norvegicus
ggaaatggcggcgtcgagcgggaggtctcagtcttccctgcacaggaaggggctgatggcggctgacaggaggagcaggattttggcagtgtgtggaatgcatcctgaccatcaggaaactctgaaaaagaatcgagtggtgctggccaaacagctgctgctgagcgaactgttagaacatctcctagaaaaggacattatcactttggaaatgagggagctaatccaggccaaagggggcagtttcagccagaatgtggaactcctcaacctgctgccaaagagaggaccccaggcttttgatgccttctgtgaagccctgcgggagaccaggcagggtcacttggaagacttactgctcacaaccctctctgatatccagcacatactcccaccgttgagctgtgactatgactcaagtctccccttctcggtgtgtgagtcctgccctcctcacaagcagtcccgcctatccacagatactatggaacactccttagataatggtgatggtcctccctgtcttcaggtgaagccatgcactcctgagttttaccaggcacactaccagctggcctataggttgcagtctcagcctcgtggcttggcactggtgatgagtaatgtgcacttcactggagagaaagacctggaatttcgctccggaggggatgtggaccacactactctagtcaccctcttcaagcttttgggctacaatgtccatgtgctgtatgaccagactgcacaggaaatgcaagagaaacttcagaattttgcacagttacctgcacaccgggtcacagactcctgcatagtagcactcctctcacatggtgtggaaggtggcatctacggggtggatggcaaactgcttcagctccaagaggtttttcgactttttgacaatgctaactgtccaagtctacagaacaaaccaaaaatgttcttcatccaagcatgtcgtggaggtgctattggatcccttgggcccctccttctgttcactgctgccaccgcctctcttgctctatgagacagatagaggggttgaccagcaagatggaaagaaccatgcacaatcccctggatgtgaggagagtgatgctggcaaggaggaattaatgaagatgagacttcctactcgctcagacatgatatgtggctatgcttgccttaaaggcaatgctgccatgcggaataccaaacggggttcctggtacattgaggccctcactcaggtgttctctgagagagcttgtgacatgcacgtggccgacatgcttgttaaggtgaatgcccttatcaaggagcgtgaaggctatgcccctggtacagaattccaccgatgcaaggagatgtctgagtactgtagtactctgtgccagcagctctacctgttcccaggctacccacccacgtgatgccacctgctagtca

SEQ ID NO: 2676 - DNA, 2292 bp, Rattus norvegicus
gcggccgcccttttcctggcaggacagagggatcctgcagctgtcaggggaggggcggcgaggggtgatgtcaggagggctacaaatagtgccgacagctaaggggctccgtctcccctcttatccactctccagccggctgcccgcctgctgcctcctctttgcgtccgctcagcctcgtccacgccgccaccatgagccaggcctactcgtccagccagcgcgtgtcctcctaccgccgcaccttcggcggcgccccgggcttctcgctcggttccccgctgagctctccggtgttcccacgagcaggcttcggtaccaagggctcctcgagctcagtgacatcccgcgtgtaccaggtgtcgcgcacgtcgggcggggccggaggcttggggtcgctgcgggctagccggctggggaccacccgagcaccatcctatggcgcgggcgagctgctggacttctcgctggccgacgcagtgaaccaggagttcctggccacgcgcaccaacgagaaggtggagctgcaagagctcaatgaccgcttcgccaactacttcgagaaggtgcgctttttggaacagcagaacgccgcgctcgccgccgaggtcaaccggctcaagggccgagagccgactcgggtcgccgagctctacgaggaggagatgcgagagctgcggcgccaagtggaggtcctcaccaaccagcgcgcccgcgtcgacgtggagcgtgacaacctgatagacgacctgcagaggctcaaggccaagctacaggaggaaatccaactgagagaagaagcagagaacaacttggctgccttccgagcggatgtggatgcagccactctggctcgaattgacctagagcgcagaattgagtcactcaacgaggagattgcattccttaagaaagtgcacgaagaggagatccgtgagctccaggcccagcttcaggaacagcaggtccaggtagagatggacatgtccaagccagacctcacagccgccctcagggacatccgtgctcagtatgagaccattgcggctaagaacatctctgaggctgaagaatggtacaagtccaaggtttcagacttgactcaggcagccaataagaacaacgatgcgctgcgccaagccaagcaggagatgatggaataccgacaccagatccagtcctacacctgcgagattgatgctctcaagggcaccaacgactccttgatgaggcagatgagggagctggaggatcgcttcgccagcgaggccagtggctatcaggacaacatcgcgcgcctggaggaggagatccgacacctaaaggatgagatggcccgccatctgcgggagtaccaggatctgctcaatgtgaagatggccttggatgtggagattgccacctaccggaagctgctggagggcgaggagagcaggatcaaccttccgatccagaccttctctgctctcaacttccgagaaaccagccctgagcaaaggggttccgaagtccacaccaaaaagacagtgatgatcaagaccattgagacccgggatggagaggtcgtcagcgaggccacacagcaacaacatgaagtgctgtaagccagacacgtgtcctggccccgtcctcactgcctcctgaagccagccttttccactctcggatgtcacacccagtcgcttttctcctctcacagcctctgaaccctcctcacaatcacctctttgtggtcttcatgctgcccagcctcaggaaacccctcagccacctctgcagaccctcccatgagccctggctattggcaactgtcaagcctggctcttaagagagaacctagctcaaggcctgacccttttccctgccatctttgtgacctctggcttagaagggggtaccagagagggcgatgggaccggcagggtcaggacagagctttgtggatatccccacattcgacccccagcctgggtcagagacagaatgaagcctcagcgagctgagatggagaagggggggcctgaaaaatgtcctcgtggcccctctctttcccaccccagctcagataggcttggaaagcaggggctgtaagagagaactggaaggtgctggatgtgggagcaggagatacagaaggagagaggatgggtgagaagttggagaggaaagaagagagaggcagagaktgggctcaggttggtgggaggatgccacctcccytgcytgcccctcccaccgcaggggccytggacagaaacaataaagagwtaagcmcaaaaaaaaaaaaaaaaa

SEQ ID NO: 2677 - DNA, 2317 bp, Rattus norvegicus
gcggtagcgtgtgacaggaggcctatggcacctgcccagtcctacctcagcccatcttgaaaaaatccttagacaacatggaaccaccacgaggccctcctgctagtggggctgagccatctcgggcagttggcactgtcaaagtgtacctgcctaacaagcaacgcacagtggtgactgtccgggatggcatgagtgtctatgactctttggacaaggccctcaaggtgcggggtctcaatcaggactgctgtgtggtctacagactcatcaaaggaagaaagacagtcactgcctgggacacagccattgcacctctggatggcgaggagctcattgtggaggtcctggaagatgtgccactgaccatgcacaattttgtacggaagacattcttcagtttggccttctgtgacttctgccttaagtttctgttccacggctttcgctgccaaacctgtggctacaagttccaccagcattgttcctccaaggtccccacggtctgcgttgacatgagtaccaaccgccgacagttctaccacagcatccaggatttgtctggaggctccaggcagcaggaggttccctcaaatctctctgtgaatgagctgctaaccccccagggtcccagtccctttacccagcaacgtgaccaggagcacttctccttccctgcccctgccaatcccccactgcagcgcatccgctcmacatctactcctaacgtccacatggtcagcaccacagctcccatggactccagcctcatgcagtttactgctcasagcttcagcaccgatgctgctggtagaggtggtgatggagctcctcggggtagccctagcccagctagkgtgtcttcagggaggaagtccccacatkccamgkwacctsywkaamagykkgaacggaagtccttggcagatgaaaagaaaaaagtgaagaacctggggtaccgggactcaggctattactgggaggtgccacccagtgaggtacagctgttgaagaggatcgggacaggctcttttggcactgtgtttcgggggcgttggcatggcgatgtagctgtgaaagtgctcaaggtggcccaacctaccgctgagcaggcccaggccttcaagaatgagatgcaggtgctcaggaagacacgacatgtcaacattttgctgtttatgggtttcatgactcggccagggtttgccatcatcacacagtggtgtgagggttccagcctctaccaccacctacatgtggctgacacgcgctttgacatggtccagctcattgatgtggcccggcagactgcccagggcatggactacctccacgccaagaacatcattcaccgagacctaaagtccaacaatatcttcctacatgaggggctcacagtcaagattggtgacttcggcctggccacagtgaagacacgatggagtggggcccagcccttagagcagccctcagggtctgtgctgtggatggcagctgaggtgatccgaatgcrggacccgaacccctacagcttccagtcggatgtctatgcctatggtgttgtgctctatgagcwyrwgrscggctcactgccctacagccacattggcagccgtgaccagatcatctttatggtgggtcgtggctatctgtctccggacctcagcaaaatcttcagtaattgccccaaagccatgaggcgcttgctgactgactgcctcaagttccagcggsasgagsggcctctatttccccagattctggccacgatcgakctgytgcagcggtcactccccaagattgagcggagtgcctccgaaccctccttgcaccgtacccaggstgatgagttgcctgcctgccttytcagcgcagcccgccttgtgccttagactccactcccagcccaytagggagccattttcagcttaccatgccaaggcaccccyttcctaccagccaatcattgttctgtctgtgccctgatactgcctcaggattccctatcccacaccctgggaaatttgggggactccaaaaactgaggtcccctgcttccyccataatttggtctcctcttggctttggggatagttctaatttggagagctgttttacctccaatggctgggattcagtgcaaagattccactcggaacctctttataaagttttcgcctgamawrwmwwmamwraawwatggggttcccagcaccccatgcggatttkggagtttccctttgtctccccccactattcaaggactctcctctttaccaagaagcacagaattctgctggaaaaaaaaaaaaaaaaa

SEQ ID NO: 2678 - DNA, 1528 bp, Rattus norvegicus
ggaacgaggggcacasggcmgcsrasrkcgwwtggycgcggctagccagcactgagagcaggcgcctgaggcgacagagcggcggcaactggccgggagtccgggccctgtgaggggaccgtgaagggaaggtctggggcacggttgctcttggtggcggcgcggccgagtccaaactgcccaggtcgctgctgctttcagtctakgaggcgtacggtcgcttggggctgccgccatcccgagggcggggctcctgggaattgggtatctggaccgccgcggtctcttycaaccgscgcccgcacctggtagtgacatcgtccagmyctgtgaccatgttcgacaagmcgcggctgccgtacgtggtsctcgatgtgatttgcgtgttgctggctggattgccttttataattcttacttcaaggcatacccccywcsarcgaggagtgttctgtactgatgrgwccatcaagtacccttacagagaagacacmaycmsttaykcgtymttakkkggrmtwgkcatwcsmwkytgkatyatcgttatgattactggagaaactctgtctgtttactttaatgtcttgcattcaaattcctttgtcagcaatcactatatagccaccatttacaaagccgttggagcctttttgtttggagcctcagccagtcagtccctgactgacattgctaagtactctataggcagactgcggcctcacttcctggctgtctgtaacccagactggtcaaaaatcaactgcagcgatggctacattgagaacttcgtatgtcaagggaatgaacagaaggtcagggaaggsaggttgtccttctactcggggcactcctcattctctatgtactgcatgctgtttgtcgcactttatcttcaagccaggatgaagggagattgggcaagactcttacgacccatgstacagtttgggcttgttgctttatccatatatgtgggcctgtctcgagtttctgattacaaacaccaytggagcracgtgttaattggcstcattcmagragmtgytgtggcaatattagtggtyttgtatkkaactgrwttyttcaagaccacagagtytaacaaagaaagraaagaggactcacataygactmtacacgaaaccaccaacagacagagctacgcaaggaatcaygagccmtgaaggggymgasraacaggccagcttsgaagggaactgytggaggcaragggcagkaagatgcatatcactccmtggtgtatacattaaagggctgctgytatacctcttggatgcccactttatctatgwatatagttactttaacmcaatgagttttttgagtttttaattgaactagtagttcaattaaaaaaaatttaagcctttcamtaaaacactgccccacctgtacatttttttattgaaagatgctatgkacaaatgtgtatgttacatgccttctcagaatgatatttgatttaaatmtaataaaaatgcttgcgawcaaaaaaaaaaaaaaamaa

SEQ ID NO: 2679 - DNA, 2314 bp, Rattus norvegicus
gttcgcwrmmysagccmkcgwywcgcacaaagcmgcgcmckccgggwsagcmgagamcacyrcccggsagcagcgcggcgasackccgtgcrycstatgccccygcgccccygcykcggcagccgrrgcgcmscgagagaacgckccaccgcggggyccrggtgcagytagcgwscctmkcccrcmtcgcgcgswcgcssgagagygrgmagyggcaagcrgsgagcgggasggcrgcgaggcgytcgcgggcccctcctgctgcccgsgcccggcsmgctcatggcggccatccgcaagaagctggtggtggtgggcgacggcgcgtgyggcaagacgtgcctgctgatcgtgttcagtaaggacgagttccccgargtgtacgtgcccaccgtsttcgagaactatgtggcsgacatygaggtggacggcaagcaggtggagctggcgctgtgggacacggcgggccaggaggactacgaycgyytrcggccgctctcctacccggacaccgacgtcatccttatgtgcttctcggtagacagcccggactctctcgagaacatccccgagaagtgggtgcccgaggtaaagcacttctgccccaatgtgcccatcatcttggtggccaacaaaaaagacctgcgcagcgatgagcatgtccgcacggagctggcccgcatgaagcaggagccagtgcgcacggatgacggccgcgccatggcggtgcgcatccaagcctatgactacctcgagtgctcggccaagaccaaggagggcgtgcgcgaggttttcgagacggccacgcgcgccgcgctgcagaagcgctacggatcccagaatggctgcatcaactgctgcaaggtgctatgaaggccgcgccctgcctcacgcccttgccagcgtggctccccctccttggcccggtcgcccactaaccgggagaaagggagacccgtgcccccgaggacaccaccagactgcctgacatctgctggtggctctggctggtcacgctgaatattagcgtgggcaccgagctccccccttcccagtgtctgtgtgtgtccagctgtgtggcacaggcctgggcgccctgctgagtgccaaggggttcctgagcgtccttttctaaagagccaggcctcgaagtgtggttgtgtgtgtgtacgactccctacacccctaccccactcctgccccacccccgcctctggtttccccaggggcatgcagagtggttgagccccagcagatgtwcgcttgtaaccagcaagccactactgttgctccatgtctgtaacatagaccccctggaatcasgggaggggagggctggggaggatggggatgttacataaatacakwttttattttcggaggcagaatggtattgtttagtggtgagtggtgtgaccagggcccatgagcaactcttcccaggctgggtcaggagcccacccatccaagcatgaactggactcggccatctttccacamcctgggrwwgacatttgcaactgacttgaggttgagaggaagcagctcccagacacagtgtctcctgggccaagccccagcgaacctcctttccagccacctgcagaggatccasggyryghkgtggggtcactttwgccataagmgaactttgtgcctgtcctacaagtgaacattgttcagtccgagagactattgttgctgaatttatttmaaggctgaagcktttwytgttgytgatraaagawttctttgcacaattgtcccattgtttgacacccagtgcacttgtcatttgcataaggcrgcaybwbgascacacttgtatgctgtaacctcatctacttmtgatgttttttttttwaaacaaactatgatgactttaaggagattacaaaaaagattctaatttywgcytwgwtttcttgaaaaaaawrwmaamcatgtgactttwtaaaaatttgtgtagcatacacacagttwkgrwaaassmaggyrayrmgtattsrkgtcwakthrarcctccctccctytcymcacaagacaagtctcttcatctatgtgaaattttctgwacattctctgtgcagagcaaagcttcytcttccttattcccctccttcccagcccagtggtacttctactaaattgtctattgtyttgttwtkktttwdttttwttttaaataaactgacagatgmcwmagtggtgagcttawrawrwhwamawaaaagttctataagctgtgtatacagttttttatgtmaaatattaaaagmctrtghygatgrcmtttawaaaaaaaaaaaaaaaa

SEQ ID NO: 2680 - DNA, 759 bp, Rattus norvegicus
gggcgtggtgcgtgtagaaggcggggcggggcgggggcggggcgacggccgttgcagcgcgccgggccctatagtggagcccagggatgaagcagctgtgctgttcttgtctgttgtggcttggactcctactggctcctttctcccaggaacaagaagaggtcaccagccccacgaagttgtgcggcagggacctgttggtagaagttataaaactctgtggccaaaatgactggagccggttctcgatggaagagcaaagtcctatgacagagttgkttccccaatatacacggaaagtcaaaaccttcaaccctcaccggtcctcctcctcctggggaagattcacaaacccaggcgtctcccagaagaaagcaacacacacttgggaatctcagtcactgcccaactatcagcttaaaaaggaggagctgcttccgaagacaggagtgcattcataccacggtggcaagccctatgtgaagagtgtaaaatttcagaagaaaaacactgacaaaatgagtaccttcagcggcttattttgggggaaccatccccagaggaagcgcagaggtttcgcagataaatgctgtgctatagggtgctccaaagaggagctggccgtcgcatgccttccgtttgttgatttttaaaccttaacgattaaacaaacatcactggtgacagagatgtacaaactgccgtagaaaccatgctcacttaataaaagcttacaaaatccaaaaaaaaaaaaaaaaa

SEQ ID NO: 2681 - DNA, 459 bp, Rattus norvegicus
ggcagatggcagcatggattccaagtgggctgctgtgctgctgctactgctgctkcyrwkkhhytsrgksyrcgmtgaakwgscakgkwsctgssstgmwgacymwstcwtyrcagaagaagataagggaccccacccatcacagtatgcccacastccagacaggayccagactcctgggtccctcatgcgtgttytgctccaggccatggagagacctagaaggaacycagcmktyttgtttcagccccagaggtttggcagaaatgcttggggsccctggagcaaggagcagytaagtccccaggctagagagttctggagcctgkccgctcctcagcgctytgggaagaagtaacatcatctgctgtgatatrtctgcatgcaaaatcacttccccacattccatgtgtgcccccaaataaagtggtytggcttctgcaaaaaaaaaaaaaaaaa

SEQ ID NO: 2682 - DNA, 1258 bp, Rattus norvegicus
tcgaattcgcggccgccgacggccgccgcwgcagccgccggagccgagatgcctaaaggaggtagaaagggaggccataaaggcmgmgtgaggcagtatacaagccctgaggagatcgatgcccagctacaggctgagaagcagaaggccarcgaagaagatgaacaagaagaaggtggagatggggcttcgggtgaccccaaaaaggagaagaaatctctagactcagatgagagtgaagatgaagatgatgactaccagcaaaagcgaaaaggtgtggaagggctcattgacattgagaaccccaaccgggtggcacagacgaytaagaaggtgacacaactggatctggatgggccaaaggaactttcaaggmgagaacgagaagaaatagagawgcagaaagcaaaagagcgstacatgaaaatscatttggctgggaagacggagcaggccaaggctgatctcgcccggmtggcaatcatccggaaacagcgggaggaagcmkcrwgaaagaaagaagaagagaggaaagcaaaagatgacgcaactttgtcaggaaaacgaatgcagtcgctctccctgaataagtaagctggcctgtgggaggagatgccgggggaactgggccgtgccgccaggacctctgccatgtctcacccactctgtgccctggcgccgctgcagcagcccctacggccaggagcccctacggcctggggcctcctcttcatcttggcacagaaattgttcaggggatgtggggggggctggggggagsggcmgckrmtatctttgagacagaaagatgcaggacagcatttcatacgtaaccatttgaatgtttttgctgtttttagaattcgggccctggtggrrtgggtggggtgmctgggaagtggcgtaaggagattccatttgtccagtagattgcacgttagtgtggggaggggggtgtggtrccagcaggcagctgctgtgggagttgatgacaaccagcccagatcatctgggtgctcactcagaggggctctcccggagcctgtgcctcgaaaggtccgtccgatgaagcctsksmtctscaytctgccccmttcccacmtacytggtcagggctagtgcccatttttaaccstacccattgatcatttcaagaamcctctggttactgtgcatcacccagacaagacgtgctstmaaattcamcttgtatatttggcagattaaacaacattatmwtaaaaaaaaaaaaaaaaaa

SEQ ID NO: 2683 - DNA, 1986 bp, Rattus norvegicus
  misc_feature (1924)..(1924): n is a, c, g, or t
  misc_feature (1932)..(1932): n is a, c, g, or t
ccggagaggccaggcagtggctcggttcggctsagcgactgcgggcccaggttgtcgcgctgcgctcggtgagtrcaggatccagcttccaggatgtggtggtccttgatccctctctcttgyctgctggcactgaccagtgcccatgacaagccttcctywcacccactgtcggacgacatgattaactatatcaacaaacagaatacaacatggcaggctggacgcaacttctacaatgttgacataagctatctgaagaagctgtgtggaactgtcctgggtggacccaasctgccggaaagggttgggttcagcgaggacataaatctacctgaatcctttgatgcacgggaacagtggtccaattgcccgacmawmgcrsagmtcasmgmsswggggycctstrgmwctwgtkgrkcatyysgggcwgwggaakycrkswctgascgaatctgcattcacaccaatggccgagtcaatgtggaggtgtctgctgaggacctgcttacctgctgtggtatccagtgtggggatggctgtwatggkggctatscctckgsascakggaacttctggactagaaaaggcctggtttctggtggagtatacaattctcatataggctgcttaccctacaccatccctccctgtgaacaccatgtcaatggctyycktsccccatgcactggagarggagatactcccaagtgcaacamgatgtgtgaggctggctactccacatcctacamggaagataagcamtatgggtacamttyctacagtgtgtctgacagcgagaaggagatcatggcggaaatctacaaaaatggcccagwggagggtgctyttactgtgttttctgactycttgrcwwacaaatcaggcgtatacaagcatgaagccggtgatgtgatgggaggccatgccayccgcattctgggctggggaatagagaatggagtaccctactggctggtagcaaactcctggaacgttgactggggtgataatggtttctttaaaatcctcagaggagagaaccactgtggamwygmrkcagaaatcgtggctggaatcccacgcactcagcagtactggggaagattctaatctgctgggacttgatygtatagtccttaggagactttttccaaaatttagcaatgcaggcagggagtgaggcagataggagtctttgattctttgagttcacctaacawgcatgaagctttcagcaaggtttgggtgactggaccagagctgccccccatcagagccaccctacctggctcccttctagcctatcccatgacastgaksacascytacatcctagcctctccmtagactagtgctgtgtgtagcgcctgctgctgtggctctgtctgscatccctcccacccccmcctcagcatccccagaccaakggctttggctgcaggatttycaaaggaatgaacaccaactacatgatgagaggacagatgccacccgccagctgcaccttgaarctagtcayttctaggactgkggcargctttgatggcccaatgcagktctctggagaaaactacctttccccaaggcatytgcacscattgmcaakggtaatgtgcccatctytyctwggtcyygsscdcrassgmygcttkyssartcakkkttttgktttwtkttttkktttgygtacctcaactgagytatgaaratwtgtactggktttacagatcatctcatcgkatggawwagaacaagcttygtggtcagtttrctgggtgaccggyagacaccacaatcmaactagtytgggraaaacctgcttttttgttgtaggtgccacgtaaccctgtyagtttracaaggaatgaccgtgccawtaaammaawwhwmmmwhhrmwwgraaaaaamaaaaaammwmrhnmvdvrddnvvhmmrwwwmmmmmdwhdmmvwmwrcctttgaagatgagtaaagagaaccttgg

SEQ ID NO: 2684 - DNA, 1676 bp, Rattus norvegicus
agagccgtgcgcagcggcgtgtgtggggccgtgtgcagacccgcgtgtggcgcaggcaaggaccctgaaaataaacagccgctgctttgcgagtctcctkcttgggtctacgtccgagtctcctctgctgtgggcagctcagacgccgaagctctaactgcagctatgagcagcaacgaatgcttcaagtgtggacgatctggccactgggccagggaatgccctactggtggaggtcggggtcgtggaatgagaagccgcggcagaggtggttttacctcggatagagggttccagtttgtttcctcgtctcttcctgacatctgttatcgctgtggtgagtctggtcatcttgccaaggattgtgatcttcasgaggatgcctgctataactgcggtagaggtggccacattgccaaggactgcaaggagcccaagagagagcgagagcaatgctgctacaactgtggcaagccakgccatctggctcgtgactgtgaccacgcggacgagcagaagtgctattcctgtggggaatttggacatatkcaaaaagactgcaccaaggtgaagtgctataggtgtggtgaaactggtcatgtagccatcaattgcagcaagacaagtgaagtcaactgttaccgctgtggcgagtcagggcatcttgcacgggaatgcacamttgaggctackgcckadkkattttyytttgtcgcccctmmkyttkckgrywrawggttkkwttwttttctctgaatmctcttcactggccaaaggttggcagatasagsctgttcmcaggccagtgagctttacttgcagtgtaaaaggaggaaaggggtggaaaaaaaaccgratttctgcatttaactacaaraaaarwwwawrtttagtttggtagaggtgttatgtataatgctttgttaaagaaccccctttccgtgccactggtgaataggsakwrrtgamtgggaagagttcagtcagrscaswargcccytykgggtttgagtgtgttmccatgtaggasgkwaaaccaattctggatgcatctaagcttccatgaataactttaattcttagcataatgmtggscytggattgtctgacctcagtagctattaaataacatcgagtwacmtctgsatcargccctcatagaacattcarktgagttgggagtaaactgraaagacaaatgtgttgaaggatatgccagggaatctkgctwaagcctaatacaggrgcatcttcatcccagtgttratgctggacgtacagaaggtgatggcaaaggtgtagaacacattttttcaaagactaaatctaaaacccagagtaaacatccgatgctcagagttagcataatttggagctattcakgaattgcagagaaatgcattttcacagaaatcaagatgttatttttgtatactatatcacttagmcaactgtgtttcatttgctgtaatcagtttttaaagtcagatggaaaaagcaactgaagtcttagaaaatagaaaatgtaattttaaactatwccawtaaagctggaggaggaagrggarwwwwramwaaarwwmmwwwwrwwwrwtttaaattttcatcaatgtatatagaacaaaatgccatattaaagaggggaatgtggrggrctyaaaaaaaaaaaaaaaaaa

SEQ ID NO: 2685 - DNA, 1101 bp, Rattus norvegicus
gctgtcgccatgagaatccacggcctcatcctgctgtctttccttctcctggctgctcaggtactctcggaaaaggtcagaaagacagccaagaatgtaccagacagcacaacggaggaggatatgtctccctctttggggaaggcacggaataagcagaggagcaggacatccaaatctatgacccatggcaggtttgtcaccaaagaccaagccacatgcagatgggctgtgactgaggaggagctgggcatcaacctgaaggtccagtgcacacgagccgatcaggagttttcttgtgttttcgctggtgatccaaccggctgccttaaatacgacaaagaccagacctactggaaacaagtcgcccgcacactgcgcaaacagaagaatatctgtgagaactccaagagtgtcttgaagaccagagtgtgcagaaagaaatttccagaswckarsctcaaggtggtaaaccccaggaaggagaaagcagaggtctccccaagggagcacaacaaggtccaagaagctgtctccatggagccaaacaaggkcaaagyggacatyaccaccagcccarctgygaccgtggctgtcaaagattcagagygtctagaggacccasatgtcctcacccagaggaagaccgccctggagttctgtggggaatcttggagctccttctgcacattcttcctcaacatgttacaggccacatcatgctaacgaagtcagagagagagcagcctaagacatgtggtatcagagccccactgtttgctggaaactccccgggttcccactaagacacaaacatttccaatacgggaacamagtgaagtatttaracagattttgtaaattttgtattttttgtgtcttagaatttgctttattttgttttttwacattcttagatgtgcttttcagagactgtttacctcagcgtaatcttccatggactacaaacctaggttcatataagcagtggatatatacatccaagtgataatgtccatgcaaggaattgttggctgtatttaccaagataataaagttctgggcattctcagaaatgccaccaaaaaaaaaaaaaaaaaa

SEQ ID NO: 2686 - DNA, 1352 bp, Rattus norvegicus
cgccgcccaggctagcgcgagcctccgctccatcgccccgccgccatggacctattcggggacttgccggagcccgagcgcccgccgcggccgtctgccgggaaagaagcacaggaaggacccgtgctcttcgaggacctgcccccgaccagcagtactgactcaggatctgggggacctttactctttgatggtcttccacctgctggcagcggcaattcaggttctcttgccacatcaggctcccaggtggtgaagaacgaaggaaaaggmgsmamgaggraagcyyctgaggrwragaagmayrgykktgwakrgcttktkgwwwwkwaagttystmaagcctcttcggtgatctttggtttgaaaggctacgtggcagagcggaagggtgagagggaggagatgcaggacgcccatgtcatcctgaatgatatcactcaggagtgtaatcctccatcatctctcattactcgggtttcatactttgctgtttttgatggacatggaggaattcgagcctcgaaatttgctgcacagaatttgcaccagaactkmrkcmggaaatttcctaaaggagatgtaatcagtgtggagaagactgtgaagaggtgcctgctagatacttttaagcacaccgatgaagagttcctgaaacaggcttcaagccagaagcctgcctggaaagacgggtccactgccacgtgtgtcctggctgtggacaacatcctgtatatcgccaaccttggagatagtcgggcaatcctgtgtcgatataacgaggaaagtcaaaagcatgcagccttaagccwcagcaaagagcacaatccaactcagtatgaagagcgcatgaggatacagaaggctggaggcaatgtcagagatggccgtgtcttgggtgtgctggaggtatcccgctccattggagatgggcagtacaagcgttgcggggtcacatccgtgcctgrtrwcwgacvctgccwgytkwccccywatrmcaggttcattttgctggcttgtgatgggctcttcaaggtctttaccccagaagaagctktgaacttcatcttgtcytsccttgaggwtgrgaaratccagacccgagaaggkaagcctgctgttgatgcccgctatgaagctgcatgmaacaggytggytaacaaggcagtgcagcggggctcggcagataacgtgacggtgatggtggtgaggataggacactgagsscgcacactgcacgtgtgctcttgacttgcaggttcatcttgtttgtgcacgctgtgtgtactcctgtggggmttcwatggttgtaaataaaggtttctttttttcctaaaaaaaaaaaaaaaaaa

SEQ ID NO: 2687 - DNA, 2071 bp, Rattus norvegicus
ctggaggggaagagtgcagctgttcctggcagacatgaagccctacttctcgtgcgtctttgtcttctgcttcctaatcaaacttttaacaggagaactcaatgacttggccaatcacaggatgttttcgtttcacgatggaggtgtacagatttcttgtaactaccctgagactgtccagcagttaaaaatgcagttgttcaaagacagagaagtcctctgcgacctcaccaagaccaagggaagcggaaacaccgtgtccatcaagaatccgatgtcctgtccatatcagctgtccaacaacagtgtctcttttttcctagacaacgcagacagctcccagggcagctactttttatgcagcctgtcgattttcgacccacccccttttcaagaaaagaaccttagtggaggatatttgcttatttatgaatcccagctttgttgccagctgaagctttggttacccgtagggtgtgcagcttttgtggcagcgctcctttttggatgcatatttatcgtctggtttgcaaaaaagaagtacagatccagtgtgcacgaccctaatagcgagtacatgttcatggcggcagtcaacacaaacaaaaagtccagacttgcaggtatgacctcataatctggaacacgggaacccatggaggaactacactgtctagttcccctgaaacttgaatggagaaagtcttctattttctggaccacagggcatctgacttgattaactactgatacctccttttggtgttttgtttgtctggatcagtgactatcagtcactcggaatttcagcagactgccctgggtttgctgagtccttttaaggcaaaccccttcttatagaagacccggctcatatgtattcaacaaacagacctcactgggatacaatcccctctttctgcgcctgcttctagctatgcaccggccagcaagacaaacatatctccagcatttttacaaaaatgccagggtatgaatctgtaaagtacacaggcagccattgaccaccgtctgtcctcgttttttcagattctatttttttccatagagatcagcattccttctagaatcagacagtagagggagatgcttcacaacagaagctcttatgtttctgagatgttgatgaattcatgctttagtaccaccatgttctctaacaacttctatattccagctgatcactgcttcagggcttagatgcctgcttttgccttcaagtctccccttaaagatactcccacaggtctacttggtggcctgcagccactctgaataggaagtttggtctacaatttcccccctctgctgctcaaaaaaaaaaattagtagatatgattttcccatattctccctgccaaagtaattttttccagcaaagacatctaaattcagttaatatggtttactgtgttgatattagtggcagtaaacatttctcagaatcaaaagcaaattaattttgcggtggtgtttttctaccattatcttgggtttccatggtgctattactcacaagtttagctatttttttatgcatcatattaaagttgcaagcaagcagagcaaccctcggttaatgggcaaacattctcctggggtagaatgaattgtctatttagcccgaaaactgcagtttctgtgggtggctgccagactacagccgtgctttgctctggctttgacaggttgaaatagtccccatgagcctggaacagtactccagactgtgctggagtcccaaagttaggagggccatggagcctgggacaggctgctgctttggtctttaggatctaggaagaattacagaggggccaagacagagttccctcccctagaaactgtgcagcctggaagtcagccctggcactttaagatagccttctttagaacatgagttagttggtagtattctgacgtgtaaacagcctatgttgctcggagctggaccattttctccacttccctgtctgcatgcctaagacttctagagcagccaacgtatatgcaacattaaagaaaaaaaaaaaaaaaaaaaaaaaaaaaa

SEQ ID NO: 2688 - DNA, 1056 bp, Rattus norvegicus
atggcctcctccttgctcctggctcttctgttcctgactctagccacagtagtgaacctcaaaactgatggtccatgtccagcatgttggggtgccacctttgacctggagagccatcgggagctccttctcgatttggccaagaaaagcatcctggacaagctgcacctcagccagcgccccatactcagtcggcctgtgtccagagaggccctcaagaccgcgctgcggcgcctccgtgggactcgagcggaaaccctgttggagcatgaccagagacaagaatatgagatcatcagctttgctgacacaggcctctccaacatcaaccaaacccgtcttgaattccatttctctgatagaactactggtggtgtggaggtcctgcagacccgtttcatgttcttcatgcagctccctcccaacaccacccagaccatgaatataagagttcttgtgctaaggccatatgacaccaacctcaccttgacaagccagtacatgctgcaggtggatgccagtggctggtaccagcttctcctaggacccgaagctcaagctgcttgcagtcaggggcacctcactctggagctggtgccagaaagtcagctggcccacagttccttgatcctggatggggtttcccacaggccttttgtggcagcccaggtaagagttgagggcaagcatcgggtacgccggcgaggtatcaactgccaggggctgtccaggatgtgctgtcggcaagagttctttgtggacttccgtgagattggctggcatgactggatcatccagcccgaaggctatgccatgaacttctgcactgggcagtgcccactacatgtggcaggcatgcctggcatctctgcgtcctttcacactgcagtgctgaatctgctcaaagccaacacagatgctggcactgcccgcaggggctcatgctgcgtgcctacgtctcggcgccctctgtctttgctctactatgacagggacagcaacattgtcaagacggatatacctgacatggtggtagaggcctgtgggtgcagttag

SEQ ID NO: 2689 - DNA, 1987 bp, Rattus norvegicus
tcttccaccatgattccctgcagagcagtgctgactttcgcgcgatgtctgatccggagaaaaattgtcacactggacagccttgaagattccaaactctgccgctgcttaaccaccgtggacctcatcgctttgggggttggaagcactctgggcgctggggtctacgtcctggctggggaagtcgccaaagccgattctggcccgagtatcgtggtgtctttcctcatcgctgccctggcctcggttatggccggcctttgctatgctgaatttggggcccgagtacccaagactggatctgcgtatctatacacttacgtcacggtcggagagctgtgggccttcatcactggctggaatctcatcctgtcatatgtcataggtacgtccagtgtcgcaagagcatggagtggcacctttgacgaacttcttaataaacagattggccagtttttcaaaacgtacttcaaaatgaattacactggtctggcagagtatccagacttctttgccgtgtgccttgtattactcctggcaggtcttttatcttttggagtaaaagagtctgcttgggtgaataaattttttacagctattaatatcctggtccttctctttgtcatggtggctgggtttgtgaaaggaaatgtggctaactggaagatcagtgaagagtttctcaaaaatatatcagcaagtgctagagaaccaccttctgagaacggaacaagcatctacggggctggcggctttatgccctatggctttacagggacgttggctggtgctgcaacgtgcttttatgcctttgtgggctttgactgcattgcaacaaccggtgaagaggttcggaatccacaaaaggcgatccccatcggaatagtgacgtccttacttgtctgctttatggcttactttggggtttctgcagctttaacgcttatgatgccttactacctcctggatgagaaaagtccactcccagtcgcgtttgagtatgtcagatggggtcccgctaaatacgttgtcgccgcaggctccctctgcgccttatcaacaagtcttctgggttctatgttccccttaccccgcattctgtttgccatggcccgggatggcttactgtttagatttcttgcaagagtgagtaagaggcagtcacccgttgctgccacgatgactgcaggggtcatttctgctgtgatggcctttctttttgacctgaaggccctcgtggacatgatgtctattggcaccctcatggcctactctctggtggcagcctgtgtgcttatgctcaggtaccaacctggcttgtgttacgagcagcccaaatacacccctgagaaagaaactctggaatcatgtaccaatgcgactttgaagagcgagtcccaggtcaccatgctgcaaggacagggtttcagcctacgaaccctcttcagcccctctgccctgcccacacgacagtcggcttcccttgtgagctttctggtgggattcctggctttcctcatcctgggcttgagtattctaaccacgtatggcgtccaggccattgccagactggaagcctggagcctggctcttctcgccctgttccttgtcctctgcgctgccgtcattctgaccatttggaggcagccacagaatcagcaaaaagtagccttcatggtcccgttcttaccgtttctgccggccttcagcatcctggtcaacatttacttgatggtccagttaagtgcggacacttggatcagattcagcatctggatggcgcttggctttctgatctatttcgcctatggcattagacacagcttggagggtaaccccagggacgaagaagacgatgaggatgccttttcagaaaacatcaatgtagcaacagaagaaaagtccgtcatgcaagcaaatgaccatcaccaaagaaacctcagcttacctttcatacttcatgaaaagacaagtgaatgttgatgct

SEQ ID NO: 2690 - DNA, 1898 bp, Rattus norvegicus
gagcttgttaactagagcaggctcattcattaaatcgtgcacatgattctacagcagctgaagaagcggccgctgccccctcgtcgcccttggcgccctaccgcattccctatccggagctgggagctgcgcggccaccggcgcccctgtgcaaactgggggtgtctgctagagcagcctccgccgctgctgcccgcggctctggccatggcttggcagggcacagggccaagcgtccgggggatgcctggaggcgtcaggctcaggctggggctgctgctgctgcagttgctcctgctccagcggcccgccctggggttcggggacgaggaggagcggcgttgcgaccccatccgcatcgccatgtgccagaacctcggctacaacgtgaccaagatgcccaacttagtgggacacgagctgcagacagacgcggagctgcagctgacaactttcacgccgctcatccagtacggctgctccagccagctgcagttcttcctttgttcggtttatgtgccaatgtgcacagagaagatcaacatccccatcggcccgtgcggtggcatgtgtctttcagtcaagagacgatgtgaaccagtcctgaaagaatttgggtttgcctggccggacagcctgaactgcagcaagttcccaccccagaacgaccacaaccacatgtgcatggaaggaccaggtgacgaagaggtacccttgccccacaaaactcccatccagccgggggaagagtgccactccgtgggaaccaattccgatcagtacatctgggtgaaaaggagcctgaactgtgttctcaagtgtggctacgatgctggcttgtacagccgctcagctaaggagttcacggatatttggatggccgtgtgggccagcctctgcttcatctctaccaccttcactgtgctgaccttcctgattgattcgtccaggttttcttaccctgagcgccccatcatattcctcagtatgtgctataatatttatagcattgcttatattgttcggcttactgtaggccgggaaaggatatcctgtgattttgaagaggcggcagaacccgttctcatccaagagggacttaagaacacaggatgtgcaataattttcttgctgatgtacttttttggaatggccagctccatttggtgggttattctgacactcacttggtttttggcagccggactcaagtggggtcacgaagccattgaaatgcacagttcttatttccacatcgcagcctgggctatccctgccgtgaaaaccattgtcatcttgattatgagactagtggatgccgatgagctgactggcctgtgctatgtcgggaaccaaagcctagatgccctcaccggctttgtggtggcacctctctttacctatttggtgattggaactctattcattgctgcaggcttggtggccctcttcaaaattcggtcaaatcttcaaaaagatgggaccaagacagacaagttggaaaggctaatggtcaagatcggggtcttctcggtcctgtacacggttcctgcgacctgtgtgattgcctgttatttctatgaaatctcaaactgggcactctttcggtattctgcagatgactcaaacatggcagttgaaatgttgaaaatttttatgtctttgctcgtgggcatcacttcaggcatgtggatttggtctgccaaaactcttcacacgtggcaaaaatgttctaaccgattggtgaattctgggaaggtaaagagagagaagagggggaatggttgggtgaagccagggaaaggcaacgaaactgtggtgtaggactagctagcttccactttcctcattttgaaggaaaggatgcagtgaatctcagtttgaacaaactagaaaca

SEQ ID NO: 2691 - DNA, 3729 bp, Rattus norvegicus
atgaggagccggagtaactccggggtccgactggacagctacgctcgactggtgcaacagcataccatcctgtgccatcagaatccagtgaccggcttgcttccagctagctatgatcagaaagacgcatgggtccgagataatgtgtacagcatcctggctgtgtggggtttgggcctggcctatcggaagaatgcagaccgggatgaggataaagcaaaggcctacgaactggagcagagtgtagtgaagctgatgagaggactgctgcactgcatgatcagacaggtggataaagtagaatccttcaagtatagtcagagtactaaggatagtctccatgccaagtacaacaccaaaacctgtgccactgtagtgggtgatgatcaatggggacacctgcagttggatgctacttctgtgtacttgctcttcttagcacaaatgactgcctccggactccatattatccacagcctagatgaagtcaatttcatacagaaccttgtgttttacattgaagctgcctataagactgctgacttcgggatatgggaacgcggagacaagaccaaccaagggatatcagaactgaatgcctgttcagtaggaatggcaaaggcagccctggaagcattagatgaacttgacctgtttggtgtgaaaggtgggccccaatcagttatccatgtcttggctgatgaagtacaacactgccagtctatccttaataccctactaccccgggcttcaacatccaaagaagttgatgctagtctactttcagtgatctccttcccagcctttgcagtagaggatagcaagttggtggagatcacaaagcaggagatcatcaccaagcttcagggtcgttacggttgctgtcgttttctgcgtgatggatataaaactcctaaagaggatcctaatcgcctatactatgaaccagctgagctgaagctatttgaaaacatagagtgtgaatggccactgttctggacatactttatccttgatgggatcttcagtggcaacacagaacaggttcaagaatatagagaggctcttgatgcagtcctcatcaagggcaaaaatggagtcccactacttccagagctgtacagtgttcctcctgacagggttgatgaagaatatcaaaatcctcacaccgtggatcgagtccctatgggaaaattgcctcacatgtggggtcagtccctatatattttaggaaacttgatggcggagggatttttagctcctggagaaattgatcccctgaatcgtaggttttccactgtcccaaagccagacgtagtggttcaagtctccattctggctgaaacagaagaaatcaaggccattttgaaggacaaaggaattgatgtggagaccattgctgaagtgtaccccataagagtacagccagctcgtattctcagccacatttattccagtctaggatgcaacagtagaatgaaactcagtggacgaccctacaggctcatgggtgtacttggaacgtcaaaactttatgacattcgcaaaactatctatactttcactccacagtttatagaccagcagcagttctacttggctctggacaaccagatgatagtcgaaatgctccggacagatctctcctacctctgcagccggtggaggatgacaggccagcccaccatcactttccccatctcacacaccatgctggatgaagatggagccagcttgaattcaagtatcctggcagcactccggaaaatgcaggatggttattttggtggggccaggatccaaacaggtaagctgtcagagtttttgacaacatcttgctgcacacacttaagcttcatggaccctggacccgagggtaagctgtacagcgaagattatgatgaagactatgatgatgagctggactctggcaactggatggatagctatgactcaacacgtaatgctcgctgtggtgatgaagttgcccgttatttagaccaccttttggcacacactggtccccatcctaaactaactcccacctcacggaagggagggctagatcggttccgagctgctgtgcaaacaacttgcgacttaatgtccttggtggccaaggccaaggagctgcatatacagaatgttcacatgtatcttcctacaaagttatttcagccttctcgcccttcactcaacttacttgactcacctgaatctccacaagatagccaggttccttctgttcgtgtagaagtccatcttcctagggaccagtctggggaagtggacttccagtcattggtttcacagttgaaggagacctcaagcttacaggagcaagctgatatactctacatgctatatacaatgaaaggacctgactggaacactgaattgtacgaagaaggaggcagtactgtgagagagcttcttagtgaactatatgtcaaagtcggtgaaattcggcactggggtctgatccgatacatctctgggatcttacggaagaaggtggaggcactcgatgaggcctgcacagaccttctgtcctaccagaaacacctgacagtagggcttcctccagaacctcgagagaagaccatctctgcgcctctaccgtacgaggcactcactaagctgatagatgaagccagcgaaggagacatgaacatctccaccctgacacaggaaataatggtctatcttgccatgtatatgagaactcagcctggcctttttgcagaaatgttccgacttcgaattggtttgatmmtacaagttatggcaacagaactggcccactctctgcgatgttcagctgaagaagccacagagggcctgatgaatctcagtccttcagccatgargaatctcctgcatcacatcctcagcggcaaagagtttggagtggaacgaagcgttcgtcccactgattcaaatgtgagtcctgctatttccatccatgagatcggtgctgtcggagcaacaaaaacagaacgaactggaatcatgcagttaaaaagtgagatcaagcaggtggaattccgtaggctgtctgtctcacccgagagtcagactagtggtggtcatccctcaagtatagatttgatgtcaccgacctttctgtcccctgcagcctgtatttctgcgagcagtgggtcctttcctactgtatgtgagccacagacatctaaagatagtcgtcaaggccaatggcaacgcaggagaagactagatggagcactaaatagagtaccaattggattttatcaaaaagtgtggaaaattttgcagaaatgtcacgggctttctgtggaaggttttgttcttccctcttcaagcactagggagatgaccccaggcgagattaaattctctgtccacgtggagtccgtcctgaaccgtgtgcctcagccagagtaccgtcagcttctggttgaagccatcctcgttctcaccatgctggcagatattgaaatccatagcattgggagcatcattgctgtggaaaaaatagttcatattgccaatgacttgttccttcaggaaaagaaaaccctcggcgcagatgatatcatgttggcaaaggatcctgcatctggcatctgtactcttctgtatgacagtgcacccagtggcagatttggcaccatgacctacctctccaaggcagctgccacctacgtgcaggagtttctgccacacagcctctgtgccgtgcagtga

SEQ ID NO: 2692 - DNA, 1818 bp, Rattus norvegicus
agtgcagccatgggaaacaccaccagtgagcgggtgtccggggagcgccacggtgccaaggctgctcgagctgagggtggcggccatggccccggcaaggagcacaagatcatggtgggaagcaccgacgaccccagcgtcttcagcctgccggactccaagctccctggggacaaagagtttgtaccctggcagcaggatttggatgattctgtgaagcccacccagcaggcccggcctactgttatccgctggtctgaagggggcaaggaggtcttcatctctgggtctttcaacaattggagcaccaagatccctctgattaagagtcataatgacttcgttgccatcctggatcttcccgagggagagcaccagtacaagttctttgtggatggacagtgggttcatgatccatcagagcctgtggttaccagtcagcttggcacaattaataatttgatccatgtcaagaaatctgattttgaagtatttgatgctttaaagttagattctatggaaagctctgagacatcatgtcgagacctgtccagctcacccccagggccttatggtcaagaaatgtatgtgtttcgatctgaggagagattcaaatccccacccatcctgccccctcacctcctccaagttattcttaacaaggacactaatatttcatgtgacccagccttacttcctgagcccaatcatgttatgctgaaccatctctatgcgctgtccactaaggacagtgtgatggtccttagcgcaacccatcgctacaagaagaagtacgtcaccacgctgctgtataagcccatctgaaggagatatcactccttgcctccaaggattctggagaagcatctcccttgcctttgaactgagctggcctcctctgagcctggcaggctgtttgttttgaggctgatgtgtgtgtcagagcctctggtaggagctctgctttgcctttgattgcagacgagagctttatgagttcatggagtttattttaagaaacacaaaaccatatatatgcatatgagaggaaggttaccagaagcctcctggcccagctgtccacactctctctgcctgtgggtagttgccagggcctgactgggaagctgtggctgcaggaatgggtgtaccggaagcttctttttctaaagtgagagaatagcaaactcttaggatccttgttgggcagaggtcctggaccactggtgtccaagggtcagagtgtgccaggccactgccctacttagagctgcctcgtgcgggtggctttccttgcatgggttgattctgtatcccacactgtgtgacacaatccaccgtggtttatatggcactagttgctccacaagaaccctcctcattttatgtaccctgtggaatgacttccctcagatctcatacatgacccagtaatgcaaaactcactgggcgaggaacccttttgaagagtttgtgggatgagcctcaccttagagcctgaggtgccagggtctcctttttagctcagtgaaggcctaacccwgtgtgytgcagtttactttaacatctagagaaaagaaatgcacaccgttgtgtctcggttggtcctgtgtattggctgtgtgggcctgtctccggttttctttatcagagcactcagcttgtaggcaggcttgcacttarggaaaccttccatatctttcatccctgaaagtttttttatgtgcctacatttttctttaattaaraaaaaarmawawccatcaattttaatgggctattaaagaaccttgggccttgaaaaaaaaaaaaaaaaaa

SEQ ID NO: 2693 - DNA, 1980 bp, Rattus norvegicus
ccgaggcgctccctcggttcttgggcacatttccacgctataccagccccgcagcccgagcccgggtgccagtgctcgcttccgctccgggtcgctgcgcccacccgacgcgcccaggaggactccgcagtcctgctttgaatcgtccccccaggcttaaccccgacgcttcgcttggattcctcggcccccttcgctggggtggcgacttcctctccgcgccccctccccctcgccatgaagaagcccattggaatattaagcccaggagtggctttggggaccgctggaggtgccatgtcttccaagttcttcctaatggctttggccacatttttytccttcgcccaggttgtaataraagctaattcttggtggtccctargtatgaataaccctgttcagatgtcagaagtatacatcataggagcacagcctctctgcagccaactggcgggactttctcaaggacagaagaaactctgccacttgtatcaggaccacatgcagtacattggagaaggcgcgaagacgggcatcaaagagtgccagtaccagttccggcatcggagatggaactgcagcacagtggacaacacttctgtctttggcagggtgatgcaaataggcagccgagagacagccttcacgtacgcggtgagcgctgcyggmgtsgtrrrygysmkgagmcgagsstgycrggaaggcgagckrkctacckgyggyygcagccgcgcgcgccccaaggacttacctcgggactggctgtggggcggttgcggggacaacatcgactatggctaccgcttcgccaaggaattcgtggacgcacgagaaagggaacgaatccacgccaagggctcctatgagagcgcacgcatcctcatgaacttgcacaacaatgaagcaggtcgcaggacagtatacaacctggcagatgtagcctgtaagtgccatggagtgtctggctcctgtagcctcaagacatgctggctgcagctggcggacttccgcaaggtgggcgatgccctcaaggagaagtatgacagcgcagcggccatgaggttgaacagccggggcaagctggtacaggtcaacagccgcttcaactccccaaccacgcaggacctggtctacatcgacccaagtccggactactgtgtgcgcaacgagagcactggctcactgggcacgcagggacgcctgtgcaacaagacctcagaggggatggacggctgcgagctcatgtgctgtgggcgtggctatgaccagtttaagacggtgcagaccgaacgctgccattgcaagtttcactggtgctgctatgtcaagtgtaaaaagtgcacggagattgtggatcagttcgtgtgcaaatagtggtggcccgcccataatccagtcccactcccaggacccacatatttatagaaagtacagtgcttctggttctttttatttctcccccaagaattgcagctggaaccatgttttttttttcttccttctgttaccatctaagaactctgtggtttattattaatattataattaatgtttggcaatagtgggggaaactaagaaaaatatttattttgaggatctttgcaaagttagtacgaaacttctttcttctgatgctacaggataaaggggaaataacacgtattcgaacttagctgtgcagttggggttcacatctagaaggcataagaactattttcttctcaaacagagtcctatgagatgggtggtatcctggtgaaagaggtggtacagacccatgagtgactcagtcccagtgaccaaatgaattgcaggtgctctggtataagacaaatcaccttaaatatagatatattaaatatacatatatgccaaaatacagaatacgagacactctgtgtttttttctatttttagaacgatcttttagaaggtacgagctagactttcacatcctcataagcaggcatgtcaggg

SEQ ID NO: 2694 - DNA, 4343 bp, Rattus norvegicus
gaattcccttcgcgaggaatccactttgatcagggccaccattactgttaaagccccctcctcagccttgtactcttcccactggaatcggatttgctagagggtgcgtggaatcggaagtcctcccttgtcctcaagcaaccagcctctgcatcttcgcggacactgcaagtaggagctcttttaccaccaagttgaagtcgcgctctgtcctcacagctgcttcggggtctaccccaagcctgagtcgggcctattgatattcaggacctgaagttgcccacggatcttgtgctctgctaaaaaggcttggagagcggaggaaagacgtgtgcttctgtctgctctcctgccccatatcactgttccatattactgtgttgagcatctctccgggtgctgtgggctgcaagaacaacgccaggaactgggcctcggacaccgtccacttttcacgcaaccgaaagctaaagtccctcaaagcaaggggtctgttgggaagatgagtggcattggctggcagacactgtccctatctctggcgttagtgttgtcgatcttgaacaaggtggcgcctcatgcgtgcccggcccagtgctcctgttcaggcagcacagtggactgtcatgggctggcactgcgcattgtgcccaggaatatcccccgcaacacggaaagactggatttgaatggaaataacatcacaaggatcacgaagacagattttgcgggcctcagacacctcagaattcttcagctcatggagaacaagatcagcaccatcgagaggggagcattccatgatcttaaggagctagaaagactgcgtttaaacagaaataaccttcagttgtttcctgaactgctgtttcttgggactgcgaaactctaccggcttgatctcagtgaaaatcagattcaagcaattccaaggaaggctttccgtggtgcagttgacattaaaaatctgcagttggattacaaccagatcagctgcattgaagatggggcattccgagctctgcgagatctggaagtgctcactctgaacaataacaatattactagactttcagtggcaagtttcaaccatatgcctaaacttaggacatttcgactccactccaacaacctatactgcgactgccacctggcctggctctcggactggcttcgccaaaggccacgggtgggcttgtacactcagtgtatgggcccatcccacctgaggggccataatgtagcagaggttcaaaaacgagagtttgtctgcagtgatgaggaagaaggtcaccagtcattcatggctccctcctgcagtgtgctgcactgcccgattgcttgtacctgtagcaacaacattgtagactgccgagggaaaggtctcactgagatccccacaaatctgcctgagaccatcacagaaatacgtttggaacagaactccataagggtcatccctccaggagcattctcaccatacaaaaagcttcgacgactagacctgagtaataaccagatctcggaacttgctccagatgccttccaaggactgcgttctctgaattcccttgtcctgtatggaaataaaatcacagaactcccaaaaagtttatttgaaggactgttttccttacagctactattattgaatgccaacaagataaactgccttcgggttgatgccttccaggacctgcacaacttgaaccttctctccttatacgacaataagcttcagactgttgccaagggcaccttctcagctctcagagccatccaaactatgcatttggcccagaatcctttcatttgtgactgccatctcaagtggctagcggattatctccacaccaacccaattgagaccagcggtgcccgttgcaccagtccccgccgcctggctaacaaaagaattggacagatcaaaagcaagaaattccgttgttcaggtacagaagattatcgatcaaaattaagtggagactgctttgcagacttggcttgtcctgaaaaatgtcgctgtgaagggaccacagtagactgctccaatcaaaaactcaacaaaatcccagaccatattccccagtacacagcagagctgcgtctcaataataatgaattcacagtgttagaagccacgggaatatttaagaaacttcctcaattgcgtaaaatcaaccttagcaacaataagatcactgatatcgaggagggggcattcgaaggtgcgtctggtgtgaatgagattctgcttaccagtaaccgtttggaaaatgttcagcataagatgttcaaaggattggagagcctcaaaacattgatgctgagaagtaatcgaataagctgtgtgggaaacgacagtttcacaggactcggttctgtgcgtctgctctctttatatgacaatcaaattaccacagttgcaccaggagcatttggtactctccattcattatctacactaaacctcttggccaatcctttcaactgtaactgtcacctggcatggcttggagaatggctcagaaggaaaagaattgtaacaggaaatcctcgatgccaaaaaccctacttcttgaaggaaataccaatccaggatgtagccattcaggacttcacctgtgatgacggaaacgatgataatagctgctctccactctcccgttgtccttcggaatgtacttgcttggatacagtagtacgatgtagcaacaagggcttgaaggtcttacctaaaggcattccaagagatgtcacagaactgtatctggatgggaaccagtttacactggtcccggaattcccttttttttttttctttttttttctttccattttttttctttttgagacagggtctggtggtgtggcttctgcactagagtactagcctccctggaactcagagttgtacctggttctgctttcctgaccaccaccatgcctggtctttttagtatgcagattgaaataattgattttattaaatactgcttgtcattcatttagatagcttatctatgaaaagctcatatctgcttgggatgtctcagtggtagagaagatggagaaatggaaaaggaatctagttcaacttggacttccacagcaggaaatgttctccagaggttctgctgatagattgcaagccaggccacggatttgtttaaatcgtgggtaagctctgtaaattccccactgaagtgtacctcatcagaaactatgaaggcatgccaacatgcagtttgcacaggtacttgtaacaacaaattaactccttgcagacatacaatgacaggggcatcggcagagttgagactggcagagtaagatagagcaggagtaaaggtgggtacctcaccaaggagattaaatctaatggagaattgctttccaggcagacaaagttggtaaaggaagacaaaagcaataaccaatagctatctctattgagtccttactatgttccaggaactgtcctacatatttgacacacaagcatcatttttctttctcaaaaatacaacagaaacagtggtctaatttttctcattgtacacacaaacatccaagttcttgtgcatgttggataggcccaaggagaaaatagtatgctcaaaattacagcatcatagatgcagaatggtgggtgtttgtgagaaatattgggagacaaagatgtaaaacaaaaggaacgggaacttgtatagccttacatatgcgactcttccacaagtgtgaccgtagtagaattactttgctgtgaatttttctatagtaaatttgtacacattgtttaggaagtataatcagagaagtatacacttcagaaaatttggacatgaagatgtgttgagtttgagtcttatggcattcatgaaagggattagaacctggttcatggaaagatcttttctttggtataatttggctgttagagcaggactgcccctatatatttataaaacacctgtactagatgagagtatataagataccaataaaacaaaacaaaataaacaaaaaaacaacaaaaaatcaaggagaaatgaaaggggtgggagataatgagcaaagatatgaaacgaaaataaaggcagttccctccgatgaggactggtggaggcaagctcaggggtaacacatttgaagaaatgtatgaaaggcaaaatttcttatgaacaaagtaactggaaaagcttagtggtgatgaaatgaacaagtaatgagctgggtagttggagaagatcttgatgaaggtctgaagcagagtaagtaaccagtaaaaggacaagaggaactcccgagaccaggtagaagtcgacatcttcctggaattc

SEQ ID NO: 2695 - DNA, 879 bp, Rattus norvegicus
atgggcgatgggggcgcggagcgggaccgcggccccaagcgccgggaggagcctggtggccgcagcgggtgtcgtggggagcaccgcggagcggaagatttgcgtgctgacacgggtagcacgagtccgagggagattgctgggacctccgcctccagccctgcaggctccagggagagcggcggggacagcgacggacaacaggcgctcggtgagacggaccactgccgccgcatcctggtacgagatgccaaggggaccattcgggaaattgtcctgcccaagggcctggacctcgaccgacccaagaggacccgtacctccttcacagcagaacagctgtatcgtttggagatggagttccagcgctgccagtatgtggtgggccgagagcgcacagagctggcccgccagctgaacctctctgagactcaggtgaaggtctggttccagaaccgccgcaccaagcagaagaaggaccagagcagagacctggaaaagcgggcatcctcctccgccttcgaggcctttgccacctccaacgttctgcgacttctggaacagggccggctgctctccgtgcccagagctcccagcctcctagcactgagccctggcctgccaggtctaaccgctggccacaggggcacctccttgggtgaccccaggaactcctcccaacgcctcaatccaatgccctcagcctcagcgtcgtcccctctgccaccccctctgccagccgtctgcttttccgcagctccactcctggacttgcccgccagctacaaactggggtcctcggcttttgagccctacagcagactagaacaacagaaagtaggcagccctggccaaagtgacaagaaagctgacatttaa

SEQ ID NO: 2696 - DNA, 2172 bp, Rattus norvegicus
ggctggacctgttgtcctacatcgctcctgaagacttgcccaccctctggctgtggtagggccatggggacaaggagccactacctggacctggggtttctgctgctgctgtttctccctgcagagtgcctgggagctgaggggagactggctcacaagctgtttcgtgacctgtttgccaactatacaagtgctctgagaccagtggcagatacagaccagactctaaatgtgaccctggaggtgacattgtctcagatcattgatatggatgaacggaaccaggtgctgaccttgtacctgtggatccggcaagagtggacagatgcctacctacactgggaccccaaagcctatggtgacctggacgcaatccgaattcccagccgtctagtgtggcgaccagacatcgtactttacaacaaggcggacacgcagccacctgcctcagccagcaccaacgtggttgtgcggcacgacggcgctgtgcgctgggacgcaccggccatcacacgcagctcgtgccgtgtggacgtgtctgccttcccttttgacgcgcagcgctgcggcctgaccttcggctcatggacgcacggtgggcaccagctggatgtgcgacctcggggcacttccgccagtctggccgacttcgtggagaacgttgaatggcgggtgctgggcatgccagcacgcaggcgggtcctcacctatggctgctgctctgagccctacccagatgtgacctttactctgttgctgcgccgccgcgctgcagcctacgtgtgcaacctcctgctgccctgtgtgttcatctccctgctggcgcctctggccttccacctgcctgctgactctggggagaaggtgtctctgggcgtcaccgtgctcctggcgctcaccgtcttccagctgatcctggccgagagcatgccacctgcagagagtgtgccactcatcggaaagtactatatggccactatgaccatggtcacattctccacagcacttaccatcctcatcatgaatctgcactactgtggccctaatgcacatccagtgcccgcctgggctcgggttctcctgctgggacacctagccaaaggcctgtgtgtgcgggaacgaggggagccctgtgggcagtccaagccactagagtcagcccccagcctccagcctccaccagcttccccagcgggcccttgtcatgagccacggtgtctatgccaccaggaagcccttctacatcatatagcttccattgctagtaccttccgcagccaccgggctgcccagcgccgccacgaagattggaagcgtctggctagagtaatggaccgctttttcctaggcatcttcttctgcatggctctggtcatgagcctcattgtactggtgcaagccctgtaagggccaggaactggatttcagggagctacggtcacatcaacaccaccaggcaggaatggcaaagcccaggtggttgttggtactcagatgtactagccagtctctccccaaagtgctgctaacagtcagagacacctcttcaggaccagtgcttctgacctcacaacccacaaacagcctttgcgatctacatgccctcatggagggggatctaaagcccacctctaattccaacatgattaaggtcaaagtacaaacttggaggataagactcaatgccagatgagcacggtaattccagcacatggaggctgagacaggaggattaccttaagttctgtagcctgaggcataaaaaatttttttgaatagtcaccccattgtctatacttggaatcatagctattggctgggggaatccaggttatttctgtctattgagacagagtctcactatgtagtccttgctatcctggaactcgcaatgaagcccaggctggctttgaactcacatagatccacatgcctctgcctctccaaacacaggtgccactatgcctggctagagtgtaggttactaattaaagggacaaagccacactttgcttgtcacccttagcagttgctgttacagattctcacctggcttgtttctgcttaggctctcccggaagggagttcacggtctagtttccagaacagaaggctgtgcagacatttgacccagaacttcaatccataataaatgagagtattcccagcaaa

SEQ ID NO: 2697 - DNA, 4505 bp, Rattus norvegicus
tgggccttttattattatcaggactttattcatgtccggggtgggttcctatcagagaaagtcaagctggtccatctgtgttccagcgagtggtcctccttaaacatccacttcatggcggcgggaagcgacggagccggctctttgaggcgcagacttcggcgaagcgaccacaacaacaacggcggcggcggcggcagcggcagcagcatcagcagcacgggcaccgtggccgccgctcccagctccagcttcccgggagcagccgccgagcgccgctcgctgctccgagactccggccgcttggccgccagctcctccccgccgcgcccgggaccgccggcggctcggcgccccgcttggtccgcagcgtcagcgccgcccgccgcggcccgggctcccggcagtgcgagcagctaagggctggccgccgcctccctgagctcccccggagcagccgacccctggtcgcggcgttcacctcgccgatgcgcggttggtaggagtgaccggagccattctctcctcgttgataagattccctaccaggataggagcctatctccctttccacagcaggacacagaaatctggccttcagtactttgggaaaaggatctgagacctcctggagctctgaccactggctgtcatctgtggctctggcctgtgtgggccactgagctctactcaaacattaaagaggaggaggggagatctgtggaatgggccaccccgttggcctgctgcattactgaacctgcgctgtccacacgtgcccagatcatgggacccagggcctgctagggctaggagcggggcccagtattcatgggtctctaggcctttccgaaatgtccgggaagggaggctgggcctggtggtgggcccggctgcccctctgcctactcctcagcctttatgccccctgggtgccttcatccttgggaaagcccaagggtcacccccacatgaactctatccgaattgacggggacatcacactgggaggcctgtttcccgtccacggccgtggctctgagggtaaggcctgcggggagctgaagaaggagaaaggcatccaccgcctggaggccatgctgtttgccctggaccgcatcaacaatgacccggacctactgcccaacatcacgttgggcgcccgcattctggacacctgctcgagggacacccacgccctggagcagtcactgacctttgtgcrggcgctcatcgagaaggacggcacggaggtccgctgcggcagcgggggcccgcccatcatcaccaagcccgaacgagtggtgggtgtcattggagcttcrgggagctccgtctcgatcatggtggccaacatcctccgcctcttcaagatccctcagatcagctatgcctccacggcccctgacttgagtgacaacagccgctatgacttcttctcccgggtggtgccctcagacacataccaggcccaggccatggtggatattgtccgagccctcaagtggaactatgtgtccacactggcctcagagggcagctacggtgagagtggtgtggaggcctttatccagaagtcccgagagaacggaggtgtgtgcattgcccagtcggtgaagattccacgggaacccaagacgggggagttcgacaagatcatcaaacgcctactggaaacatccaatgccaggggtatcatcatctttgccaacgaggatgacatcaggagggtgttggaggcagctcgcagggccaaccagaccggccacttcttttggatgggttctgatagctggggctccaagagtgcccctgtgctgcgccttgaggaggtggccgagggcgcagtcaccattctccccaagaggatgtctgttcgagggttcgaccgatacttctccagccgcacgctggacaacaacaggcgcaacatctggtttgccgagttctgggaggacaacttccattgcaagttgagccgccacgcgctcaagaagggaagccacatcaagaagtgcaccaaccgagagcgcatcgggcaggactcggcctatgagcaggaggggaaggtgcagttcgtgattgacgctgtgtacgccatgggccacgcgctgcacgccatgcaccgtgacctgtgtccyggccgcgtaggactctgccctcgcatggaccccgtggatggcacccagctgcttaagtacatcaggaacgtcaacttctcaggcattgcggggaaccctgtaaccttcaatgagaacggagacgcaccrgggcgctacgacatctaccagtaccaactgcgcaatggctcggccgagtacaaggtcatcggctcgtggacagaccacctgcacctcagaatagagcggatgcagtggccagggagtggccagcagctgccgcgctccatctgcagtctgccctgccagcccggggagcgaaagaagactgtgaagggcatggcttgctgctggcactgcgagccctgcaccgggtaccagtaccaagtggaccgctacacctgtaagacctgcccctacgacatgcggcccacagagaaccgcacgagctgccagcccatccccatcgtcaagttggagtgggactcgccgtgggccgtgctgcccctcttcctggccgtggtgggcatcgccgccacgctgttcgtggtggtcacgtttgtgcgctacaacgatacccccatcgtcaaggcctcgggccgggagctgagctacgtgctgctggcgggcatctttctgtgctacgccactaccttcctcatgatcgcagagccggacctggggacctgttcgctccgccgcatcttcctagggctcggcatgagcatcagctacgcggccctgctgaccaagaccaaccgcatttaccgcatctttgagcagggcaaacggtcggtcagtgccccgcgtttcatcagcccggcctcgcagctggccatcaccttcatcctcatctccctgcagctgctcggcatctgcgtgtggttcgtggtggacccctcccactcggtggtggacttccaggaccaacggacacttgacccccgctttgccaggggcgtgctcaagtgcgacatctcggacctgtccctcatctgcctgctgggctacagcatgctgctgatggtcacgtgtactgtgtacgccatcaagacccgaggcgtgcccgagaccttcaacgaggccaagcccatcggcttcaccatgtacaccacctgcattgtctggctggccttcatccccatcttttttggcacctcacagtcagccgacaagctgtacatccagacaaccacactgackgtctccgtgagtctgagcgcttcagtgtccctggggatgctctacatgcccaaagtctacatcatcctcttccacccggagcagaacgtgcccaagcgcaagcgcagtctcaaagccgtggtcaccgccgccaccatgtccaacaagttcacacagaagggcaacttcaggcccaatggggaagccaaatcagagctgtgtgagaacctggagaccccagcgctggctaccaaacagacctacgtcacctacaccaaccatgccatctagccgggccgcggagccaagcaggctaaggagccacaacctctgaggatggcacattgggccagggccgttcccgagggccctgccgatgtctgcccgcctcccgggcatccacgaatgtggcttggtgctgaggacagtagagaccccggccatcactgctgggcaagccgtggtgggcaaccagaggaggccgagtggctggggcagttccaggttatgccacacacaggtcttccttctggaccactgttgggcccagccccaaagcacaggggctcggtctccagagcccagccctggcttcctctccttcctcctgcctccgtctgtcctgtgggtgaccccggttggtccctgccccgtctttacgtttctcttccgtctttgctctgcatgtgttgtctgtttgggccctctgcttccatatttttccattctgctcctggccttcccctgccatctgccctgccccctgcccctcctccctgagctgccccatccccgccatcattttctcttctgttccccctcgatctcatttcctaccagccttccccctacttggcttcatccaccaactctttcaccacgttgcaaaagagaaaaaaaaaggggggggggaatcaccccctacaaaaaarmmmaaamaaaaactaatcttgagtgtgtttcgaagtgctgcgtcctcctggtggcctgtgtgtccctgtggcctgcagcctgctcgcccgccctacccgtctgccgtgtgtcctgcccgcccgcctgcccgccttgcccttcctgctaacgacacggagttcagtgcctgggtgtttggtgatggtctctgatgtgtagcatgtctgtttttataccgagaacatttctaataaagataaacacatggttttgcaaaaaaaaaaaaaaaaa

SEQ ID NO: 2698 - DNA, 2036 bp, Rattus norvegicus
ggcttcttggggtaagggacatgcagccagagggccttagcttggcctgatcctgctgtcagggaccctgtccccagtaaccataaagatggccggtgtgtggagcctttctctgcccagctgcctcctgtccctgctcctcctcctccagttgtcacgcagctacgcaggacagttcagagtgatagggccagggcatcccatccgggctttagttggggatgaagcagaactgccgtgccgtatatctcctgggaagaatgccacgggcatggaggtggggtggtaccgttctcccttttcaagagtrgttcatctgtaccgaaatggcaaggaccaagacgcagagcaagcgcctgaataccggggacgcacagagcttctgaaagagtctatcggcgagggaaaggttgccctcaggatccagaacgtgaggttctcggatgaaggaggctacacatgcttcttcagagaccactcctaccaagaagaagccgccgtggagttgaaagtagaagatcccttctactggatcaaccctggcgtgctggctctcattgcccttgtgcctatgctgctcctgcaggtctctgtaggccttgtattcctcttcctgcagcacagactgagaggaaaactccgtgcagaagtcgagaatctccatcggacttttgatcctcacttcctgagagtgccctgctggaagataacactgtttgttattgtccctgttcttggacccctggttgctttgatcatctgctacaactggctgcaccgaagactggcaggacagtttcttgaagagctaagaaaccccttttgagtgatggtgcgtcttcctggagcgaaggaaagcctggcaggtccttggggatgtctctcactggcctctctgttatggacacattccaatctacatctacagaaacactcgggatcctgagtagaacttgattttcctcccacaactgtctttctttcctcagctccttcctctaaatcttttttgactcctgtcttagtctgcctctagaaaacaccccatgactaaggccagggagtctatcaggagacacctatgtmccagagtaatacaggagtgattctgccaaccaggacacccagcgyttcaacattacgatctacagaacatcagctctgcaaatggtggatatttyttccaragccacagtyttgactgggaagaatatcagtggggarastaagggggtragggacagaagaacccacaacatgagggaaagctaaatgagccagggtatgaatatgggagcctgaaccaaaacctggagattaaaaaaaaaagtcmaaagaawamwramwrratcagagcaacmccatcttgctttggcagcctggtgggaggaccttgaraagcaagggtcgaraactgggtctgttctctcatttttctcctatcttatttgagtacccactgtttggtttttttktttttttttttttyttyytykttttttcaacaattactacttggtkgtgwatcagacmcaaacaagctaggtgctaattaataataatmcaagtttctttgtgcmmamwwmwmwwwmdwwmmwwrwmtckkyccttcatcatccactcttctccttgctcaagcctcctgatgccagaggtcratcttcaggaaaaaccawatacaagacctcagttagaccccaccctcacttcttttagwtttaaaaattgtatttatgctgtgaggtggggaragggggtcgtgcacgggcatgtgtgaagccargaattaggtttttccttctgmcacaggggtctcagggttcaaaaactcaggagaggtcagagtckgtgtcaacctccatcacctcatcactcccagacgggccttctgtttcagaactatcactgcttatgcgtttccgtcttctcttcctggattcccttactttaaaaatatttcccaagggttcacgatgatagccaagcagatgacccaggatttcccagcatttactgagcctgattggtcttcggga

SEQ ID NO: 2699 - DNA, 2371 bp, Rattus norvegicus
tataagccgaggagctgtccggtgctgaaacggcccgagccctcactcggcggcagagaggagcatgcttggagccttccacacaatataagacagaggaaaattttaagacatgrctgaatcgaaggcttaccgatttggagcagttctgcttcttatccacttaattttccttgtccctggaaccgaagcagcttccttccagcgaaaccagctgcttcagaaagaaccagacctcagattggagaatgtccagaagtttcctagtccagaaatgatcagggctttggrgtacatagraaagctcaggcagcaggcccacagrgaagaaagcagcccagactacaatccctaccaaggcatctytgttccccttcaactcaargraaacggrgaagaaagtcacttggcagagagctcaagggatgtcytgagtgaagacgagtggatgcggataatacttgaggctttgaggcaggctgaaaatgagccgccatctgccctcaaggagaacaagccctatgccttgaatctggagaagaacttycctgtggacasgcctgatgactwtgagactcaacaatggcctkagaggaaactcaagcacatgcggttccctctcatgtatgaagagaattccagggaaaaccccttcaaacgcacaaacgaaatagtagaagaacagtacacaccccaaagtcttgctaccctggagtctgtgttccaagagcttgggaaactgacagggccaagcaaccagaagcgtgagagggttgacgaggaacagaagctctacacggacgatgaagatgacgtgtacaagaccaacaacattgcctatgaagatgtggtcgggggagaagactggagtcctatggaggagaaaatagagactcaaacccaggaagaggtgagagacagcaaararaamamararraaaacgaacaaatcaatgaagagatgaaacggtcagggcacttggggctcccagatgaaggtaaccggaaagagagcaaagaccagctctcagaggacgcctccaaggtcatcacctacttgagaaggttagtgaatgctgtgggcagtgggaggtcccagagtgggcaaaacggggacagggcagccaggcttcttgagaggccccttgattctcagtctatttatcagctgattgaaatctccaggaatttgcagataccccctgaagacttaattgagatgctcaaagctggggagaaaccaaatgggttggtggagcccgagcaggatctggagcttgctgttgacctagatgacatcccggaagctgacatagaccgcccagacatgtttcaaagtaagacgctctccaagggtgggtatcccaaggcacctggtcgaggtatgatggaggccttgccagatggcctcagtgttgaagacattttaaatgttttagggatggagaatgtagcaaatcagaagtccccatatttccccaaccaatacagccgagacaaggctctgctgaggcttccttatggtcctgggaaatctagagccaaccagattcccaaagtagcctggatcccagacgttgaaagcagacaagccccctatgacaatctgaatgataaggaccaagaattgggagagtacttagccaggatgctagttaagtaccctgagctcatgaataccaaccagctgaagagagtgcccagcccaggctcctcagaagatgacctccaagaagaagagcagctcgagcaggccatcaaggagcatctgggtcaaggaagctcccaggaaatggagaaactggccaaggtgagcaaaaggwtccctgcaggwtccctgaagaatgaggataccccaaatagacagtacctggatgaagatatgctcctgaaagtgctagagtatctcawtcaagaacaggcagagcagggaagggaacatcttgccaaacgggccatggaaaacatgtaamcagctttaatgcccaatttcccttcttttccccaagtgawtcccctccctttctcttaagtgtgttaatctctatcctgttaacactgtaatatctttaagtgatgtacaagcagatgactccagatagttttggggatctgctttacttattctgagctgttatgttgtgtatggatgtgtataaatgttatgactctcagattaaaaatatgtcctttattcaagaaagatatctatgatagtgttgactaatgtatccaatggtcatggtattgacaatgctcacatatgatgaagagtatcctataattatcttggaagtttttaacatttattgaattattttgttactgtctgtagtgttttgtggagttctggagcaaaatcaataaagca

SEQ ID NO: 2700 - DNA, 1685 bp, Rattus norvegicus
gtgacatgtgactccccagaatacaccttgcttctgtagaccagctccaacaggattccatggtagctgggatgttagggctcaggaaggaaaagtcagaagaccaggatctccagggcctcaaagagaaacccctgaagtttaagaaggtgaagaaagacaagaaggaagacaaagagggcaaacatgaaccactacagccttcagcccaccattctgcagagccagcagaggcaggcaaagcagagacatcagaaagctcaggctctgccccagcagtaccagaagcctctgcttctcccaaacagcgacgttccatcattcgtgaccggggacctatgtatgatgaccccaccttgcctgaaggttggacgcgaaagcttaaacagaggaagtctggtcgctctgctggaaagtatgatgtatatttgatcaatccccagggaaaagcctttcgctctaaagtagaattgattgcatattttgaaaaggtgggagacacctccttggaccctaatgattttgacttcactgtaactgggagagggagcccttccaggagagaacagaaaccacctaagaagcccaaatctcccaaagctccaggaactggcaggggtcggggacgcccgaaagggagcggcactgggagaccaaaggcagcagcatcagaaggtgttcaagtgaaaagggtcctggagaagagccctgggaaacttctcgtcaagatgcctttccaagcatcacctgggggtaagggtgagggaggtggggctaccacatctgcgcaggtcatggtgatcaaacgccctggcagaaagcgaaaagctgaagctgacccccaggccattcctaagaaacggggtagaaagcctgggagtgtggtggcagctgctgctgcagaggccaaaaagaaagctgtgaaggaatcttctatacggtctgtgcaggagactgtgctccccatcaagaagcgcaagacccgggaaaccgtcagcattgaggtcaaggaggtggtgaagcccctgctggtgtctacacttggtgagaagagtggaaagggactgaagacatgcaagagccctgggcgtaaaagcaaggagagcagccccaaggggcgcagcagcagtgcctcctcaccacctaagaaggagcaccatcatcaccaccatcacgcagagtccccaaaggcccccatgccattgcttccacctccacccccacctgagcctcagagctctgaggaccccatcagcccccctgagcctcaggacttgagcagcagcatctgcaaagaggagaagatgccccgagcaggctcactggaaagcgatggctgccccaaggagccagctaagactcagcccatggttgytgccgccgccaccaccaccaccaccaccaccaccacagttgcagaaaagtacaaacaccgaggggagggagagcgcaaagacattgtttcatcctccatgccgaggccaaacagagaggagcctgtggacagccggacgcccgtgaccgagagagttagctgactttacatagagcggattgcaaagcrrwccaacaagaataaaggcagctgttgtctcttctccttatgggtagggctctgacaaagcttcccgattaactgaaataaaaaatatttttttttctttcagtaaaaaaaaaaaaaaaaa

SEQ ID NO: 2701 - DNA, 675 bp, Rattus norvegicus
aagcccgaggtccgccgccgccggaccgksyrgmcatggagcccgacaacagtccacggragatccagtttacgkttccgctgctggagcctcacctggacccggaggcarccgakcagattcggaggcgccgccccacccctgccacacttgtgctgaccagcgaccrgkcakmsscagaagtagatgaagrccggatccccaacccayttctcargyccacmctgtcaatgtctccacggcaacgraaraagatgmcaaggrctmcmcccmccatgaaaragctccagmcaatggttgaacatcmcctagggcmacagaaacaaggggaagamcctgagggagccmctragagcmcagggaaccaggagtcctgcccmcctgggatcccaracacaggctcagcgtcaaggccarataccycggggacagcmcaaaagcctgcagaatccaaacccaaractcaggagcagcgtggtgtggagcccagcacaraggacctttcagcccacatgctaccmctggattcccaaggagccagcttggtytgacaraagttgacatccggggatcgccagtgagtgtggaagttcatggacactggatgtttcttaatctcttgtttttaaacgtgataaatttggwgttaggtcmaammaaaaaaaaaaaaaaaaa

SEQ ID NO: 2702 - DNA, 1344 bp, Rattus norvegicus
atgctcctggacgccggaccccagtatccagcgatcggtgtgaccacctttggtgcatcccggcaccactcggcgggcgacgtggccgaaagagacgtgggcctgggtatcaacccgttcgccgacggcatgggcgccttcaagctcaaccccagttcgcacgaactggcctcggccggccagacagccttcacgtcgcaggctccgggctacgccgctgccgcggccctgggccaccatcaccaccccggccacgtcggctcctactccagcgctgctttcaattctacccgggactttctgttccgcaaccggggcttcggcgacgcggcggcggcagctagcgcccagcacagtctcttcgctgcttcggccggcggtttcgggggcccacacggccatacggacgccgcgggccaccttcttttttctgggcttcacgagcaggcggccggccacgcttcgcccaacgtggtcaacgggcagatgcggctaggtttctccggggacatgtacccacggccggaacagtacggccaggtgaccagcccgcgatccgagcactatgccgcaccgcagcttcacggctatgggcccatgaacgtgaacatggctgcacaccacggcgctggagccttcttccgctatatgcgccaacccatcaagcaagagcttatctgtaaatggatcgagccggagcagctggccaaccccaaaaagtcctgcaacaaaactttcagcaccatgcacgagctggtcacgcacgtcacggtggagcacgtcggcggcccagagcagagcaaccacatctgcttctgggaggagtgtccacgcgagggcaagcccttcaaagccaaatacaaactggtcaaccacatccgcgtgcatacgggcgaaaagccttttccctgcccgtttcctggctgcggcaaggttttcgcacgttcagagaacctcaagatccacaaaaggacgcacacaggggagaagcccttcaagtgcgagttcgagggctgcgaccggcgcttcgccaacagcagcgaccgcaagaagcacatgcacgtgcacactagcgacaagccctacctttgcaagatgtgcgataagtcctacacgcaccccagctctctgcgcaaacacatgaaggtccatgagtcctcttctcagggctcacagccttcgcccgccgccagctcggggtatgaatcgtccacgccacccaccatcgtgtctcccaccacagacaacccgaccaccagctccatgtcgccctcttcctccgcggtccaccacacagccggccacagcgcgctctcttccaattttaacgaatggtacgtttaa

SEQ ID NO: 2703 - DNA, 1713 bp, Rattus norvegicus
gcgttcctctccaacatcatctccactttgcatctgtctctcttagtctgctttttttccaccgatgtaacagacctgcagccagcaggactccgagggaaggacttaatcaagtttatgtgtcctaaaggttatgaagacagtatggagttcccagaccacagcagacatttgctgcagtgtctgagcgagcagaggcacyagggctttctttgtgactgcactgttctggtgggagatgcccagttccgggcacaccgagctgtactggcttcatgcagcatgtatttccacctcttttacaaggaccagctggacaaargrgacattgttcatctgaacagcgacattgtgacagcccccgctttcgctctcctgcttgaattcatgtacgaagggaaactccagttcaaagacttgcccattgaggacgtgctagcagctgccagttatctccacatgtatgacattgtcaaagtctgcaaaaagaagctgaaagagaaagctaccacagaggcagacagcaccaaaaaaraaraarawrmwtcaagttgttcggataaagtcgagagcctctcggacggcagcagccacatggcaggtgatctgcccagtgatgaagacgaaggcgaagatgacaaattgaacattctacccagcaaaagggacttggcagctgagcctgggaacatgtggatgcgattgccctcagacgcagcaggcatcccccaggctggcggagaggccgagccacacgccacagcagctggaaaaacagtagccagcccctgcagctcaacagagtctttgtcccagaggtctgtcacctccgtgagggattcggcagatgttgactgtgtgctggacctgtctgtcaagtccagcctttcaggagttgaaaatctgaacagctcttatttctcttcacaggacgtgctgagaggtaacctggtgcaggtgaaggtggagaaagaggcatcctgtgatgagagtgatgttggcactaatgactatgacatggaacatagcactgtgaaagagagtgtgagcgctaacaacagggtacagtatgagccggcccacctggctcctctgagggaggactcggtcttaagggagctggatcgggaggacaaagccagcgacgatgagatgatgaccccagagagcgagcgggtgcaggtggaaggaggcatggagagcagtctgcttccctatgtctccaatatcctgagccccgcgggccagatcttcatgtgccccctgtgcaacaaagtcttccccagcccccacatcctgcagatccacctgagcacgcacttccgcgagcaggatggcatccgcagcaagcctgccgccgatgtcaatgtgcccacgtgctctctgtgtgggaagactttctcctgcatgtacaccctcaagcgccacgagaggactcactcaggggagaagccctacacgtgcacccagtgcggcaagagtttccagtactcacacaacctgagccgccacgccgtggtgcacacccgtgagaagccccatgcctgcaagtggtgcgagcgcaggttcacgcagtccggagacctgtacagacacatccgcaagttccactgtgagttggtgaactccttgtcggtcaaaagtgaagcactgagcttgcccactgtcagagactggaccttagaagatagctctcaagaactttggagataa

SEQ ID NO: 2704 - DNA, 1223 bp, Rattus norvegicus
gtggatgcaggccctgcttgcaactggctttgagcaaccacaggcagaaaattgctacattgtcctgacattagggcgactaattcagcatcccagcgtggccagagcgtgaagggagcagaaaagcatcactggccagcatcctcgcctcagcatctttatcaggcctcaggacacctagcgccccaccatcatcatttaggatggaccccagctcacacagctccctgccataacggaggaccaccagaagaatgttggatctccaagcctctgatggagaagaagcgtcgtgcccgcatcaacctgtcactggagcagctaaggtctcttctggagagacactactcccaccagatacggaagcgaaagctggagaaggccgatatcctggagctgagcgttaagtacgtgagaagcctccagaactcattgcaaggactttggctagtacccagtggggtggactacccgtccggattccgaggcggcttgccgggctccagccagaggcttcggcccggagaggacgacagcggcctgcgctgccccctgcttctccagcgcagggcaggcagcaccacggacagcgccaacccacagacggcctctgttctcagcccctgcctcccggccatctgggcccctggtccccctgcaggtggctcccaatccccgcagtccccgttccctccccttggaggtctccttgagtcctccactggcattctggcaccgccacctgcatcaaactgccaggccrmgarkccgagacccgggtttcgcgtgtggcggccctggtgaggcctaggcaagaatttagattcaagccctaacctctgcccttatcacctcgccgtctagtttgggggaaactatttggggacacccatggtgactgcagggactctatcaatcggtggcctggtggggctgcagggaaatacacggagccatttgctgaaggggtctgcacgtctaggtgaattcacccattccagccccaccctctccagccaaaccaacttttcacctcccgttcttagtgaagatgggagggaacgggtgagctgtacccctttcccagggacccggggctggcagtccgcccccgcccccctttcaccgctgcgtcacggtgggaaggtcgcggttgctatcggagcagagcggacccctcgcagcgaggagaatcgctgccccgccctggcccattcaacggg

SEQ ID NO: 2705 - DNA, 649 bp, Rattus norvegicus
catggctaatcgaggagcaacaagacccaacgggccaaatactggaaataaaatatgccagttcaaactggttcttctaggagagtctgctgttggcaaatcaagtctggtgcttcgctttgtgaaaggccaatttcatgagtttcaagagagtaccattggggctgcctttctaacccaaactgtgtgtcttgatgacacaacagtaaaatttgaaatatgggatacagctggccaagaacggtatcatagcctagcaccaatgtactaccgaggagcacaagccgccatagttgtgtatgatattacaaatgaggagtccttttcgagagcaaaaaactgggttaaagaacttcaaaggcaagcaagtcctaatattgtgatagctttgtcaggaaacaaggctgacttagcaaataaaagagctgttgacttccaggaagcacagtcctatgcagatgacaacagcttattatttatggagacatcagctaagacatcaatgaatgtaaatgaaatatttatggcaatagctaaaaagctgccaaagaacgaaccacaaaatccaggcgcaaactcagccagaggaagaggagtagaccttactgagcctgcacagccagccaggagtcagtgttgtagtaactaa

SEQ ID NO: 2706 - DNA, 3183 bp, Rattus norvegicus
ccgtgcaacggggcatcgtcaagatggtcctctctgggtgtgccatgattgtccgagggctgccccgtggtaccgctccagagaggcagatcaacctcagcaacattcgagctggaaatctcgacacacgtcgtcgagctgctacacaaccagatgggaaagataccccagatgagccctgggcatttcctgctagagagttccttcgcaagaagctgattgggaaggaagtctgtttcacgatagaaaacaagactccccaaggacgagagtatggaatgatctaccttggaaaagatactaatggggaaaacattgcagagtcgctagtcgcagaaggcttggctcccggagagagcatgagagccaataatccagagcagaaccggctttcagaatgcgaggaacaagcaaaggcatcgaagaaagggatgtggagtgaggggacgggtcacacacatccggacctcaagtacaccattgagaacccaaggcactttgtggactcacaccaccagaagcctgtcaatgctatcattgagcatgttcgagacggcagtgtggtccgggccctgctccttccggatcactaccttgttaccgtcatgctgtcagggattaagtgcccaacctttcgtcgagaaacagatggtagtgaaacaccagagcccttcgctgcagaagccaagtttttcacggagtctcgactgcttcagagagatgttcagatcattctggagagctgccataatcagaacattctgggcaccatccttcatccaaatggtaacatcactgaactcctcctgaaggaaggttttgcccgctgtgtggactggtcaattgcagtttacacccggggtgcagaaaagctgagggcagctgagaggtttgccaaggagcgtaggctgagaatatggagagactatgtgcctcctactgctaatttggaccaaaaggacaagcagtttgttgccaaggtaatgcaggttttgaatgctgatgccattgttgtgaagctgarttctggagactacaagaccatccacctgtcaagcatccgaccaccaaggttggagggagacaacatacaggataagaataagaagctscgkcccctgtatgacatcccctacatgtttgaggcccgggaattccttcgcaaaaagctsattgggaagaaggtcagtgtgactgtggactacattagaccagccagcccagccacagaaacagtgcctgccttttctgagcgtacctgtgccacagtcaccattggaggaataaacattactgaggcccttgtcagcaaaggcctagccacagtgatcagataccggcaggatgatgaccagagatcttcacactatgatgagctgctggctgcagaggccagagcgattaagaatggcaaaggattgcacagcaagaaggaagtgcccatccaccgagttgcagacatttctggggacacccagaaagcaaagcagttcctgccctttcttcagcgcgcaggccgttctgaggctgtggtggagtatgtcttcagtggctctcgcctcaagctctacttacctaaggagacctgtctcatcaccttcctgctggcaggcattgaatgtcccagaggagcacgaaatctcccaggcttggtgcaggaaggagagccattcagtgaggaagccacacttttcaccaaggaactagtgctgcagcgagaggtggaggtggaggtagagagcatggataaggctggcaacttcattggctggctacacatggatggggctaacctgtctgtcttgctggtggagcacgcgctctccaaggtccacttcactgctgagcgcagsgsctactataagcctctcctgtctgctgaggaagctgccaagcagaggaaagagaaggtctgggcccactatgaggagcagcctgtggaggaggtaatgcctgtactggaagagaaggagcgctcggccagctacaagccagtgtttgtgaccgagatcacagatgacctgcatttctatgtgcaagatgtggagactggcacccagctggaaaaactgatggagaacatgcgcagtgacatctccagccaccctcctgttgagggtctacgcccacgccggggaragttctgcattgccaaatttgtagatggagaatggtaccgcgcccgggtagaaaaagaggagtcccctgccaaagtgcatgtcttctacatcgactatggcaatagagagatcctgccatccacccgcctggccctaccacctgccttcagcactcgcgtgttgccagctcaagccacagagtatgccttcgccttcatccagtggccccaagatgaggacgctcgcacagatgctgtgacagtgtgtgcggacatccaaaacactcagtgcctgctcaacgtggagcacctgagtgccagctgcccccatgtcactctgcagtttgcggattccaaaggtgatgtggggctgggcctggtgaaggaaggactcgtcatggtagaagttcggaaggagaagcagttccagaaagtgatcacagagtacctgaatgcccaggaatcagccaagagtgccaggctgaacctgtggcgctatggcgacttccgagctgacgatgctgatgagtttggctacagtcgctaaggagaacttgcctggctcccagcaccgmtgatgccagaccttytccctctgccaggaarccgttttcaactccagacctggtcgggggagtatagattgggkccagcttgcytcagrcagaaacctcytctgtcgcgrgtmgcattggagmkggggtggagarcccaaggcktgctgkggcagacccstcagtggtactgccgkccagtctmtcccagatgatyytgtattywtakttaattgtcttcaaatcaggaaagawccatgaaagactgtgtgttagtgaagggtatratsgtgacacagaggcagctgtcagytggcacccacctbtccsccagaccaccsttyttcccaagctytgwccaagtgttgattatgtgacttstgrtacakccgttbtcaaatyccagtgtgcccatatytgcccccacaccagcctgttctgtatytaaagcttttgmgacccaataaamtagtacctgctgtctgcarmmmwwamaaaaaaaaaaaaaaa

SEQ ID NO: 2707 - DNA, 1038 bp, Rattus norvegicus
cggccgcggcacagctgaggcgggccccgcgggccaggcgcgggccccgggctacagcggccccctctgcggctgcagggccggcccgggagcccgggggttggggggtggaggccgccgatcgccgaggccggagcccgatcggagggcacggcggggctgcgcgcacgctgggkygmgwrgwkkgycgacrgattagggagatgagtctggtggggggctttccccaccaccccgtggtgcaccatgagggctacccgttcgccgcagccgcagccgccgctgctgctgcsgccgccagccgctgcagtcacgaggagaacccctatttccacggctggcttattggccacccggagatgtcgccccccgactacagcatggccctgtcctacagtcccgagtacgccagcggtgccgcgggcctggaccactcccattatkggggagtgccgcccggtgccgggcctcccggcctgggggggccgcgcccggtgaagcgtckgggcaccgccaaccgcaaggagcggcgcaggactcagagcatcaacagcgccttcgccgagctgcgcgwgtgcatccccaacgtgcccgccgacaccaaactctccawaatcaagacwctgcgcctggccaccagctacatcgcctacctcatggwtctgctggccaaggacgaccagaacggagaggcggaggccttcaaggcggagatcaagaagaccgacgtgaaagaggagaagaggaagaaagagctgaatgaaatcttgaaaagtacagtgagcagcaacgacaagaaamccaaaggccggacaggctsgysacagcacgtytgggccctggagctcaagcagtgamgarkmkgrgmsctrgwgmkcmrgsrgymaaggcgccagatgctgacccaggactccccgaaagcccttggtctctgttctgaggacttcttgcagttggatcatccggtttatttatgtgcaatttccttttccctctttctgcccccccccaacctttgaggcatctgctcccctcgtg

SEQ ID NO: 2708 - DNA, 1061 bp, Rattus norvegicus
ggaggacttatcagccgaagcaggcctccaggatccaaatgggaaccccaaagcagccctcgctggctcctgcacacgccctaggcttgaggaagtccgatcccggaatccggagcctggggagcgacgcgggaggaaggcggtggagaccagcagcccagagtatgttccagatcccagagtttgagccgagtgagcaggaagacgctagtactacagataggggcctgggccctagcctcactgaggaccagccaggtccctacctggccccaggtctcctggggagcatcgttcagcagcagccgggacaggcagccaayaacagtcatcatggaggcgctgggactatggagacccggagtcgccacagttcgtacccagcggggactgaggaagatgaagggatggaggaggagcttagcccttttcgaggacgctcgcgctcggctccccccaatctctgggcagcgcagcgctatggccgtgagctccgaagratgagcgatgaatttgagggttccttcaagggacttcctcgcccaaagwgcgcaggcactgcaacacagatgcgacaaagcgccagttggacgcgcattayccastcctggtggratcgaaatttggggrmasgaggctccacyccstcccastgakstgckccacattcccggaatkmtasccgmtcccatcrcccgccatattgggtgtgggcggaagtctwtcgaggccttaggaaaaaarratcrctgtgtccctttaacagggagaagarctgacgwacagcgttgagttcctwccggtgcgtgcaatarccatggaggggtggcccttgcthtggagttttcaaagttttccacacaccbtacccchtacrcctccggaagtgrmtatgttccctctccgttactggacarccctcaggcgcctgtgmtaagttgcgagtcctgrtaaaccgagactgggtgctgtcctatcatcctagctggaggccccaggtcragaaacgtgcttwataataaagcccgcgcatgtgwmrmwrmaaaaaaaaaaaaaaaaaa

SEQ ID NO: 2709 - DNA, 943 bp, Rattus norvegicus
gaaccccgccccatcccgctgctccgttcctccgctgtgcatgcgagggacgtcaggggcggcgccgcagcagttacccctggtaacgggggaggcaggaggaggaggcggaggaggaggaggagggactcggcttgaggatgggcttgctctctattttgcgcaaattgaaaagtgcaccagaccaggaggtgcgaatcctcctcctgggcttggacaacgctggcaagacgaccctgctgaagcagcttgcatctgaagacatcagccacatcacacctacacagggatttaacatcaaaagtgtacagtcacaaggttttaaactgaatgtatgggacattggcggacagaggaaaatcagaccatactggagaagctattttgaaaacactgatattcttatatacgtaattgacagtgcagacagaaaaagatttgaagagacgggtcmggmrckarsggaattgctggaggaagaaaagctgagctgtgtsccagtgctcgtctttgctaacargcasgakstgctcacggyggccccagcsgcagagatcgcagaagggctaaacctacacaccattcgggaccgcgtctggcagatccagtcctgctcagcgctcacaggcgagggcgtccaggacggcatgaactgggtctgcaagaatgtcaacgcaaagaagaagtaagatbccgagggaggcgcgragctgcgggagctggtcccgccctgagaaagaaacactggcktgcgctttctgaccaaaggctttcccatctgcacggccacagctgtgtggtgggmggggacagcagcttaagaggaacccccattccagcagtagattttaactgatctcagaggttcagtatcgtttttcaaataaakgaattatattgttwmmwmwrvrdaaaaaaaaaaaaaaaaaaaaaaaaaaaaaaa

SEQ ID NO: 2710 - DNA, 983 bp, Rattus norvegicus
cccgcctgccgagtagtcgtcgctgccgccgccgcctccgttgttgttgtggtsgcttcgccgaagtctgcggctcaaagagccggctccgtcgcttcccgccgccatgaagtggatgtttaaggaggaccactcgctggaacacagatgcgtggaatccgcgaagatcagagcgaaataccccgaccgggttccggtgatcgttgagaaagtctctggcwckcagattgttgacattgacaagaggaagtacttggtcccatctgacatcactgtggctcagttcatgtggatcatcaggaaaaggatccagcttccttctgagaaggccatcttcttgtttgtggacaagacagtcccacagtccagcctaactatgggacagctttacgagaaggaaaaagatgaagatggatyyttgtatgtggcctacagcgragagaacacttttggcttctgagcccttgctgggctaggtgcaccsttcctgcttgtgtatcctgtaaatarctggctgttctcagttackccsccggagcctccacacagacctactagtgcatttgtaactggatttatttcttaatatattgramggktttgttttcctymgattagtaaatwatcatmcagarddwwawwwwmarwtttcttttgtgcamtgtcctcatggmtatatgcyccaaggaacctgtcctccggaatcacatttawtgargatacttccgaaatgaagggsggtaggtgtggtattaaagtgacamggagggmtgacgcattkkthtggattatgtycggagtgttagacggctaagtattaaaagcccccaaattaaatcyttagcaatcagaacacttgcttcamtagatttkkccaaytgcaaatcatgttggaytvagstaatctgttctttytgagactataagstaaatgattamcaataaascctccatgtaarrggcaaaaaaaaaaaaaaaaaaaa

SEQ ID NO: 2711 - DNA, 544 bp, Rattus norvegicus
agagcctcctccaagatgcttgtgswcmkgctcacagcagccttgctggccctgagctcagctcasaacacagatgaagaggtcagcaatgctgagatatctgatgtcaaacaacaaccagactcagattcagatctcccgtctgatgatgtaaatccagggaatgttcaagatcatgaatcagcaccagcagcaaatgaagagccttctgtgagtcctgggaatgaacaggaagagcaacagcagcaaccactcccagtagagaatcaagagccttctgacaaagaaagacatcgaaagcagaaacgtcctcctcctgagactctacatcacagagaaaatttaaggccgcaaatatatcgtcagtttggaataaggccattcggatcactttttccagaaccctatcgttttcaaccatgggcttgaataaattagatagtacctgagaaaatcatgaccttcagacacagggtcaatgaatcactgttgatcgtctatactctttcagtaaaattctcagcatgaaaaaaaaaaaaaaaaa

SEQ ID NO: 2712 - DNA, 1996 bp, Rattus norvegicus
agccctgctagcttgggccgatcccagacacaccggcctggctagtccacgccagccgcagacggtggctgagcatggagctgtccccccgcagtcctccagagatgctggagtcggattgcccgtcacccctggagctgaagtcagcccccagcaagaagatgtggattaagctacggtctctgctgcgctacatggtgaagcagttggagaatggggaggttaacatcgaggagctgaagaaaaacctggaatacacagcttccctgctggaagctgtctacattgatgagacaaggcaaatcttggacactgaagatgagcttcgggaacttcggtcagatgccgtgccttcagaggtgcgggactggctggcctccaccttcacccagcagacccgagccaaaggtcgcagggcagaagagaaacccaagttccgaagcattgtgcacgctgtgcaggctgggatcttcgtggagcggatgttccggagaacgtataccgctgtgggtcccacgtattctactgcagtccacaactgtctcaagaacctggacgtctggtgcttcgatgtcttctctttgaaccgggcagctgatgaccacgctctgaggaccattgtttttgagttgctgactcggcatagcctcatcagccgcttcaagattcccacagtgtttctgatgagttttctggaggccttagagacaggctacgggaaatataagaacccttaccacaaccagatccatgccgctgacgtgacccagactgtccattgcttcctgctccgcacaggcatggtgcactgcctgtcagagattgaggtcttggccatcatcttcgcggcagccatccatgactatgagcacacaggcacaaccaacagcttccacatccagaccaagtcagaatgcgccatcctgtacaatgaccgatcggtgctggagaatcaccacatcagctctgttttccgaatgatgcaggatgatgagatgaacatttttatcaatctcaccaaggatgaattcgtagagctgcgggccctggtcattgagatggtgttagccacagacatgtcctgccatttccagcaagtgaagactatgaagacagccctgcagcagcttgaaaggattgacaaatccaaggccctgtctcttctgcttcatgctgctgacatcagccacccaaccaagcagtggtcagtccacagccgctggaccaaggccctaatggaagagttcttccgccagggtgacaaggaggcagagctgggcttgcccttctctccactctgtgaccgcacctccacattggtggcccagtcccagataggtttcattgacttcattgtggagcccaccttctctgtgctgactgatgtggcagaaaagagtgtccagcccttgacagatgatgattccaagtctaaaagtcagcccagcttccagtggcgccagccttctttagatgtggacgtaggagaccccaaccctgatgtggtcagtttccgctccacctggaccaagtacattcaagagaataaacagaagtggaaggaacgggcagcgagtggcatcaccaaccagatgtccattgatgaactgtccccctgtgaggmasragscccatcctcccctgcagaagatgagcacaaccagaatgggaatctggattagggaactgggagctggccakgtcctcactgagtccaaagtcttcgatgtcattagcactatccatcaggactggttcccccatctgctccaagggagtgtgttggttgtgatagagacagcccacctgagagccaaatgttggagcavgtggggtgtgggaagggcccctctccacccacargcccccagtggtcattgtgcccatcccttgcctctggactccctccttggccargtggccacttgggaggagtamacccsctgcaggctgcctacaatctggaggggagggtctgagacgccagccccctggg

SEQ ID NO: 2713 - DNA, 1626 bp, Rattus norvegicus
gcggcccctcatctccgtgagccccgaggcttctcttggccaaggtcctaggagtgatccgattgagagcggcgccccaaagctgccgggctggccggggtgggcggggaggcacctggacgctgcactctctggtggctccgcgtcgcgccaggtccctcgcagccacgcggggcgcgcactcccactcccaacgcgcgcggctccggagcgcaatggacgcggcgctgctcctcagcctgctggaggccaactgcagcctggcactggccgaagagctgcttttggacggctggggagagcccccggaccccgaaggtccctactcctactgcaacacgaccttggaccagatcgggacctgctggccccagagcgcgcctggagccctagtggagagaccatgccccgaatacttcaacggcatcaagtacaacacgacccggaatgcctacagagaatgcctggagaatgggacctgggcctcaaggatcaactactcacactgtgaacccattttggatgacaagcagaggaagtatgacctgcattaccgaatcgccctcatcatcaactacctgggccactgtgtttccgtggtggccctggtggctgctttcctgcttttcctagtgctgcggagtatccgctgcctgcggaatgtgatccactggaacctcatcaccaccttcatcctgagaaacatcacgtggttcctgctgcaactcatcgaccacgaagtgcatgagggcaatgaggtctggtgccgctgcgtcaccaccatattcaactactttgtggtcaccaacttcttctggatgtttgtggaaggctgctacctgcacacggccatcgtcatgacgtactccacggagcatctgcgcaagtggctcttcctcttcattggatggtgcataccctgccctatcattgtcgcctgggcagttggcaaactctactatgagaatgagcagtgctggtttggcaaggaacctggtgacttagtggactacatctaccagggccccatcatcctcgtgctcctcatcaattttgtgtttctgttcaacatcgtcaggatcctgatgacaaaactgcgagcctccaccacatccgagaccatccagtacaggaaggcagtgaaggccaccctggtcctcctccccctgttgggcatcacctacatgctcttctttgtcaatcctggagaggacgacctgtcacagattgtgttcatctacttcaactctttcctgcagtcctttcagggtttctttgtgtccgttttctactgcttcttcaatggagaggtgcgctccgccctgagaaagcggtggcaccgttggcaggaccaccacgccctccgagtgcctgtggcccgggccatgtccattcccacatcgcccaccaggatcagcttccacagcatcaagcagacagctgccgtgtgatcccctgtcacccatctgcccagcactccaccaccgaggcggcttcctcattcttcacagccttccctgggtcctccttgctacactgacccttgggtgcaggagaagggggggtggatgaactctcctgccggaagaaaggaaaactatgaaatggaggctctgaaagaccagg

SEQ ID NO: 2714 - DNA, 5630 bp, Rattus norvegicus
ccctcatcaagctccgggggtgttgagggggaatcccggggaagtgagattgtatgtgtgagcatctgcatgtgtgtttctgcctgtgcttgagagtgggggaactaacggggggggggtctggaggtggccaagcaaggaatggacaagcagttcccctgacaggcagcctcacactccttataaaacatacacacgagccattggcttcagaggtgacccagacagacagacagagacaagggagggggtgctgtgagcacaaagggggtgccaataagctagggagaagtaatgggacatgccagccaggggaggagcccagactgaagccggcagaggggggcacccaggtgggtggaggggatccccatggggtcaggccgcaagaggacaccccgacagcctccgcaatgtccggggcccaacttccagcgcaacatgtgtagcctcatccttgcctagtctggtggccgcaaccttgggggacagggcagggcaggatcaagaagaggagggacagagccgggacaggcaaaaggtccccgccactgctgcctgcactgctgctgctgctgctgctgcctccgctgccgccctgggcctggcccccaaccagctccccaacactctacggaatctttgggtctctggmcgctggttccggtcctggccccccagcaatttcctccaaagaacagggtcatgaaaagaggccgcccggcgrrscyckyagrcsatgmgmggmgcmggtggmccmcgyggmcctmgrggyccygctaagatgytrctkctkctrgcrctkgcktgygymagyccrttccckgargaggtkccrggkccgggmgckgtyggmggkggyacrggmggkgckmgrcmrctyaacgtkgcrcttgtyttctcmggyccrgcatatgckgcagargckgckmgmttggkyccrgcygtrgcagckgcagtrmgmagyccmggyctggacgtacggcccgtggcgctggtgctcaacggctccgaccctcssagccttgtgctgcagctctgcgacctgctgtcggggctgcgcgtgcacggcgtggtgttcgaggacgactcscgcgcgcccgccgtcgcgcccattctcgacttcctgtccgcgcagacctcgctgcccatcgtagccgtgcacggcggcgccgcgctcgtgctcacacccaaggagaagggctccaccttcctgcagcttggctcctccacagagcaacagttgcaggtcatttttgaggtgctggaggagtacgactggacatcctttgtggcagtgaccacgcgtgccccaggccatcgggccttcttgtcatacatcgaggtgctgactgatggcagcctggtgggctgggagcatcgaggagcgctgacactggaccccggggcgggtgaggctgtactgggcgcacagctccgtagtgtcagtgcgcagatccgcctgctcttctgcgcccgcgaggaggcagagcctgttttccgggcagcggaagaggccggcctcactgggcctggctacgtctggttcatggtgggaccccagctggctggaggcgggggctccggggtccctggggagccccttcttctgccaggaggttccccactgcctgccgggctgtttgcagtgssctctgctggctggcgtgacgacttggcacgtcgagtggctgctggtgtggcggtggtggccagaggtgcccaggccctgctgcgagactatggcttcctgcctgagctgggtcatgactgccgcacccagaatcgcacccaccgcggggagagtctgcacaggtacttcatgaacatcacctgggataaccgagactactccttcaatgaggatggctttctggtgaacccttcactggtggtcatctccctcaccagagacaggacatgggaagtggtgggcagctgggaacagcagaccctccgcctcaagtaccctctatggtcymgmtatggccgcttcctgcagccagtggatgacacacagcacctcactgtggccacgctggaggagagaccctttgtcattgtagagcctgcagaccccatcagcggcacttgcatcagagactcggtcccctgccggagccagctcaaccgtacccacagccctccgcctgacgctccccgcccggagaagagatgctgcaagggtttctgcattgatattctgaagaggctggcgcacaccatcggtttcagctatgacctctacctggttaccaacggcaagcatggcaagaagatcgatggcgtctggaatggcatgattggtgaggtgttctatcagcgtgcggacatggccatcggctctctcaccatcaatgaggagcggtcagagatcgtggacttctccgtcccctttgtagagacaggcatcagcgtcatggtggcacgcagcaatggcactgtgtccccctctgccttcctcgagccctacagccctgctgtctgggtgatgatgttcgtcatgtgcctcaccgtggtcgccgtcacagttttcatctttgagtacctcagtcctgtgggctataaccgaagcctggccacgggcaaacgccctggtggctctaccttcaccattgggaaatccatctggctgctgtgggscctggtcttcaacaactccgtgccagtggagaatcctcggggcaccaccagcaagatcatggtgctggtgtgggccttcttcgcggtcatctttcttgccagctacacagccaatctggccgccttcatgatccaggaggagtacgtggacaccgtgtctgggctcagcgaccggaagttccagcgaccccaggagcaatacccacctctgaagtttggcacggtgcccaatgggtccacggaaaagaacatccggagcaactaccctgacatgcacagctacatggtgcgatacaaccagccgagagtggaggaggcactcacacagctcaaggcagggaaactggacgccttcatctatgacgcagcagtgctcaactacatggcccgcaaggatgagggctgcaagctggtcaccatcggctccggcaaggtcttcgccaccactggttatggcatcgccctacacaagggctcccgctggaagaggcccatcgacctggcgctgctgcagttcctgggggacgatgagattgagatgctggagcggctgtggctttcaggratctgccacaatgacaaaatcgaagtgatgagtagcaagctggatatcgacaacatggcaggtgtcttctacatgctccttgtggccatgggcctctccttgctggtcttcgcctgggaacatctggtgtactggcgcctgcggcattgcctgggtcccacccaccgcatggatttcctactggccttctccaggggtatgtacagctgctgcagcgccgaggctgctccaccgccggccaagcctccgccaccgcctcagccgctgcccagtcccgcatatcccgccgctcgcccgccccctggccccgcacccttcgtgccccgagagcgcgcagctgccgaccgctggcgccgagccaagggcacagggcccccggggggcgcagcgatagccgacggcttccaccgatactacggccccatcgagccacaggggctgggcctcggcgasgcacgcgcggcaccgagaggcgcagccggacgcccactgtccccacccaccacacagcccccgcagaagccaccaccttcctacttcgccatcgtgcgcgagcaggagccgaccgagcccccggccggcgccttccccggcttcccatctccgcctgcgccgcccgctgcggctgccgctgccgtcgggccgccactgtgtcgcctggctttcgaggacgaaagcccgcccgcaccctcgcgctggccgcgttcagatcccgagagccagcctctgttgggtgggggcgcgggcggcccgagcgcgggggccccaaccgcaccaccgccgcgccgtgccgcgccaccaccgtgcgcctacctggacctcgagccttcgccttcggactccgaggactcggagagcctgggcggagcatcgctcggtggcctggagccctggtggttcgccgacttcccctacccgtatgccgagcgcctcgggccgccgcccggccgctactggtcggtcgacaagctcgggggctggcgcgctggtagctgggactacctgcccccgcgcggaggccccgcgtggcactgccgccactgcgccagcctggagctgctaccgccaccgcgccacctcagctgctcgcacgacggcttagacggcggctggtgggcgcctccgcctccaccctgggccgcggggccacctccccggcgccgggcgcgctgtggttgtccgcgacctcacccacaccgcccccgggcctcgcaccgtgcgcccgccgccgcgccgcaccaccaccgacacaggcgcgcggccggtggctgggacttcccgccgcccgsscccacctcgcgttcgctggaggacctgagctcctgcccrcgggcggcccccacgcgcaggctcaccgggccatcccgccacgcgcgccgctgcccgcacgctgcgcactgggggccgcccctgcccaccgcatcgcaccggagacaccggggcggggacctgggcacacgcaggggctctgcgcatttctccagcctggagtccgaggtatgacgcggctccggcccccacccccacccccgccgccccctcggtcagcgcaggccacggcccgagggggcgcgctaagtggacaggaccctcatgggttgggaaggacagaaacggacctggccggaccccgcctggagcagcgtcctgcgcccccacccccttcgccttgggggaactatgagccagagggacttggtcgcccaaatctcacccatcctgagagcaagggggcggggttcttggagcccaccgactcttttttttttaaacccgaaaagggctttttaacgtcacctgattggcgggaggtgtgggggagtcacgccgcgccccacccctacgcygrsscatggccctcacatcactgtgcagctccctagccccagacacacctctcggggagcctgtttttaacctttcattcatcaggactcaaaactgtgagacssgtatgccaaactgtgactccagaccttggccccgccacacagaaacccctgaccccagactgtgacttccaacacctaaaatgatcatctgaccccagactgtgccccgaccagactgtgacccttcatgtcagacctcgatgaccccttcttttagatccttgttggctctgacctatgacctctcctcmrmgaaarkcctaccswcmcytgtctcccccwcktrcckamywccccagatgccatcaatcacatcttcaagtccagcccttatttgtgacccttcagtgatgatccagcagacactccacccccaggtctcctttcccagatttcagcagggtctgaggctgggctcaaaggagggtctgggagcccacacttgacctttccttccctctcccactcctacactgcagtgtttggaataaaaccatgtttttacacctcmwmaaaaaaaaaaaaaaaaa

SEQ ID NO: 2715 - DNA, 5071 bp, Rattus norvegicus
gaattctcttcttcctccctaattctcatacatctaaaattagtcagcgataactcattgctggaaaagtccacacccaaacccaatggtccaatgtgacagagattcccttcccacatgtaggacctcctggtgattcagacacccgggtagytggcctccaagagccccacctgctctgaagtttcggagtgttctcccaatcttctagacctggctgagaataactgcaaggcgtcassatgaaaaaggacctggacacactcaaagacatttcccaaatgaccaactcagttttgaatagggcrtgcttaagacagtgtcaagatgtccactgatcttggattgagcgtggacactagcttatgactatatataraatatatagtctctcccctctacagtgttctcatgaatttaaagtgatttatttttaaagctcaatgataattattctaagagtagagaaacattgagggagaaaatgctgtttggcttccccagtggaaatcttaagatgtgatgcaggatatttaataaggactgaagggaacctcgtgaaaacacagaaatttgctcrttaggacaaaccaaaatgtgacacttgatgtccagactccccacacaggcagatgcattaccaaccgtcttctatccttaactgctgagtcacattggtggcccacttgtcacaggaatagtttgaatgtgttaatgtttaaaggcaggctggacaggtagccagtaagagtgcttggttccaaactcaggacgatttatatctccagaatcggcatggttgaaggaggaaatccactgcctggtcttgggagcggtcttggtactatatgcacagtgacacatgcagtggcccacatgcatacatacacgcgcacttgctgctccttcagaggaccccaattagggtctcagcacctacatcagacccctcacaaccacctgtaacttcacctctcagggctctcaccctctctgctggcctctgagcaactatgtaactatgtgacatacactcagagacatatatacataataaaaatgaaaaaaattggtgatcattttataccttttacacataaaaataatgtcaccctatgtcattgtctgtgttgaacttttacaaatttcaaattctgaagtcttcacaaaaawtttgcttttgatagggtatagtttttctcccctcgggactggcatacttcttaattggcagtataaattctgatatgtttagaagattttcttctcgaagtctgatgttccaggtggaatgccaactccagttttggatctcgccagtgattggctagggaggggtttggggcgggccttcctagagcgcggaggcttactagaaagctgtggagccagtctagactgtcactatcaggcactgtagtatttactggtgtgaggattctgcctttctgctagcttcacttagcttaacagaccaacctgcaaccagaactcgctgagactgtagaaaacccagggactgtactgactgtcacagcctgaaaacgactaagaacgggctacttcttagtcccagggttttggtgaggactgtgatgtaaacctcctaagatggcctagctttcaactaacgtaagaagtcctgagagcgggagcccttttttgcagcaccggctsstycagcaccgggtctcccatccaaggagaaacagggcaaaagtctcttgaaaacttgcccaattctgagaccagcttgatccagctacttcttcctgctctcaccccacgccgccgggacagcgcgactaccacccttcctctgcatctgggtggagggtaagaacaggagctgaccaagactgcccctcccgaccaggaggtggagatcccacgggtccggcgactcaacacccacttccccctccctgtgcccctatatcaccggcaccccctcctccttcccttttccctcctcccaggagacaggggaggagaaaaggggatctcgggtcgtcatgactgagctgcaggcaaaggatccgcggactctccacacatctggcgcsksgscctcccccmcmcacgtcgggtctcccttgcttgcacgcttggacccggatcccttccagggragtcagcactcggacgcatcgtctgtagtctcgccwatwccgatctccytggacsgkctgctmttctctcggtcctgccargstcaggagctcccagacgaaaagacmcaaaatcagcagtcgctgtccgacgtggagggagctttctctggagtsgaagcctcgcgccgaagaagcagaaatcccagagctccggagaaggacagcagactcttagacagtgtcttagacaccctgttggcgccctcggggcccgagcaaagccaaaccagccctccagcctgcgaggccatcacttcttggtgtctctttgggccagagcttccagaagacccccgcagtgtccccgctaccaaggggttgttgtccccgctcatgagccggccagagagcaaggctggcgacagctccgggacaggagcagggcagaaggtgctgcccaaagsgstgtcaccaccccggcagctgttgctcccgacctcggggagtgctcactggcccggggcaggggtgaagccatctcagcagcctgctacggtggaggtggaggaggacggtggtctcgagaccgagggctctgcgggtccgcttctgaagagcaaacctcgagcactggaaggcatgtgyagcggaggaggagtcacagccaacgcgcccgssgcggccccaggaggcgtcaccttggtccccaaggaagattcccggttttctgctcccagggtctccttggagcaagacgctccagttgcccccgggcgctccccactggccaccacagtggtggatttcattcacgtgcccattctgcctctgaaccacgctctcctagccgcccgcacccggcagctgctggagggrgacagctacgacggcggggctgcagcgcargtcccttttgctccacctcggggctcgccctccgcgccmtccccgccggtgccctgcggtgacttcccagactgcacctaccctccagaaggcgaccctaaagaggacgggttcccagtttacggcgaattccagcctcccggcttgaagatcaaggaggaggaggagggcacggaggctgcttcccgctcgccgcgcccctacctgttggccggagccagcgccgccaccttcccagacttcccgctgccgccgcggccgccgcgagcgccaccctccaggcccggagaggcggcggtagccgccccgagcgccgcggtgtcgccagtgtcctcgtcgggctccgcactggagtgcatcctgtacaaagcggagggcgcgccgcccacgcagggttcgttcgccccattgccctgtaaacccccggccgccagctcctgcctgcttccccgggacagcctgcccgccgctccgacctcctcggcagcaccggccatctacccgccgctcggcctcaatgggctccctcagctgggttaccaggccgcggtgctcaaggacagcctgccccaagtctacccgccctacctcaactacctgaggccagattcagaagccagccagagcccacaatatggctttgattccttacctcagaagatctgtttaatctgcggggatgaagcatctggctgtcactatggtgtgcttacctgtgggagctgcaaggtcttctttaagagggcgatggaagggcagcataactatttatgtgccggaagaaatgattgcattgttgataaaatccgcagaaaaaactgtccagcatgtcgtctgagaaagtgctgtcaggctggcatggtccttggaggtcgtaagtttaagaagttcaataaagtccgagttatgagagccctcgatggtgttgctctcccccagtcagtggcctttcctaatgagagccagaccctgggccagagaatcacattttcaccaaatcaagagattcaactggttccgccactcatcaacctgctcatgagcattgaacctgatgtggtttatgcagggcatgacaacacaaagcccgacacttccagctctttgctgaccagtctcaaccaactaggcgagaggcagctgctttcagtagtcaaatggtctaagtctctgccaggtttccggaacttacacatcgatgaccagataacyctsattcagtactcctggatgagcctgatggtgtttggcctggggtggaggtcgtacaagcatgtcagtggacagatgctatattttgcacctgatctaatcctgaatgagcagaggatgaaggagttgtcattctactcgctgtgccttaccatgtggcaaatcccacaggagtttgtcaagctccaggtgacccacgaggagttcctctgtatgaaagtcttacttcttcttaacacaattcctttggaaggcctgaggagtcaaagccagtttgaagagatgaggtcaagctatattcgggaattgatcaaggcaattggcttaagacagaaaggggtggtccccagttcacaacgcttctatcaacttacaaaacttcttgacagcttgcatgatcttgtgaaacagctccacctgtactgcttgaatacgttcatccaatcccgggcactggctgtggaatttccggaaatgatgtctgaagttattgctgcccagttgcccaagatcctggcrggsatggtgaarcctctcctctttcacaaaaagtgatgacttttctttgtttcctctgcaaaaattgaattttgtggtgtgtcattttgtctcagtcaggacagtcagctctgtgtctttataatgtccttctgaaagccttacgtgtatacatatcacactgtaaacttaggagaaaaccaatgaaatttggattttcctttgtgatgtctaagtagaatttttaaagtgttttgtgcacccatattttgagagtttacatggttaaaaaaggactaaagttgattgtataagtaaactatatctcacccgtgttattt

SEQ ID NO: 2716 - DNA, 2819 bp, Rattus norvegicus
gctcagcacccaggcgactcgactcgcgagtggcgcggagcggcagggctcgtcttttttctttctccaccgcctccttttccccccttctcccttttctgttggagggggtggggagaggaaagagagacagagagaaaggaaattttttttttccgaagcatcctaaccagtgagctagcgcagagcggcggcccatggcttcgctgtaccaaaggttcaccggcaagatcaacacctcgcgctccttcccggcgcccccggaggccagtcaccttctgggtggccaggggccggaggaggacgccggctcgaagcccctcgggccgcaggcgcaggcggtggcacctcgggagcgcggcggtgctggtggccggccccggttccagtaccaggcgcggagcgactgtgacgaggaggacgagctggtggggagtaatcctccacagagaaactggaaaggaatcgccattgcactgcttgtcatccttgtcatctgctccctgattgtcacctcagtcatcctgctgaccccagcggaagataccagtctgtctcagaagaagaaggtgactgtggaagatcttttcagtgaagacttcaaaatccatgacccagaggcaaagtggataagcgataaggaattcatctacagagaacggaaagggagcgtcatactgcggaacgttgagacaaataattccacggtgttaatagaaggcaaaaaaattgaatcgttaagagccatcagatatgaaatatccccagataaagagtatgcgttgttttcctataatgtggaaccggtataccaacactcccacactggatattatgttctgagcaaaattcctcacggggaccctcagagtctggacccaccagaagtcagcaacgcgaagcttcagtatgcagggtggggcccgaaaggccagcagctgatatttatctttgagaacaacatctactactgtgcccatgttggaaagcaggcgattcgagtggtctctacggggaaggagggtgtgatctacaatggcctcagcgactggctgtatgaagaggagattctgaagagccacatcgcacattggtggtcgccagatggtacaaggctcgcctatgccaccatcaatgattcccgagttccacttatggagctgccaacctacacgggctctgtctaccccactgtgaagccctaccactatcctaaggctggcagtgaaaaccccagcatctccctccacgtcatcggcttgaatggacccacccacgacctggagatgatgccacctgacgacccccgcatgagagagtattacatcaccatggtgaagtgggccaccagcaccaaggttgctgtgacctggctgaaccgggcccagaatgtgtccatcctgaccctctgtgatgccaccacaggtgtctgcactaagaaacacgaggatgaaagtgaagcttggctccacagacagaatgaagagcccgtgttctccaaggatggccggaagtttttctttgtcagagcgatcccacagggaggccggggtaaattctaccacatcactgtatcctcatcccagcccaacagcagcaatgacaacatccagtccattacctctggggactgggatgtgaccgagatcctgacctacgatgagaagcggaataagctctatttcctaagcacagaggacctgccacgaagacgacacctctacagcgccaacacggtagacgacttcaacaggcagtgtctgtcatgtgacctggtggagaactgcacctatgtcagtgcttccttcagtcataacatggacttcttcctgctcaagtgtgaaggccctggcgtacccactgttactgtgcacaataccacggataagagaagaatgtttgacttggaagcaaatgagcaagtgcagaaagccatctacgatcggcagatgcctaaaattgaataccggaaaattgaagtggaagattacagcttgccaatgcaaatcttgaagccggccaccttcactgacacagcccactaccctttattgctcgtggtggatggtactccagggagtcagagcgtgtcagagaggtttgaagtgacctgggagacagtgttggtgagcagccatggagcagtggtggtcaagtgtgacggccgaggcagcggctttcagggaaccaagctcttgcacgaagtacggaggcggctaggcttcctggaggagaaggaccagatggaagctgtgagaaccatgctgaaggagcagtacattgacaagactcgggtagctgtgtttgggaaggattatggtgggtacctgagtacttacatcctcccagccaagggagaaaaccaaggccagactttcacctgcggctctgcactctctccgataacggacttcaaactctatgcctcagcattttccgagaggtaccttggcctccatggactcgacaacagagcgtatgagatgaccaagctggcacacagagtgtcagcactggaggaccagcagttcctgatcatccatgctacggctgacgaaaaaatccatttccagcacacagcagagctcatcacgcagctaatcaagggaaaggccaattacagcttacagatatacccagatgaaagtcactactttcacagcgtggcgctcaaacagcacctgtacaggtccatcatcggattctttgtggaatgtttcaggatccaggacaagctacctacagccacagcgaaagaggacgaggaggaggactaaccacgcttgagacctaaacacagacatggctctttctacaac

SEQ ID NO: 2717 - DNA, 2644 bp, Rattus norvegicus
cggccgccaccgggccgagcgcagtcgctgcggmcgcggtctcccgagcgcctcggtccgatgctcggcagcccctcggtacgcagtggcccgccgcgccctccgcctcgccagtacagccgagcgccggcgcttgagtagctgcgcggccggcggtttctccacagcgccgctcccgcgtcagcgccgagcttcaggccgccgccatgggctgctggggccgcaaccgcggccggctgctgtgcatgctgctgctgaccttcatgttcatggtgctggaggtggtggtgagccgggtgaccgcgtcgctcgccatgctgtccgactccttccacatgctgtcggacgtgctggcgctcgtggtggcgctggtggccgagcgcttcgcccggaggactcacgccacgcagaagaacacattcggctggatycgcgctgaggtgatgggcgcgctggtgaacgccatcttcctcacggggctgtgcttcgccatcctgctggaagccgtcgagcgcttcatcgagccgcatgagatgcagcagccgctcgtggtgcttagcgtcggcgtggcggggctgctagtcaacgtgctggggctctgcctgttccaccaccacagcggcgagggccagggcgcaggccacggccactcgcacggccacggccacggccacctcgccaagggcgcgcgcaaggcgggccgcgcggggggcgaagcgggcgcgccgccgggccgggcgccggaccaggagccggaccaggaggagaccaacacgctagtggctaacaccagcaattccaacgggctgaaggcggaccaggcagagccagagaagttgagaagtgatgatccagtggatgtacaggtaaatgggaatctcatccaggagtcagacagtctggaatcagaagacaacagggctggacagctgaacatgcgaggagtgtttctgcacgtccttggagatgccctgggctctgtgatcgttgttgtgaatgccttggtcttctacttttcctggaagggttgtactgaagacgacttttgtgtgaacccgtgttttcctgatccctgcaaatcgtctgtagagctgatgaacagcacccaggcccccatgcacgaggctggtccgtgctgggtcctctacctagatccaaccctgtgcattataatggtttgtatacttctttacacgacgtacccactgctcaaggagtccgctctcattcttctacagactgttcctaagcaaattgatatcaaacatttggtaaaagagctacgagatgttgaaggagtggaggaagtccatgagttacacgtctggcagctcgccggaagcaggatcatcgccactgctcatataaaatgtgaagacccagcttcatacatgcaggtggccaaaaccattaaagatgtttttcacaatcatggaattcacgccaccaccatccagcctgaattcgctagcgtaggctctaaatcaagtgtcgtcccgtgtgagctcgcctgcagaactcagtgtgctttgaagcagtgctgtgggacacggccacaggtccattctggaaaggaggcagagaaggctccaacagttagcatttcttgtttagaactcagtgaaaacctagagaagaagcccaggaggactaaagctgaaggcagtgtccccgctgtgktgatagagattaaaaatgtgccaaacaaacagcccgaatcatctttgtgagccttgagaaagatgtgatatttgactttgcttttaaactgcaagagaaaatagactccattgaaatgctaagtttgccacgtagtgtaattgaagtcctcgtctggtcgcacagtttaattctatttttgtcagaacgtaatggaactgcagaatagagtgcgctacagcacagcctcgcgattactagtgcatagtgcagctgtgctggagcacgctttgaaagccagtttaacactatgttacatttttgtttaaagtaagtatagaccttatatgacataatgacatttgattcctggttttcccatgataaaaattagggggataaataaaattgttactggaawwwmwmwrmwwwwmwwtcccccattgttatatcttatctgttaggattgtaattgctaggcctttaaagtcatcaagcttgtttcctctgatgttgaggggtagttacgtgccctttgagatcataagcctagcataattgcagcatgtttccagagcaagtcatgactattagcaggaaacgagattagttactactctgttctccacttctgagtagtcgagtaaaccgtgaggtaattcacaagatgagttagagtttacacattgtagagcatataggggagaagagcaaggaagaaggcaatatgtcagttattacctattaatgtggagattatagctctaaattaccttgaaaatctcaaatggctttattctaccaaagtcagtctaaacacttctgccagtgttgctttctttcaaagactggtattagcaacattgagctaaaagttctaaatgcatgaatagttttgaaaatgcagactccttaactgcaaactattaaattgtgtcttaaaaaaacttccatagtgacctgtcagatggattgaatacctttc

SEQ ID NO: 2718 - DNA, 2132 bp, Rattus norvegicus
  misc_feature (2121)..(2121): n is a, c, g, or t
gcggcacgaggggcggctgcgggtgcggcggcctcggagactcctttctatgggctctcgaggctgaagacgtcttatcctcaaaagtagcgggtgcgccatcagaggtcagctcggtgtctaagacctagacatccagcgaaggaacacttttggacgcctggacggagatcagatgcgctggctctttcctcccagcacgaaattctaaggcttgcgtgtcctggcccccgcttcgcagggtggcccctcattcctagcttgtcttccgcccaaagtctccaaacctcggagtaaggacagyattgcaccaacttctactactccactcctcagttcaskcaacamtcamaacccctccmaaraaamatyccagcggasgasaaccttwyggaaaagcgtctctctcsgaaagacgcakgagcggtccytccyrggagaagayagmctsascgggccacgggatcgccactccgggcgccactcgcttcctacgacctcgcakgaaaggggtaaywgygccggackggaagcaccagmgccggcatgaaattggagtrttygycccacgcgcagccacggggacaaratgggcagygayctggagggggccggcagcagcgacgtgccatctccrctgtccgcggctggygacgactccttaggctcwgacggggactgtgcagccaacagcccggcggcgggcagmggcgccgkggatctggaaggyggcggcggcgagaggaattcgagtggcggggcgagcacccaagacgatcccgaggtgaccgatggcagcagaacgcaggcctccccggtggggccgtgcgcgggcagcgtgggcggcggtgagggcgcgcgcagcaagccgtacacgcggcggcccaagcccccctactcctacatcgcactcatcgccatggccatccgcgactccgcgggcggacgcctgacgctggccgagatcaacgagtacctcatgggcaagttcccctttttccggggcagctacacgggctggcgcaactccgtgcgccacaacctctcgctcaacgactgtttcgtcaaggtgctgcgcgacccctcgcggccctggggcaaggacaattactggatgctcaaccccaacagcgaatacaccttcgccgacggggtcttccgccgccgccgcaagcgcytcagccaccggaccacagtctccgcatcgggctacggcggaggaagcccacccggacctgcggggaccccgcagcccgcgcccaccgccggctcctccccaatcgcgcgctcgcccgctcgccaggaggagggctccagcccggcgagcaagttctccagctccttcgccatcgacagcatcctcagcaagccgtttcgcagccgccgcgacggcacccggctctgggggtgcagctaccctggagcgctgctccctgcccgccgctgcgcgcctatcccgcgctccttcccgcgtcgtccggcggtgccctgctgccgctctgtgcttacggcgcggcgagcccacgctgctggcgtcgcgcggggccgaggtgcarcccgcggcgcccctgttsstggcgcccctctccaccgcggccccagccaagccatttcgaggtccggagaccgccggcgcggcgcacctgtactgccccctacggctgcccacggccctgcaggcggccgcggcctgcggtccgggtccgcacctgtcctaccgggtggagacgctgctagcttgacaggagcttggagctctgctggtgggtctagggtggagttgggagcaccttttgtcatggagggcaccttttgwcatggargttggaatgcgggctccagggctgtgcactttccaccttccccgaggaatagagattttttttcaactctccatcaaatgtgctaagtaagcatttgtcccaagtgttttaacttagtccagaatagttcctttgtcttttctaactttacagaggatcaaagctgttcttttctatttcatggccaggsctgtactctcccgcaaagaggctttcctctccctcctattgtgttgcaccttctgmtgatttttcttccccacccmcgvmmrardwmaaaaaaaaaaaaaaaactctngcggcctcgtg

SEQ ID NO: 2719 - DNA, 6683 bp, Rattus norvegicus
gggtaatcggattcaaaacaacattagagcaacaactttgcctacatacaatctggtatcacggtcgcctcgttcagcaaagcagacgaggatcgcttgtatttctgaaaaccggaaataaagacactttcagtttgagaaaggggcagacggaagcaatggtcacacagaagaggacacacctcctgagatttccttttcaaatgtcctacgtggacagcctctggaggatggagtccgtggtttcgctgaatgcgtttacctctaggcgtggcctgtagtgagcgtcactccaccctgccatagccaggtgctctaatggtgctctagtagtgactagagataccccacgcagggtgaagccctcatctaggctgtgaagtgatctgttttggaaagtatgagggttttaataagacagtgcacaggacaacctgagaataggagaaaagcgtcacaatagaataaaggtcactatctatcatgtcaccattcctcctggagggagccccaggcttgagaagggacgtggaaaccggtaggagtcggggtggggggggatcctctccacagtcagagaagcagaaaataactcccaggaggagggcctctcagaaaggccatgcagaagaaccttcaggagactctctttcccatccaaggcttcggcttcccatgactggaagggctttttggtcacacgggctgtttcggtcatctgtgctcctctaagtaattacttatccacactcctgaatgacttcagtagaatcatcagcttgatcactagcacttccctatctgcggtgagcagacgtctgtgctgtgtctgctcagaaaagtctcaaacaatggccaccgatggaaacctcccagggcagatcctactcaactgcttcttcgagtcggatgactcaagatgcttcagttcccactgactgtctctagccagcatggtcttaaccagagaagataatcaagaacaattagaaaaggtattgaagtgggaaatggagggtcggggatgaagcgacatggccggcgaccgggccccagcgtaagctctgagccccgcgctgcgcccgccgcgctctggccgcctggagtcatgtctctgctgtgcgtgggagtcaaaaaagccaagtttgacggtgcccaagagaagttcaacacatacgtgacgctgaaggtgcagaacgtgaagagcactaccatagctgtacgcggcagccagcctagctgggagcaggacttcatgtttgagatcaaccgcctggatctgggcctgacggtggaggtgtggaacaagggtctcatctgggacacaatggtgggtactgtgtggatcccacttcggaccatccgtcagtccaatgaggagggtccgggagaatggctgacactggactctcaggccatcatggcggacagtgagatctgtgggaccaaggaccccaccttccaccgcatcctcctggacgcacattttgagctgcctttggacatccccgaggaggaggcgcgctactgggccaagaagctggagcagctgaatgccatgcgtgaccaagatgagtactcctttcaggaccagcaggacaagccactgccggtgcccagcagccagtgctgcaactggaattactttggctggggagaacagaatgatgatcccgacagtgccgtggatgaccgggacagtgattataggagtgagacgagcaacagcatcccaccgccttactacacgacttcgcagcccaatgcttcggtgcaccagtactccgtgcggccaccccctctggggtcccgggagtcctacagcgactccatgcacagctatgaagagttctctgagccgcgggcactcagtcccacaggcagcagccgctatgcttccagtggggagctgagccagggcagctcccagctgagtgaggacttcgacccggatgagcacagcctacagggctcagagctggatgacgagagggaccgagattcttatcactcctgccacagctctgtgagctaccacaaggactcaccccgctgggaccaggatgaggaggacctggaggacctggaggacctggaagatgaggagttgcccgaggaagaggagttggaagaggaggagttggaggaggaggaggagttggaggaagaggaattggagttggaggaggaggaggaggtgcctgatgacctggccagctatacccagcaggaggacaccactgtggctgagcccaaagagttcaagcggatcagcttcccaacagctgcacctcagaaggaagacaaagtttcagctgtgcccattgaggcccccgatgtgtccaaaggcatccccaaggcagccacacctgaagagaaggcagctgcggagtgtgcacaggaagcggagccccccaagtctgaggagagtttcagatctcgagaggctgaggagggccaggaagggcaggatgccatgtccagggccaaagccaactggttgcgagccttcaacaaggtgcgcatgcagctgcaggaggcccgaggagaaggagagatgtccaagtctctgtggttcaaaggcggccctggtggtggccttatcatcattgacagcatgccagacatcaggaagcggaagcccattcccctcgtgagcgacctggctatgtctctggtccagtcacggaaggcgggcatcacctcggccttggcctccagcacgttgaacaatgaagagttgaaaaaccacgtttacaagaagaccctgcaagccttaatctaccccatctcctgcaccacgccgcacaacttcgaggtgtggacggccaccactcccacctactgctacgagtgcgaggggctgctgtggggcatcgcgcggcagggcatgcgctgcaccgagtgcggcgttaagtgccacgagaagtgccaagacctgctcaacgcggactgcctgcagcgggcggctgagaagagttctaagcatggcgctgaagaccgcacgcagaacatcatcatggtgctgaaggaccgcatgaagatccgcgagcgcaacaagcctgagatcttcgagctgatccaggaggtcttcgcggtcaccaagagcgcacacacacagcagatgaaggccgtcaagcagagtgtgctggatggcacatccaagtggtctgccaaaattagcatcacggtggtctgtgcccagggcttgcaggccaaggacaagacaggatccagtgacccttatgtcaccgtccaggttgggaagaccaagaaaaggacaaaaaccatctacgggaaccttaacccagtgtgggaagagaatttccactttgaatgtcacaactcctctgaccggatcaaggtgcgtgtgttggatgaagacgatgacatcaaatcccgtgtgaagcaaaggtttaagagggagtctgatgacttcctagggcagacaatcatcgaggtgcggacgcttagcggcgagatggatgtgtggtacaatctggacaagagaacagacaagtctgctgtgtcgggcgccattcggcttcacatcagtgtggagatcaaaggggaggagaaggtggcaccctaccatgtccagtacacctgtctgcatgagaacctgttccattttgtgacggatgtacagaacaatggcgtggtgaagattcccgatgccaaaggtgacgacgcctggaaggtttactatgatgagactgcccaggagatcgtggatgagtttgccatgcgctatggcgttgaatccatctaccaagccatgacccactttgcctgcctctcctccaagtacatgtgccctggggtacccgctgtcatgagcaccctgcttgccaacatcaacgcctactacgcacacaccaccgcctccaccaacgtgtctgcctccgaccgcttcgctgcctccaatttcgggaaagagcgctttgtgaaacttctggaccagctgcacaactccctgcggattgacctgtccatgtaccggaacaacttcccggccagcagccccgagcggctgcaggatctcaagtccacagtggacctgcttaccagcatcaccttcttccggatgaaggttcaggaactgcagagtccgccacgtgccagtcaggtggtgaaggactgcgtgaaggcgtgcctcaactccacctacgagtacatcttcaacaactgtcatgagctctatggccgggagtaccagacagacccggccaagaagggggaggtccccccggaggagcaaggccctagcatcaagaacctggatttctggtccaagctcatcaccctcatcgtgtctatcattgaggaggataagaactcctacacaccctgcctcaatcagtttccccaggagctgaatgtggggaagatcagtgctgaggtgatgtggagcctgtttgcccaggacatgaagtacgccatggaggaacacgacaagcaccggctgtgtaagagcgcagactacatgaacctgcatttcaaggtcaagtggttgtacaacgagtacgtggctgaactgcccaccttcaaggaccgcgtgccggagtaccctgcgtggtttgagcccttcgtcatccagtggttagatgagaatgaggaggtgtcccgggacttcctgcatggtgcactcgagcgggacaagaaggatgggttccagcagacatcggagcacgccctgttctcttgctcggtagtggacgtcttctcccagctcaaccagagctttgagatcatcaagaagctggagtgtcctgacccccagattgtgggccactacatgcggcgctttgccaagaccattagcaatgtgcttctccagtacgccgacatcgtctccaaggacttcgcttcctactgctccaaggagaaggagaaagtgccctgcatcctcatgaacaacacacagcagctgcgggtgcagctggagaagatgttcgaggcgatgggtgggaaggagctggacgccgaggccagcggaaccctgaaggagctgcaggtgaaactcaacaatgtcctggatgaactcagccacgtgtttgccaccagcttccagccacacatcgaggagtgtgtcagacaaatgggtgacatcctaagccaagtgaagggcacgggcaacgtgcccgccagtgcctgcagcagcgtggcacaggacgcagacaacgtgctacagcccatcatggatcttctggacagcaacctcaccctgtttgccaaaatctgtgagaagacggttctgaagcgggtgctgaaggagctgtggaagctggtgatgaacaccatggagaggaccattgtcctgccgccactcactgaccagacgatgattggtaccctcttgagaaaacatggcaagggcctagaaaagggcagggtgaaactgccaagccactcagacgggacacaaatgatcttcaatgccgccaaggagctgggccagctgtccaaactgaaggatcacatggtgcgagaagaagccaagagcttgaccccgaagcagtgtgccgtggttgaactggccctggacaccatcaagcaatacttccacgcggggggcgtgggcctcaagaagacctttctcgagaaaagcccggaccttcagtccctgcgctacgccctgtcgctctacacacaggccaccgacctgctcatcaaaaccttcgtgcagacgcagtcagcgcaggtccatggtggaaaggggactaggtttacccttagtgaagacgtttgtcctgagatgggctcgggtgtggaagaccctgtaggtgaagtatccgtccacgtggagctgttcacgcatccgggaactggggaacagaaggtcacagtgaaggtggtggccgccaacgacctcaagtggcagacttctggcatcttccgtccgttcattgaggtcaacatcgttggacctcagctcagcgacaagaaacgaaagttcgccaccaaatcgaaaaacaacagctgggcgcccaaatataacgagagcttccagttctccctgagcgccgacgcgggacccgagtgctacgagttgcaggtgtgcgtgaaggactactgcttcgcgcgcgaggaccgcacggtggagctggcggtgctgcagctgcgggagctggctcagcgcgggagcgccgcgtgctggctgccgctcggccgccgcatccacatggacgacacggggctcacagtgctgcgtatcctgtcgcagcgcagcaatgacgaggtggccaaggagttcgtcaagctcaagtccgacacgcgctcggccgaggagggcggtgccgcgcctgcgccctagcgcgcgttttggcggcggggcggggcctgggaagggatgaggtcccgccttccgtaggccaccgcctctccagaggccacgcccctccacctcagtggccttggctggggaggccctgccccctgcccctggaaaagccatagagggtccggtgcccagggcatggactgggcagggctgcctgggaggctgggtcgcagcctctggtgtctgcaaaatacagggcgggatggactctcaaaagcacaccggccctcggcgcacagctggggctgcgggcacccctctccgcggaccccgccctcagcagcgggcccactggcagctggcgaccccctgctcgtgtcacacagggcgggctgagctc

SEQ ID NO: 2720 - DNA, 6599 bp, Rattus norvegicus
gaattccctgagaataatagctccttggttccgtttgttgcttaggcaggcggctgtgccatggctcagaaagttcatcctgtggcttctctgtcagtctgaggcgtgcttctgagaggactactgcttaaaggcagcagcacttgcattctaaaacttgagaatttgtggctttaatattttcttcccttttcatttccttaaccttattttggtttcagcaccaaggatgaaagccaagccaggatccagagacatgtgtcaggtttgaggcctatacatgaggtcattccaggcagtactgtggctaaacctaagccttcagttaacaatagttgttaaaaaccaactcaaaaaagaaaggaaggaagaagaaaagaaagaaaggggactaggctcttccaaggccatttctattcagcatcccagcaagaaaagaggaaaaagaaagaagcaaagagccgtcacctctcctgagggggaaaatgaaacgactgttgcgggagtctgaggaagaaatcatgctgacactgggaccttcatccagcctctcaccagatcaggtcaggacagagactgtgtgtattgtcaagggcaagtccacaggtcctactgggtccttgccagaggacaacttcccacccccttgctgtgagtcagcagactccaccactagtggagagagagataggaacctggcccaacttggtagctttgagcagcaagccagtagccaaccttctctggcctgcactgcttgtgcttcagggtctgattctcgggaactctcgcctgccagcataacaagctgttcagagccttcagagagaaacaaagccaggcccatattccccagaggtcctggccaaagatgtaggcatgagcatcaggagcctctgggagatgtagtagaatatatcatcagagagctgcaaggaatcagtcgtctccagtctgagattgctgagctgcaacagcacttgaaccaagtccggggctctgtggatgaagtatctagctgtgtagattcagtgctgagtgaaatagaaggcttgcacgtgggtagcagctccctgggcaaagtacgccatggggaaaaggcccaggaactccatgtagaaagatccagagaggaagctattctttatttgtatggacttcctgaacatgatggggaaagcactgtggaactggtagataactttctagctaagcacctctgtgttaatggcatgcagtgcaacaggtatgtcagagaggcatacagggcaggcacagctcctgccccccggcccactgtggtgaaacttgtccacccagagcacagagacctcatcttgcaaaaatccatcctcttgcagagtgtgggggtcagggttgctaccagagaggaaccagtctggccagaagggtgtaagaatcccccaaaggagtctctctcatgcttgcaacaatttcaagaccacagtcggaaccatcagggtaaaccagctcttcagctagaaacagggaacagaagacaaatgtcgggaccacaccagatgaggactcagaatcaacatagagaactccaggcttctgagcatcaagggcttagtttcctaccaaaggatggctcagcaaaacagagtgatgtgtctaagctgcaggatgaagtaaaaggaacatcaggagctccccaggtaatcagtgatccttgtggtgaactttctctcctccatcaacttgaggggtcttccccagtgttaatcccaaaagaggaagattgtggaaaattacagattttcaaacaggacagccaagagcataaggcatgtaacgtgacaaagctacaaagtgattgcaacaatgcaattaaagccagcagttgcctttcattgtctggaccactgaaagcagagaaggtaaacgcagaggacaggatgctaggcggtgaagatggacttgatattctgagcccaaagcagctggaggaccttttggcagacaagtctaggaggtttgcgactctgaatcctgacagcgcagtggaggaagtgatcataggacccgagactttcagtaacatggtgcatattgacctgaatgaagaagagacctgtactgcccaggtccttaagaatgtctttgataagtcctcatgtgttctgggtggctcccaggaggatgaagatgtagaaattaaatttcacacaactaagctgagtcgagcgatccaccacttccgtttggctcttcagggggtatttcagaagctggagaacaatgggtccatcagtcctgaggacctggaaagcaatgagagtggttcccagtcagaaaacagtgatagacttctttggacagtaagttcaggaggtgcccacgattgttcagtggagagtccagcaagtcaggggagtgagagcttgctcagtgtggtctctggtggagtaggcatctctgtacagggtgatcagacacctcaagcaccaagtaacttctctcttgcttctaacaactcacctcttacaaactcattgctcagtttccctctagccccaggtctgggaaacgagacttgttccaggcctgactctcctaatcaaggcaaactgagtttagaacaagtatgtgcagagaccatttaccttaacaaatgcatcaacaattttaaaaacgtcctaagagagaaaagactgaggcagaaaaaacttttgcaagagctagtacagacggcaagtcatctttcagtagaagacatcccctcagaaggaaagcgagaagctcttcagatttcagatgatggtgacccctccttgcctcagtggctcccagaagggccagcgggagggctctatggcatcgacagcatgccagatctacgaagaaagaagccactgccacttgtcagtgatctggctatgtcactggtccagtcacggaaagcagggattacttccgctatggctacacgtacctctctcaaggatgaagatctgaaatcccatgtgtataagaaaactctgcaggccttaatctaccccatctcgtgcaccacgccccacaactttgaggtctggtctgccacgacacccacctactgctatgagtgtgaaggcttgctctggggccttgcccggcaaggcatgcgctgcagcgagtgtggcgtcaagtgccatgagaagtgccaagacctgctcaatgccgattgcctacagcgggccgctgaaaagagctctaagcacggagctgaggaccggactcagaacattatcatggccatgaaggaccgtatgaagatccgagaacggaataaaccagagatctttgaggttatccgggatgtgttcacagtgagcaaagttgcccacgtgcagcagatgaaaacagtaaagcagagtgtcctggatggcacctccaagtggtcggccaaaattaccatcacggtggtttgtgcccagggcctacaagccaaagacaagacaggatccagtgacccttatgtgactgtgcaagttgggaaaaccaagaagcgcactaagaccatttttggaaatttgaatcctgtttgggaggagaagttccattttgagtgccacaactcttccgatcgaattaaggtacgtgtgtgggatgaggatgatgacatcaaatccagagtaaagcagcggctgaagcgagagtcggatgatttccttggccaaactatcattgaagttcgaacgctgagtggagagatggatgtctggtataatctggagaagagaacagacaagtcagctgtctcaggggctatccgactgcaaatcaatgtggagatcaagggggaggagaaggtagccccataccatgtgcaatacacatgtctccatgagaatcttttccattacctcacagacattcagggcagtggaggagtctggatcccagacgctcggggggacgatgcatggaaggtgtactttgacgagacagcccaagaaattgtggatgaatttgccatgcgctatggcatcgagtccatatatcaggccatgacgcactttgcgtgtttgtcatccaagtacatgtgtcctggcgtaccagccgtgatgagtaccttactggccaacatcaatgcgtattatgctcacacaaccgcctccactaacgtctctgcatctgaccgctttgccgcctccaactttggtaaagaaagatttgtaaaactgctggaccagctacacaactcactgaggatagacctgtctacatacaggaataactttcctgctgggagccctgagcggctccaggatttaaaatctacagtggacttgctgaccagcattactttcttcaggatgaaggtgcaagaacttcagagccccccaagagccagccaggtggtaaaggactgtgtgaaggcctgcttgaactctacatatgaatacatcttcaacaactgccatgacctctacagtcaccaataccagctgcaggaacaaccactagaggaaccagggcccagcattcggaacttggatttctggcccaaacttatcacactgattgtatcaatcatagaggaggataagaattcctacacacctgttctgaaccagtttcctcaggagttgaatgtaggaaaagtcagtgcagaagtgatgtggcacctgtttgctcaagacatgaaatatgcactggaggaacatgagaaagaccggctgtgtaagagtgctgactacatgaacctgcacttcaaggtgaagtggctccacaatgaatatgtgcgggagctgcctgccctccaggggcaggtgcctgagtacccagcgtggtttgagcagttcgtgctacagtggctagatgaaaatgaagacgtgtccctggaattccttcgtgggggcttggaacgagataagagagatgggttccagcaaacatcggagcatgccttgttttcctgttctgtggtggacgtctttacacaactcaaccagagctttgagatcatccggaaattggaatgtccagaccccagcatccttgcccattatatgagaaggtttgctaagaccatcggcaaagtgctgatacagtatgcagacatcttatcaaagaacttcccagcttactgcacaaaggagagactgccctgtatcctgatgaacaacatgcagcaactgagggtccagctggagaaaatgtttgaggccatgggaggcaaagagctggactctgaagctgcagacagtctgaaggagctgcaggtgaaactgaatacagttctggatgagctcagcatggtgtttggaaacagcttccaggtgcggatcgacgagtgtgttcgacaaatggctgacatcctgggccaagtacggggcacagggaatgcatcccctaacgccagagcctcggtggctcaggatgcagatagtgtgctgcgacctctcatggatttcctggatggcaacctcacactgtttgccactgtgtgtgagaagacagtgctgaagcgagtcctgaaggagctctggcgagtggtgatgaacaccatggagcgggtcatcgtcctgcccccactcattgaccagacaggcacccagctgatcttaactgctgccaaggagctgagccagctttccaaactcaaggaccacatggtacgagaggaaacacggaatctcactccaaagcagtgtgctgtcctcgacttggccttggacaccgtcaagcaatacttccatgcaggaggcaatggtctgaagaaaaccttcctggaaaagagcccagacctgcagtctctacgttatgccctctctctgtatacacagaccacagacactctcatcaagacatttgtgcgctcacagactgcccaagtacatgatgggaaaggtattaggtttactgctaacgaggacattcggccagaaaagggggctggtgtggacgaccctgtgggagaagtctctattcaggtggacttgtttacacatcctggcactggggagcataaggtcacagtgaaagtggtagcagccaatgatctcaagtggcagacagcaggtatgttccggccttttgtggaagtgaccatggttggcccacaccaaagcgataagaagaggaagttcacaaccaagtctaaaagtaacagctggactcccaagtacaacgagacttttcatttcctcctgggaaatgaagagggtcccgaggcctatgaattgcagatatgcgtgaaggattactgctttgcccgggaggatcgtgtgataggactggcagtgatgcccctgagggatgtggcagctaagggcagctgtgcctgctggtgcccgttgggccggaagatccacatggatgagacaggcatgaccattctccggattctgtctcagaggagcaatgatgaggtagcccgagagttcgtgaagctcaagtcagagtctcgatccatagaggaagggagctgaccatctctgccatctttgccttgtgtgccatccagacagcacccactgctcagatcagtcagggagagttagctgtgtagccagcttagagtcctcgtagtcaaaaagctgactctcccagttaaggatgactaaggagaatcttggggggaattc

SEQ ID NO: 2721 - DNA, 1212 bp, Rattus norvegicus
aakwsmgsgcgctgctgttgatcgttcaccttggaaggcagaggactccaaccacacttgaatgtgaaatctgaccccggagtgtctcctgaggaaccaagccatcatcatggagttcgtgatgaaacaagccctgggaggggccaccaaggatatggggaagatgcttgggggtgatgaggagaaggaccccgatgccgccaagaaggaggaggagcggcaggaggcactgcggcaggcagaggaggagcgcaaagcaaagtatgccaagatggaggcagaacgtgaggtcatgcggcagggcatacgagataagtatggcatcaagaagaaggaggagcgtgaggctgaggctcaggcagccatggaggccaactcagaaggcagcctgactcgacccaagaaggctatcccaccaggctgtggggacgagcccgaggaggaagatgagagcatcctggacactgtcatcaagtacctgcctgggccactgcaggacatgttcaagaagtaatgatactgggtcagcaccaggagccctrcccactgtacagacccccgcggagtctccccccaacaagggatgttgggagcagatgcagccycacccccaccccgcaaaaataagccatagtcctagatctatcctgcccatgtccccctcgcgcctcgggagcctctggccacccctccccgtactgccatcactgaccccaccaggcaagggtgtgcccctcaggccccygtgctgtgcatccttgcctttcggtggttggaccccctccctaccaatcttaagttcaccattcctacagagcctgcccaaggtcaggccccgagggccagccctgaccacccctggatgggtggccaccagtcagggcctaaactcaggagcacagccatagtggggtgggacttgggaaatgagcagtgggtgcttgggggccccagcccttccctgagtccattgcccctgtttctggacttgttggacctgctggaccatttgctctgtcttcctgtctgtgagctaccaccctagtcttccccagcagcccttgcatactttgtccagctgtctctttctctgttgctctgcaaggtttggcttaagaattccacagccagaggaaacacagcaatagagctggagtgggtgggctcgacacacttggagtcccttgacgtggtctgtaatgcacccggaat

SEQ ID NO: 2722 - DNA, 4378 bp, Rattus norvegicus
atagctcgcttttaataacatacaaaatctagggaaaaccccaagtagtgcccactcccagagaccaaggaatggaaccagatgggagccatgctcccgtgcctgctctccagccccgaggggctgaactctacatccacagctgagttctctggatctggggcactaaccccaacagcaacaggaggcccagcttccagtttattccagttgggtagaggaggcctcagctagagcacacttccagggtgaggcttgggctgatgacccacatggccacttgcacccaccgaggacaatgcagactcatgagcagcctggtctcctctctgcctaggaagccaggctgaagacaagcccagcatgctgatcaaagcacggggcaaaggggacagcaccagcctcgctctaagctctggctcagggtggttctgcctacaaccttcccagaaggattccaccccggtccccatcagacatccctcagcagaagtaccctcccactttccttcagaactgaattctgcgtccctccggagagccgagatcgctgcaggatgtctcggggtcggaggtgagtgtgttggcggtgttctttggatggaagcaaaggtcattctgtgggatcaggacctgtctgcccagctggaggttgagacccaatctggagctgggcatagggtgaggtattcccagcagacaaacagctcatgtcccctgacccccagctgggacccactgtgacaagwwctwyrgkmgwacsgckkgcgsaacsgtagtgacgcgtttaacccggagtatggcggataccggcttgcgccgcgtggttcccagcgacctttatccccttgtgctcggctttctgcgagataaccagctctcagaggtggccagtaaatttgcaaamrcgacrggcgctacacagcaggacgccaatgcctcttccctcttggacatttatagcttttggctcaagtccaccaaagccccgaaggtgaaactgcagtcaaatggaccagtggccaaaaaggctaagaaagagacttcatccagtgacagcagtgaggacagcagtgaggaagaggacaaagcccaagttcccacacagaaggctgccgcccctgccaagcgagccagtttgcctcagcatgctgggaaagcagcagccaaagcttcagagmgcagcagtagtgaagagtccagtgaggaagaggaggagaaggacaaaaagaaaaagcctgtccagcagaaagcagttaasccccaagccaaggcagtcagacctcctccgaagaaggcagagagctctgagtccgagtctgactcaagctcagaggatgaagcaccacagacccagaagccaaaggcagctgytacggcagctaaagccccgactaaagcccagactaaagccccagccaaamcaggtccaccagcgaargcacagsctaaagcagccaatgsmaaagcaggcagcagcagcagcagtagcagcagcagtagcagtgatgactcagaggaagagaagaaggcagctgcacctctcaagaagactgcacstaaaaagcaagtcgtggccaaggcaccagtaaaagtaactgstgcccccacccaaaagagttctagcagtgasgactctyccagtgaagaggaagaggaacagaaaaaammmawraaraaaaaagcakgtccstacagttcagttccaccaccttytgtttctttmtycaamargtccgtgggagcccagtctccaargaaagcgghcrmrcaaacacagcctgcagacagcagtgcagacagcagcgaggagtctgattcaagttctgaggaagagaagaaaactccagctaagacagtcgtctccaagacacccgccaaaccagctccagtgaagaaaaaggccgagagctcttcagacagctcagattctgacagttctgaggatgaagctcctgccaagccagtcagtgccaccaagagtcccttaagcaagccagctgtcactcctaagccgcctgctgcaaaggcagwggcaactcctaagcagcctgcgggcagtggccagaaacctcagagcagaaaggctgacarcagctccagcgaggaggagagcagctccagtgaggaagaggccaccaagaaaagtgtgacaacccctaaggccagggtgaccgccaaagcagcaccctytctacctgccaaacaggctcctcgggctggtggagacagcagctccgactcagagagttccagcagtgaggaggagaagaagacgccgcctmrwsccsccgctaagaagaaggcagcaggtgcagccgttcccaaacccacccctgtgaagaaagcagcagccgagagcagcagcagcagcagctcctccgaagattccagtgaagaagagaaaaagaagcccaagagcaaagctactcccaaaccacaggcaggaaaggccaatggcgttccagcttctcagaacggaaaagcaggcaaggaaagtgaggaggaagaggaagacacagaacagaacaaaaaggcagccgggaccaagccaggttcaggcaagaaacggaagcacaatgagacagcagatgaagcagcaactcctcaatctaagaaagttaagctgcagacccctaatacgtttccaaaaaggaagaagggagagaaaagggcatcttcccctttccgaagggtcagggaggaggagattgaggtggactctcgagtagcagacaattccttcgatgccaagcgaggtgcagctggagactggggtgagcgagccaatcaggttctgaagttcaccaaaggaaagtccttccggcacgaaaaaacaaagmrgamgmgrggcagctaccggggaggckscayswskgtccaggtcaattccgtcaagtttgacagcgagtgacctgtgtcatctttagcaaaggaagggtgactttgggaggctggcactcrscwcsarkggacccagaaactcagtgttattaggagagagttgtggcacggacagtttgaagcaggttctttgacactgcagtctatagtccttccatgctcctgcttctggacaggtttgtttttgagcgttgattgtcaaagacaaaaagtttttttgtttgttttgttttattttttaagaaatccatttggttgtcagctgccttcctgttctgttggtcttcatactgagaaattgtatattttatattaaatcatgtcatacmrawwwwwdwwdwdwwwwwcagagatgagttccacagattaaagtctttgcctaaggcaawrmamarwrwmamawrrarrawwmtgtttatgtgagtgcgcagacccacatttgatcccacccctcaaagccccggtgggccctgacataagtcttgtgatgtttgactgctaagcatgccctgtgctcatcttcatccattgggcctgacaccgaagcttcccgaagccggcgtggatctgccaactttggggataaaattgcagttcttggtacaatttcctactgaactgacaggcaggattctcgatgtgagtgcgatgcaacggtttttgttttgttctcagtagctattagtgctacgtgtttacagtgtgttctagttttaatttcgaagtaagcttttctgacactgagaggcatttgcaacaacttgactcttaccgctgttgtatataagctcatgaatatatttgattcttgttaacatcatcaasakcagmmtsgtrmmstcctgcatggttgaggcactggtcaaggaagtggagatgacctacctgagcctctgggtgaagtaggtacggtggatagatcctgggcacctgcagtgaggagcaggcgaaggacagtgaggctgggagaggtctgggcaggaccgttctgtctggatccctcccctcaaagggatcacatgggagtgrttatgtctwatttaagttggtcccctggattgattaktggtacctwaactatatgatgttactgatacaggmtaaccagggggggmtgggaggcatatctgggtgatagtggcgcttacmtaccattcaaggacagagtgtgatctccatcaaggcaggaagtgaatgagcagagatccctggsccaagggagtaaattataaagccgtaagatttgaccattggcagagctcagccagagtgagggaagggagaagagcaccctggctaacctggtgagaacagacacggagcctccctggtttggtttccatggtcacctggtaacctgmtaaaagtgggtgcctgtggcagctccttgaggaagtctgcatggtcaaagttctgtgtcttactacaaaacaataaaatggatggtccctgrwrwraaaaaaaaaaaaaaaaa

SEQ ID NO: 2723 - DNA, 2076 bp, Rattus norvegicus
ggctgtggtgaccggaacaagcccggggtctacactgacgtggccaattacctggattagatcccaggagctgacacactatgttgcacgtccgcggcctggggctacctggctgcctggctctggctgccctggctagcctggtacacagtcagcatgtgttcctggcccctcagcaagcactgtcgctgctccagcgggtccgcagagccaacagcggcttcctggaggagctccgaaagggcaacctggagcgtgagtgcgtggaagagcagtgcagctatgaggaggcttttgaggccctggagtctccccaagacacggatgtgttctgggccaagtacacagtgtgtgattcagtgaggaaacctcgagagaccttcatggactgtctagaaggtcgctgtgctatggatctgggtctgaactaccatgggaatgtgagtgtcacccataccggcatcgagtgtcagctgtggcgaagccgctacccacacaggcctgacatcaactccaccacccatcctggggctgacctgaaggagaacttctgccgaaatccagacagcagtacctcagggccctggtgctacaccacagaccctactgtgcgcagagaggaatgcagtatccctgtctgtggtcaggagggccgtaccactgtgaaaatgactcctcgctcaagaggttccaaggagaatctgtcgcctccattgggagagtgcctcctcgagcgtggccggctgtaccaggggaacttagctgtgacaacacttgggtccccctgcctggcctgggacagtttgccaaccaagaccctgagcaagtaccagaacttcgaccctgaggtgaaactcgtgcaaaacttctgccgcaatccagaccgggatgaggagggcgcgtggtgctttgttgcgcagcagcctggttttgaatactgcagcctcaactactgtgatgaagcggtgggagaggagaaccatgacggggacgagtccatcgcaggacgcaccaccgacgcggagttccacaccttcttcgatgagaggactttcggccttggggaggcagactgtggcctgcggcctttgttcgagaagaagtccttgacagacaaaacggaaaaggagcttcttgattcttacatagatgggcgcatcgtggagggctgggacgctgagaagggtatcgccccatggcaggtgatgctttttcggaagagtccccaagagctgctgtgtggagccagccttatcagtgatcgatgggtcctcactgctgcccactgcattctgtacccaccctgggacaagaacttcactgagaatgacctcctggtgcgcattggcaagcactccagaaccagatatgagcggaatgttgaaaagatctccatgctggaaaagatctacatccaccccagatataactggcgggaaaacctagaccgtgacattgctctgctcaagctaaagaagccagtgcccttcagtgactacattcaccccgtgtgcttgccagacaagcagacagtaaccagtttgctcmaggytggtwataaagggcgggtgacaggytggggcaaccttcgggagacgtggacaacyaacatcaacgagatacagcccagcgtcctgcaggtggtgaacctgcccattgtagagcgaccagtgtgcaaggcctytammmggawrygcaytmctgacmwswtgttctgtsctggcttcaaggtgaatgacaccaagcgaggagatgcttgtgaaggtgacagtgggggaccttttgtcatgaagagcccctacaaccaccgctggtaccaaatgggtattgtctcctggggtgaaggctgtgaccggaatggraaatatggcttytacacgcacgtgttccgtytgaaaaggtggatgcagaaagtcattgatcrgcmkmrataggtttktgggtgggtgagagacccacagtatgggatcctcattgcaaaatcacagaaaccagttcaaaatatttttgtggkttgtttctgttctcaataaaagtgattgtcvgtwaaaaaaaaaaaaaaaaamcctcgtgccg

SEQ ID NO: 2724 - DNA, 7396 bp, Rattus norvegicus
  misc_feature (1862)..(1862): n is a, c, g, or t
acagccatccatccaagagttcatgaatagtttaacaaaggaagggcagagctattgagtaatccaggctcattaattgtgtacttgccagggggatctgactttaaatcattaatgcaggcaacatttctctccagagccatcaatgtgattgtgctgctagaaaaaatgtaataatgatggattttcatttctctttccttttccttctcattggaacttcagagtcacaggttgatgtttccagttcttttgatggcactgggtatgatataacgctatcttcagtttctgccacgacctacagctcgcctgtgagtagaacactggcaacaaatgtgacaaaaccggggcctccagtcttcctagccggggagagagttggctctgctgggatactcctttcgtggaatacccctcctaacccaaatggaagaatcatatcttatgttgttaagtacaaggaagtctgtccatggatgcagacagcatatacccgagcgagagcgaagccagacagtctggaggttcttctcactaaccttaatcctggaacaacatatgagattaaggttgctgctgaaaacaatgctggcatcggagtgtttagtgacccatttctttttcaaactgcagaaagtgctccgggtaaagtagttaacctcacagtggaagctctcaactactctgcagtaaacttgatttggtatttacctcggcaaccaaatggcaaaatcaccagcttcaagatcagcgtcaagcacgccagaagtggcatagtagtcaaggatgtctccctcagagtagaggacattttgtctgggaaattacctgaatgtaatgagaacagcgaatctttcttgtggagtaccaccagcccctctccaaccctgggtagagtgacacctacagttcgcaccacacagtcatccagcacggcggcacggagtaagatcagctctgtgtggaaggagcccatcagttttgtggtgactcacttgagaccttacacaacgtatctctttgaagtctcagccgttaccacggaagcaggatatattgacagcaccattgttaggacgccagaatcagtgcctgaaggaccaccccaaaactgtataatggggaatgtcacaggaaaggccttttcaatttcctgggacccaccaactattgtcacaggaaagtttagttacagagttgaattgtatgggccatcagggcggattttggataatagcacgaaagacctccggtttgcgtttacacatctcacaccattcacaatgtacgatgtctatgttgctgcggaaaccagtgctggggttggacccaagtcaaatctttcagtatttactcccccagatgttccaggagcagtgtttgatttacagatcgcagaggtagaagccacagaaataagaattacttggaggaaacctcgacaaccaaacggaatcatcagccagtaccgtgtgaaagtgtcagtcctagagacaggagtagttttggaaaatactctgctcacaggacaagatgagtctataagcaaccccatgtctccagaaataatgaacctagtagaccccatgataggattctatgagggctcaggagaaatgtcttcggacctgcactccccggcttcattcatatacaacagccatccacacaatgactttcctgccagcactagagctgaagagcaaagttcaccagttgtaaccaccaggaatcagtatatgaccgacatcactgccgaacagctgtcttacgttgtcaggcggcttgtaccattcactgagcacacgattagcgtatctgctttcaccatcatgggcgaaggaccaccaacggtcctnactgttaggacacgtgagcaagtgccaagctctatccaaattataaactataaaaatattagttcttcatctattttactgtattgggatcctccagaatatcccaatggaaagatcactcattacacaatctacgcaacggagctggacacaaacagagcattccagatgaccactgtagataacagctttctcatcacagggttgaagaaatatacaagatacaaaatgagggttgctgcctcaactcatgttggggaaagttctttgtcagaagaaaatgacatctttgtgagaactccagaagatgagccagaatcatcacctcaagatgtccaagtaactggtgtgtctccaagtgaactgagattgaagtggtccccgcctgaaaaacctaacgggatcattattgcctatgaggtgctttaccaaaatgcagacaccttgtttgtaaaaaacacctcaaccacagacatcattataagtgacctgaaaccttacacactctataatatttctatccggtcgtataccagacttggccatggcaatcagtcatcctcattgctgtctgtaaggacttcagagactgtgcctgatagtgcaccagaaaatattacttacaaaaacatttcttcaggagagattgagatatccttccttcccccaaggagtcccaacggcatcatacaaaaatacacaatttacctcaagagaagtaatagccatgaggcaagaactataaatacaacctctttgactcaaaccattggaggactgaaaaagtatacccattatgtaatcgaggtgtctgctagtacactcaaaggtgaaggcattcggagtaggccaataagcatattgaccgaggaagacgctcctgattctcctcctcagaacttctctgtgaaacagttgtctggtgtcaccgtgatgttgtcatggcaaccacccttggagccaaatggaattatcctctattacacagtttatgtctgggataaatcatctctaagagctattaatgcaactgaagcatcactggtgttgtctgacttagactataatgttgactacggtgcctgtgtaacagctagcaccagatttggcgatgggaacgcaagaagcagcatcattaactttcgaacaccagagggagagcccagtgatcctcccaacgatgtccactatgtgaatctcagttcctcatcgataattctcttttggactcctcctgtaaaacctaatggaatcatacaatattattctgtttattatcaaaatacttcaggtacttttgtgcagaactttacacttcttcaagtaaccaaggagtctgacaatgtgacagtgtctgcaaggatatacagactggcaatattcagctactatacattttggctaacagcaagtacttcagtcggaaatgggaataaaagcagtgacataattcatgtatacacagaccaagacatacctgaaggtcctgttggaaacctgacttttgagtccatttcatcaactgcaattcatgtgagctgggagccaccatcccaaccaaatggcctggtcttctactacctttcactgaatttacagcaaagtcccccacggcacatgataccacctctggttacctatgaaaacagcatagactttgatgatctggaaaaatatactgactatatatttaaaatcactccgtcaacagaaaagggattctctgagacctatactacccaactacacatcaaaacggaagaagacgttccagacactccaccaataatcaacacttttaaaaatctttcttctacctccattctcttatcatgggatcccccattaaagccaaacggtgcaatactaggttaccatttaactttacaaggaccccacgccaaccatactttcgtcacttccggtaaccacatagtactggaagaactctcgccatttaccttatatagtttttttgctgctgcaagaacaatgaaaggactcggtccttccagtattcttttcttttacacagatgagtcagcgcctttagcacctccccagaatttgactttaatcaactacacttcagattttgtatggctgacatggagcccaagtcctcttcctggcggtattgtaaaagtatatagttttaaaattcatgagcatgagactgatactgtattttataagaatatttcaggtcttcagactgatgccaaacttgagggactggagcctgttagcacctactcagtcagtgtgtctgcatttaccaaagttggaaatggcaatcagtatagtaatgtggtggaatttacaacccaggagtctgttccagaggctgtacggaatatagagtgcgtggcacgtgactggcagtcagtatcggtgaggtgggacccaccgagaaaaacaaatggaataattattcactatatgataacggttggagggaattctaccaaagtctcccccagagaccccacgtacacgttcacaaaacttcttcccaatacgtcatacgtctttgaagtaagagcgtcaacatcagccggcgaaggcaatgaaagcaggtgtgacatcagcacactcccggagacagttcccagtgctcccacaaatgtagcgttttctaatgtccagtcaactagtgcaacactaacatggacaaaacctgatactatctttggatacttccaaaattacaagataactactcaacttcgtgctcagaagtgcagagaatgggaacctgaagaatgtattgaacatcagaaagatcaatacctctatgaagcaaaccaaacagaagaaacagtgcatgggttaaagaagtttcgatggtatagattccaagtggctgctagcaccaatgttgggtacagtaatgcctcggaatggatttctacacaaacgctgcccggccctcctgacggtcctcctgaaaatgtgcacgtggtcgcaacatcaccctttggtatcaatatcagctggagtgaacctgctgtcataactggaccaacattctacctgattgatgtcaaatcggtagatgatgatgactttaatatttccttcctgaaatcaaatgaagaaaacaaaaccacagagattaacaacttagaagtatttacaaggtattctgtggtgatcacagcctttgtaggaaatgttagtcgggcatacacagatgggaagtcaagtgcagaagtgataattacgactttagaatcagtgcccaaggacccacctaataatatgacatttcagaagataccagatgaagtaacaaagtttcaattgacattccttccaccttctcagcccaatggaaacatccgagtgtaccaagcactggtttaccgggaagacgatcctactgctgtccagattcataacttcagcattatccagaagacggacacctccatcattgcaatgctagaaggcttgaagggtggacatacatacaacatcagtgtttacgctatcaacagtgctggtgctgggccaaaggtgcagatgcgaataactatggatattaaagctccagcacgaccaaaatccaagccaattcctatccgtgacgccacaggaaaactgcttgtgacgtcaacaactatcacaatcagaatgccaatatgctactacaatgatgaccacgggccaatcagaaatgtacaagtccttgtggcagaaacaggagctcagcaagacggaaatgtgacaaagtggtacgatgcatattttaacaaagcaaggccatattttacaaacgaaggattccctaatcccccgtgtatagagggaaagacaaagttcagcggcaatgaagaaatctatgtgataggtgccgataacgcctgtatgatccctggaaatgaagagaaaatttgcaatggacctctgaaacccaaaaagcagtatttgtttaaatttagagccacaaatgtcatgggacaatttactgactctgagtactctgaccctattaaaactttaggtgaaggcctttcagaaagaactgtggagatcatactgtcagtcactttgtgtatcctctcaataatcctccttggaacagctatttttgcatttgtaagaattagacagaaacagaaggaaggtggtacatactctccccgggacgcagagattatcgacactaaattcaagctggatcagctcatcacggtggcagacttggaactgaaggatgagagattaacgcggttacttagttataggaaatccatcaagccaataagcaagaaatccttcctgcaacacgttgaagagctttgcacaaacagcaacctaaagtttcaagaggaattttcggaattaccaaaatttcttcaagatctctcctcaactgatgctgatctcccttggaacagagcaaagaatcgctttccgaacataaaaccatacaataataacagagtgaagctgatagccgacgtaagcctcccgggatcggattacattaatgccagctatgtctctggatacttatgtccaaatgagtttattgctacccaaggcccattgccagggacagtcggagatttttggagaatggtttgggaaaccagaacgaaaacattagtaatgctcacacagtgttttgagaaaggacggatcagatgccatcagtattggccagaggacaacaagccagtgacagtctttggagacatagtaattacaaagcttatggaggacattcagatcgactggaccatcagggatctgaaaattgaaaggcatggagactgcatgactgtccggcagtgtaacttcactggttggcctgagcatggggttcctgaaaacaccacccctttgattcactttgtgaagttggtgcgaacaagcagagcacatgacaccacccctatggttgtgcattgcagcgctggggttggaagaacaggagttttcattgctctggaccacttaacacagcacataaataaccatgactttgtggacatatatggactagtagctgaactgaggagcgagagaatgtgcatggtgcagaacctggcacagtacatcttcttacaccagtgcattctggatcttttatcaaataaaggaggtcatcagcccgtctgttttgttaactactccacacttcagaagatggactctttggatgccatggaaggtgatgttgagcttgaatgggaagaaactaccatgtaaaatttggaccaaagattacaacaggaggatagaattttcagatcccaggagccaacattatccctcttgcttctgaattggactgggcaaaggaaatctttatgcttcccggaccatgcctcactgactgggctgactgttttatggacggatggttgtaggaaaatgctcatataagatagtcatttgttttatatagaattaaatattatgtaattaaaatgtttaagaaaatacatcatacaaattttcgaggtcctcaagtcttcttgaaataagccaaatataaaattatgattatttcatagcgt

SEQ ID NO: 2725 - DNA, 2383 bp, Rattus norvegicus
cggccgcggcggcggmggctgctgtagccgtcgccgccggagacggctctcgatttagtaagctcctcggtggggtagggcgcggcgaargttgagtgccgcccaggacccagcactgaggaaagtgagagttacgcgccctgggcctgggcgatgatgctgggagggtttcgacctaccgcgggtcggcgccgatagcggaggcccctcgcccggacaacaacaggactggagtccgtttcgagcctcysctygtcckaactaagcgccggcggcgacggcgacggcgacggcgacgacggcgctcttggtgggagtggtggcgacgccagaggaggcggaggaggaggcgacagakgcggtcaagcatcmcgaagccctgtagctcamaggacaagggatgcccggagggtgcaccagtggcgttaggatctcctmyccggcagccttccctgcctyaattgcctggacccagaaaagttcgacgccggaaaccgyggcatcgacggcgcaggcgggggatcatggaactggagaacttcatggccaacactttgttgctgaaggctcgtcaaggatttaccaaaaagactggtcgcagtaaaaagtggagagagctcctgaagttgcccccagtcagcatgtgcagtgacttacgacactccatcgaaaaggattttagcagtctttgtgaccaacagccaatcggaagacttcttttcagacaattctgtaatacgaaaccagatctaaagaggtgcattgaattcttggatgcagcggcagagtatgaagttaccatcgaagaggaacaaagagaatttggactatccatctacagtagattcttcaaagagaattcagaagtctccttaccacagatacctccagatcttgtgaaggagtgtaaatgcaatctgaagcagagttctccctctcaaaatgtgttccaggactgtgctggagttatctataagtatttgagtgaaaaaccatttgaagaataccaagagagtacatactataatcgatttttacaatggaaatggctagaaaggcgtccagtaacaaagaacacattcagacaatacagagttttaggaaaaggcggatttggagaggtttgtgcctgtcaagtgcgagctacaggaaaaatgtatgcctgcaaaaaactagaaaaaaaaagaataaagaagaggaaaggtgaagccatggctctgaatgaaaaaagaatcttagaaaaattgcatagtagatttgtagttagtttagcctacacttatgaaaccaaggatgctttgtgtttggtgctaaccattatgaatggaggggatttgaagtaccacatttacaacctgggcaatcctggctttgaggagcagagagctgtgttctatgctgcagagctgtgctgtggcttggaagatttacagagggaaagaattgtatacagagacctaaaaccagagaatatcctccttgatgatcatggacacatccgaatttcagatcttggtctagctctggaaatcccagaaggggagatggttcgaggaagagttggtactgttggctacatggctccagaaattatcagtcatgaaaagtatacatttagtcctgattggtggggacttggctgtctgatatatgaaatgattgcgggacattctccattcagaaaatataaagaaaaagtcaaccgggaggaaatggaaagaagagtgaagactgaaactgaggagtactctgagaggttttcagagaatgccaagtccatctgcagcatgttacttaccaaggatccaagtaaaaggctgggctgccagagtgatggagcctctgctgtaaagcagcacccaatattcaaggatattaacttcagcagactggaagcaaatatgttagacccacctttctgtcctgatcctgaggccatttattgtaaggatatcttggatattggacagttctctgtggtgaaaggagtcaacctggacaccaatgatgagatcttctacactcaatttgcgacagggtgtgtcaccattccctggcagaatgagatgattgaatctggatgtttcaaggacctcaatgaatatgaagataaaggtctgtcaccacttgaaaaacacaagatatgttcctgtattcttagaccaaagagaaacttcttccatagactcttcagaagagcggcctgcctgaacattgcccacagtgaggagagggagccaacagaacactgaccattcactgtgcagaccacaaagcaagaccctggtgttaagaaggaatctgtcacatacccagtgtcttgtcctttccataaattgtaataaacggtctgtaacactgtttwaaaaaaaaaaaaaaaaaa

SEQ ID NO: 2726 - DNA, 1678 bp, Rattus norvegicus
agtgcctgtgcctggctgaagaaggcagcagccacaagctccaggcgccccggccccacgctttctgaataccaagctgcaggcgagcttttttgctttcttgcttttcctcttctccaattcaaagtgggcagtccacaccgatttcttttcaggggagggaggagacagggccaggggtcccaagtcgcacacaagtcttcgctgccatgggggccgtcatgggyaccttctcrtcyctgcaraccaaacaaaggcgaccctcyaaagayaagatygargatgakctrgagatgaccatggtytgccatcggcctgagggactggagcagctkgaggcmcagacsaacttcaccaagagrgarctrcargtcctttaccgrggmttcaaaaaygagtgccccagyggtgtsgtyaacgaagaracwttcaagcagatctacgctcagtttttcccycayggagatgccagcacatacgcmcattacctcttcaatgccttcgacaccacccagacaggctcygtraagttcgaggactttgtractgctctgtcgattttrctgagaggaackgtccatgaraarctsaggtggacrttyaatttgtaygacatcaataaagacggmtacataaacaaagaggagatgatggacatwgtsaaagccatctaygacatgatggggaaatacacmtatccygtgctcaaagaggacactcccaggcagcacgtggacgtcttcttccagaaaatggayaaaaataaagatggcatygtrackttagaygaatttctygartcctgtcaggaggatgacaacatcatgaggtctctmcagctgttycaaaatgtcatgtaactgaggacactggccatcctgctctcagagacactgacaaacacctcaatgccctgatctgcccttgttccagttttacacatcaactctcgggacagaaataccttttacactttggaagaattctctgctgaagactttctacaaaacctggcaccgcgtggctcagtctctgattgccaactcttcctccctcctcctcttgagagggacgagctgaaatccgaagtttgttttggaagcatgcccatctctccatgctgctgctgccctgtggaaggcccctctgcttgagcttaaacagtagtgcacagttttctgcgtatacagatccccaactcactgcctctaagtcaggcagaccctgatcaatctgaaccaaatgtgcaccatcctccgatggcctcccaagccaatgtgcctgcttctcttcctctggtgggaagaaagaacgctctacagagcacttagagcttaccatgaaaatactgggagaggcagcacctaacacatgtagaataggactgaattattaagcatggtggtatcagatgatgcaaacagcccatgtywttttttttycagaggtagggactaataattctcccacactagcacctacgatcatagaacaagtcttttaacacatccaggagggaaaccgctgcccagtggtctatcccttctctccatcccctgctcaagcccagcactgcatgtctctcccggaaggtccagaatgcctgtgaaatgctgtaacttttataccctgttataatcaataaacagaactatttcgtacacaaaaaaaaaaaaaa

SEQ ID NO: 2727 - DNA, 1077 bp, Rattus norvegicus
atgacagctactctaacactagagaccatgaccagtgaagaagagtatgggccaaggaactgtgtggtgtgtggagaccgagccacgggctatcatttccatgccctgacttgtgagggctgcaaaggctttttcagacgaacagtcagcaagaccattggtcccatctgtccgtttgctgggaggtgtgaggtcagcaaggcccagagacgccattgtccagcctgcaggttgcagaagtgtctaaatgttggcatgaggaaagacatgatactgtcagcagaagccctggcactgcggagagccagacaggcacggcggcgggcacagaaagcatctttgcaactgagtcagcagcagaaagagctcatccagaccctcctgggcgcccacactcgtcatgtgggccccatgtttgaccagtttgtgcagttcaggcctccggcctacctgttcagccatcaccggcctttccagcccctggcccccgtgttgcctctgctcacacactttgcagatatcaatactttcatggtgcagcagattatcaagttcaccaaggatctgccccttttccgttccctraccatggaggaccagatctcccttctcaagggagcggctgtggaaatcttgcatatctcactcaacactacgttctgccttcaaacacagaatttcttctgcgggcccctttgctacaagatggaagatgcggtccatgtagggttccagtacgagtttttggagttgatcatccacttccacaaaaccctgaaaagattgcagctccaggagcccgagtatgcgctcatggctgccatggctctcttctctcctgacaggcctggggttacccaaagagaagagattgatcagctgcaggaagaggtcgcgctgatcctcaayaaccacattatggagcaacagtcaagactccaaagtcggtttctgtatgcaaagctgatgggcctgctagctgagcttcggagtataaacagcgcatactcatatgaaatccatcgcatccagggactgtctgctatgatgccgctgcttggggagatttgcagctga

SEQ ID NO: 2728 - DNA, 4886 bp, Rattus norvegicus
cgggcggcggatggccatcttaagtggccgcggggagtccagggaggcttccccgggctaggagtcaccagagtcgccccagagttgaggccggcgctgctggcggcggcggctacgcggagatcgaggcggccggcgcggcaagcgtggaccccggatactgggctctctcaggctggtggatcctcaggcccggaacccgggccaggcccagcctccactccaagcttccctgggcggatggcgcggaggcaggcatcggcggcgctgagccctacgcgggccatggcctcagtgtgtggggcaccgagtcccgggggcgcgctaggcagccaggcccctgcctggtatcaccgtgacctgagccgcgcggctgcggaggagctgctagctcgggcaggccgcgatggcagcttcctggtgcgagacagcgagagcgtggcgggggccttcgcactctgcgtcctgtatcaaaagcacgtgcacacctaccgcattctgccagatggagaggatttcctggctgtgcagacctcacagggcgttcctgtgcgccgcttccagaccctgggtgagcttataggcctgtatgcccagcccaaccagggtcttgtctgtgctctgctgctgcctgtagagggggagagagagccagatccaccggatgaccgagatgcctcagatgtggaggacgagaaacccccactacccccgcgctctggctctaccagcatttctgtccctgcggggcctagcagccccctgccagcccctgagactcccacaactccagcagctgagagcactcctaatggactcagcactgtgtcacatgagtatctgaagggcagctacgggctggacctggaggctgtacgaggcggagccagcaacttgccccatctcacccgaacccttgtcacctcatgccgtaggctacacagcgaggtggacaaggtcctgtcaggcctagagatcctgtcgaaggtgtttgaccagcagagctcacccatggtgacccgccttttgcagcagcagagcctaccacagactggagagcaagagttggagagccttgtgctgaagctatctgtgctaaaggacttcctgtcaggcatccagaagaaggccctaaaggcactgcaggacatgagctccacagcacctccggctccattgcagccctccatacgaaaggccaagaccatccctgtgcaagcctttgaggtgaagctggatgtgacactgggtgacctgaccaagatcgggaagtcccagaagttcacactgagcgtggatgtggagggtgggaggctggtactgctgaggagacagcgtgactcccaggaggactggacgaccttcacacacgaccggatccggcagctcattaaatcccagcgtgtgcagaacaagctgggtgttgtgtttgaaaaggagaaagatcggacgcagcgcaaggacttcatctttgtcagtgcccggaagcgagaagccttctgccagcttctgcagctcatgaagaacaagcattccaagcaggatgaacctgacatgatctccgtcttcataggcacctggaacatgggaagtgtaccaccaccaaaaaacgtgacatcttggttcacatcaaagggactggggaaagccctggatgaggtcacagtgactataccccacgatatctatgtctttgggactcaggagaactcagtgggtgacagagagtggctggatctgctgcgtgggggcctcaaggagcttacagatctggattaccgtccgattgctatgcagtcactgtggaacatcaaggtggccgtgctggtcaagccagaacatgagaaccgcatcagccacgttagtacgtccagtgtgaagactggtatcgccaataccctggggaacaagggagctgtgggtgtttccttcatgttcaatggcacttcttttggcttcgtgaattgccatctcacctcagggaatgagaagactactcggcggaaccagaattatctggacatcctgcgtcttctctcattgggtgatcggcagctcagtgcctttgacatctctttgaggttcactcatctcttctggtttggggaccttaactaccgcttagacatggatatccaggagatcctgaactacattagtaggagagagtttgagcccctgctcagggtggaccagctcaacctggagcgggagaagcataaggtcttccttcgatttagtgaggaggagatatctttcccacccacctaccgctacgagcggggttcccgagacacatatgcttggcacaagcagaagccaactggggtccggaccaatgtgccttcatggtgtgaccggattctatggaaatcctatcctgaaacccacatcatctgcaattcctatggttgcactgatgacattgttaccagtgaccattctcctgtgtttgggacatttgaggttggagtgacttcccagttcatctccaagaaaggtctctctaagacctcagaccaggcctacattgagtttgagagcatcgaggccatcgtgaagacggccagccgcaccaagttcttcattgagttctattctacctgcttggaagagtacaagaagagcttcgagaatgacgctcagagcagtgacaacatcaatttcctcaaggtgcagtggtcctcgcgccagctgcccacgctcaagccaattctggctgacattgagtacctgcaggatcagcatctcctgctcacagtcaagtccatggatggctacgaatcatatggggagtgtgtggttgcactcaaatccatgattggcagcacggcccagcagttcctgaccttcttgtcccaccgtggagaggagacaggcaacattcgtggctccatgaaggtgcgggtgcccacagaacgcctgggcacccgtgagcggctctatgaatggattagcattgataaggatgacacaggagccaaaagcaaggctccttcagtgttgcggggcagccaggagcacagatctgggagccgcaagccaacttccacagaggcctcctgtccactgtccaagttgtttgaagagcctgaaaagccaccaccgactggcaggcccccagccccaccacgggcagttcctagggaggagtccttgaaccccaggttgaagtcagaggggacacctgaacaggaaggagtagcagcccctccacccaagaacagcttcaataaccctgcctactacgtccttgaaggggtcccacatcagctgctgcccctggagccaacctcatttgccagggcccctatcccacctaccaccaagaacaaagtggccatcacagtgcctgctcctcagcttgggcgccaccggacccctcgtgtgggggagggaagctcttcggatgaggactctgggggcacactgcctcctccagacttcccacctccaccactgccagactcagccatcttcctgccccctaacctggatcctttatcaatgccagtggtcaggggccgaagtgtgggtgaggcccgtggcccaccacctcccaaggcccatccaagaccaccactaccgccgggcacctcacctgccagtacttttttggaagaggttgcaagtgcggatgaccggtcttgctcagtactgcagatggccaagacactcagtgaggtagattattctcctgggcctggacgctcagcactcctccccaaccccttggaattgcagcttccccgagggccctcggactacggacggcccctcagcttccctccaccccgcatccgggagagcatccaagaagacttggcagaggaggctccgtgcccgcagggcgggcgggccagcgggctgggagaggcgggcatgggtgcctggctgcgggccatcggcttggagcgctatgaggagggcctggtgcacaatggctgggacgacctggagtttctcagtgacatcactgaggaagacctcgaggaagctggggtgcaggatcctgctcacaagcgccttcttctggacacgctgcagctcagcaagtgatagcagagatgccgccgagctgccaaagcagagctggaagggcacatgaaaccaggggtgaaagttttgaggggtgtggcagtgcatctctgtctatttattggggaccagagttccctactgcccaattgtttggggcgttctagttagaacatcgtgctccccacctagcttttaggcccagggtcaggggtttagtagcctgtggtaattgtgaagcacggtggttactccagtgcagacacctccctgcctcggttgtgcgtggggtatggttgggcacatctgggtcctcacttccastgatgtttccacctccctccctsgggcctgaactccaggggaagagttcctsgtagctcctactctgggaacgtmcgtccgtccgtccggaaatgaaggaagagcccaggaccgggctggatttatttaagtttttctgtgtgggttttgggaagggagggcacgttaattttattggggtggggcaggacctcggccttaaaatgccagtttgcctagttctggctgttcctctggttcgaagaagcgctcttgcccagggaatgcgtggcagccggcggatgggggggggggggcagcctcgggttgccccggcaccagaagacagtgcttttgcagtttatcccatcttgggcactcagaaaggttgccggcttgatgtcttcaataaattaagttttatttggattgagcaaaatcacsttaataaatkacacgtttttcawaraaaaaaaaaaaaaaaaaaaaaaaaaaaagtttggcggccgcaagcttattccctttagtgagggttaattttaggt

SEQ ID NO: 2729 - DNA, 2352 bp, Rattus norvegicus
accgaggaagccagagctctcggagatgaagctgtaggcaacaaaatgatcgacctttttaaggctgagtgggtttcttcagtttgcgtgcaagtttcacggaatggaaggactgaccaggtttgggttccccaggatgaatggacagggtacacgcctcgcgggaaagacgacgagatcccgtgccggaggatgcgcagtggcagctacatcaaagccatgggggatgaggacagcggggactcggacacgagccccaagccatctcctaaggtggctgcaagaagagaaagctatctcaaggccacacagccatcccttacagagctcaccaccctcaagatctccaacgaacactcccccaaactccagatccggagtcacagctacctgagggcagtaagtgaagtctccattaacagaagcctggacagcctggatcctgcaggcttgctcacgtcaccaaagttccgctccagaaacgagagctacatgcgagctatgagcaccataagccaggtgagcgagatggaggtgaacggacagttcgaatccgtatgcgagtctgtgttcagcgaactggagtcgcaggcggtggaagcgctggacctgcccatgcctggctgcttccgcatgcggagccatagctacgtgcgggctatcgagaagggctgctcccaggatgatgagtgcgtgtcgctgaggtcgtcctcccctccacgcacaaccaccaccgtgaggaccatccagagtagcaccggtgtcataaaactgagttctgccgttgaagcccagagtagcacagagtccgcgcaggatgcctacatggacgggcaaggccagcgcggggacatgatcagccagtctggcctcagcaactccaccgaaagtctggacagtatgaaggctctcacggctgccatcgaggctgcaaacgcgcagatccacggcccggcaagtcaacacatgggcaccaacgctgctgccgtcaccaccaccaccaccatagccactgtcaccaccgaggacaggaagaaagactttaagaaaaacagatgcctatctattgggatacaggtggacgacgccgaagagtcagagaaaatggcagagagtaagacgtccagtaagttccagtccgtgggagtgcaagtagaagaggagaagtgcttccgcaggttcactcggtccaacagtgtaacgactgcagtacaggctgacctggacttccatgataatctggaaaattctctggagtctatagaggacaattcgtgtcccggcccaatggccagacagttctcgcgagatgccagcacctctaccgtcagtatccagggttcaggaaaccactaccatgcctgtgcagccgacgatgactttgacacggattttgacccctctatcctgcctcctccggacccctggattgactctatcacagaagaccctctggaggccgttcaaaggtccgtgtgccaccgggacggccactggttcctgaagcttctccaggcagagcgagaccgcatggaagggtggtgcaagcaaatggagagagaagagagggaaaacaacctcccagaagacattctagggaaaatcagaaccgcggtgggcagtgcccagcttctcatggcgcagaaattctaccagttcagagaactgtgtgaagagaacctgaatcccaatgctcacccgagacccacttcccaggatttggcggggttttgggacatgctgcagttgtccatagaaaacattagtatgaaatttgatgaacttcatcagttaaaggccaataattggaaacagatggatcctcttgacaagaaggagcgaagggcccctcctccagtgccaaagaagccggcgaagggccccgcgccgttgatccgggagcgctcgctggagagctcgcagcgccaggaggcccgcaagcgcctgatggccgccaagcgcgcagcatcagtccgccagaactcggccaccgagagcgccgagagcatcgagatctacatccccgaggcgcagacccgcctctgagcgcggccgacgaggaccgtcccgcatccctgccctcggccgtctccccgccccctccgtctctgagctcagtgaccgccaccgtcgtggcgtagttgtccacctcgcaggagccgtccccaggccgccccgcttcctgggccactttgcccatcttctccaccgagcttcgctccccagtcctgaagcctcatgcagacatccaaaccctttattttctgggccaagcaaacttgtgtagaaacgacacctgtaggtcactcaccctcctcagttctctcaagctagtgtgcccctagaactcag

SEQ ID NO: 2730 - DNA, 4156 bp, Rattus norvegicus
  misc_feature (3884)..(3884): n is a, c, g, or t
gaattctctcggagaaagacaggccggccatcaggaaaacaaacaagccwcagcaacatctaaaccctygaaaggatcctgagagaggggggaamgggaaaacagcagccaccagcccaaccacttgtgtcttctgccyctycccacctatcttgcccaccccaccagcccacgctgcttgggacttgaaatctgtggccgaaggaccgtcaccacataacttcaaaaataatcaaccaccctccctacccaaacccacccaatctcactcatccagcatttcctttttggagtccactcagaatttttttcaacgaccccctctccctaatggagttgggtggggggaaaatgaaaactgagttggtctttacttttttaagagactttttgatccaatgaggccccacaagtaactgagtttgggtcctggttggttgttttattttttttcctccaaaattttacccctcccccctgagcccgaggtrctgacgtcgcaaaaaaattggataaagyswcsawywtksrtwmassasccwtrracmmsaaasaacktbtcaagggcmtagatagcttccttactcgggatggagaagtgaagagtgtggatggaattrccaagatcttcagtytaatgaaggaggcacgaaagatggtgagtcgatgcacgtacttgaatattatcctgcagacccgggcgccggaggtgctagtcaagtttattgacgtcggcggytacaagcttctgaacagttggttaacgtattcaaagacgaccaacaacattcctctcctacagcagattctgctgactctgcagcacctcccactgactgtggaccacctcaagcagaacaacacagcgaagctagtgaagcagctcagcaagtcaagcgaggacgaagagctccggaaawwrrmawmarwmmwtgtcagtgactggatggctgtcatccgctcccagagtagcacccagcctgcagagaaagataagaagaaaaggaaggaagaggggaaaagtcgaaccacgcttcctgagcggcctttgactgaagtgaaggctgaaacccgggctgaggaagccccagagaagaagaaggagaagcccaagtcacttagaactacggcacccagtcatgccaagttccgttctactggactggagctggacaccccatctttggtgcctgtgaagaagaactccagcactgtggttgtgtcagacaagtacaacctgaagcccatccccctcaagcggcagagtgccacagctgctccaggcgatgctgccccgcctgcagagaagaagtacaagcccctcaacacaacccccaataccaccaaagaaattaaagtgaagatcatccccccacagcccatggagggcctcggttttctggatgctctcaattccgcccctgtcccaggcatcaaaattaagaagaagaagaaggttctatcacctactgctgccaagcccagcccttttgaagggaaaacaagcactgagccaagcacagccaaaccttcctccccagagcctgcagcccccgctgagcccatggacacagaccgtcctggcacccctgtccccgctgtggaagtcccggagctcatggatgcagcctcttcggagccaggagctctggatgcaaagcctgtggaaagccctggagatcccaaccagctgactcgaaagggcagaaagagaaaaactgtgacgtggcctgaggagggcaagctgagggagtatttctacttcgaactggatgaaactgagcgagtgaatgtgaacaagatcaaggactttggggaggctgctaagcgtgagatactgtcggaccgacatgcttttgagacagcccggcgactaagccatgacaatatggaggagaaagtgccctgggtatgtcccaggcctctggttctgccctcacctcttgtcatccctggaagcaacagccaggagcgatacatccaggctgagcgggagaagggcatccttcaggagctcttcctgaacaaggagagtcctcacgagcctgatcctgagccgtatgaacccattcctcccaaactcatccccttggatgaggagtgcgccatggatgagactccgtatgttgagaccctggagcctggagggtctggtggctcacctgatggagcaggaggctccaagctgcctccagttctggccaatcttatggggagcatgggagcagggaagagcccccagggccctggaggcggtggcatcaatgttcaggagatcctcacttccataatgggcagtccaaacaaccacccttcagaggagctgctgaaacagccagactactcagacaagctgaagcagatgctggtgccacatgggctcctaggtcctggtcctgtagccaatggcttcccaccaggaggccctgggggccccaagggtatgcagcatttcccccctggtcctggagggcccatgccaggtccccatggaggccctggtggaccagtgggtccacgtctcctgggtcccccaccaccttctcggggaggtgatccattctgggatggcccaggtgaccccatgcgaggtggcccaatgcgtgggggtccaggacctggtcctggaccataccacagaggccgagggggtcgtggaggaaatgaaccgccaccaccccctccattccgaggagccagaggaggtcgttctggaggaggccccccaaatggccgagggggtcctggtggaggtggcatggttggaggtggtgggcaccgcccccatgaaggccctggagggagcatgggcagtggacatcggtctcatgagggccctggagggagcatgggcagtggacatcggtctcatgaaggccctggacacgggggaccccatggccaccggccacatgacgtccctagccatcgaggccacgaccatcgagggccaccacctcatgaacaccgcggtcaygakggccatgggggaggcggccaccgagggcatgatggaggccacagtcacggaggagacatgtcaaaccgccctgtctgccgacacttcatgatgaagggcaactgccgctatgagaacaactgtgccttctaccacccaggggtcaacgggcccccactgccctaggcctgcctgccctacccgcacccctgtggactgcagctttgctccttccacttggttatggcttctgtgaggcccactttscttttccccagctgatgaggagccggccccctcagttcccacctggttgggtttctgggggtttctgattcctggtgtgcattgatgtacatattccctccagtctggagcggagaggagagagactggactgctgagacggctggcttcactttgtgaggagatttgccctgtgccccaaaccccttccagtattagccccgatgcctgagaacctgaagccggccaccctggagacctctgctctccacatgcacacggaactgagttggtcagctgcacttaggaaaccgtccaagctaagctcattatcttcacagggtgagggggtggtgaggggtaccatatatcccactgcactgagggctcaagctggctgaagctgagttctggaactaccccccacttgtgccccacatgggccagtcactgttgagtcctttctcaagaaggactgcaactgttacttcccaggtcatcgtgggtytgytaggttcagtgatggcacattcatatctgtgtccagtggaagttgtatctggcaraggggtgkcctgtagtgttggsccactmttgcytacasccattttmgagactcygtgagsccagytttcattamcykyavccskgtrkacygrgcytgwcsywhyacwtgywntssctktgkgaktgsvywskhtcyttaccccgtaaggagccytgtcaktgagryttcytgggtagactcagcaggakggsccyttcmcagtcctctcytccccctgtsttggcatcagttgttttctatgaaaacagtgggttggtyttgtrcaggstyttgggttagaaccaatggatttgaggagktttytmhwttgrywwtsyaymttttgtacmytwwtawtawacastggaargagaarmmrmwmawwwaaaaamaaaaaaaaaaaa

SEQ ID NO: 2731 - DNA, 4968 bp, Rattus norvegicus
ctgggagcatctaggtgctactcgagccgcaagggcgcatcgtacgatccccccggctcttcggtccctcggtggggatagcacctggagatagccccggacggggatggtcagcggctgcggccgtctgacacacgagcgggacacggcgagggcaccatggcgctaacgccccagcgcgggtcctcttcggggttgagccgaccagagctgtggctgctgctatgggcagccgcgtggcgcctgggggccacggcgtgccccgccctctgcacctgcaccggcactacagtggactgycacggcacgggtttgcaggccatycccaagaacatyccacggaacaccgagcgcctggaactcaatggtaacaatatcactyggatccataagaatgactttgctgggctcaagcagcttcgagtgttgcagctkatggagaaccmsattggagctgtggaacsgggagcttttgatgacatgaargarttggagcsgytmcractgaaccgcaaccagctgcaartgttgcctgaactactgttccagaacaaccaggctctgtccagactggacctgagtgagaattctctccaggctgtgcccagaaaggctttccgaggagccacagacctcaaaaatctacagctggacaagaaccagatcagctgcatcgaggaaggggccttccgtgccctacggggactggaggttctgaccctgaacaacaacaacatcaccaccatccctgtgtccagtttcaaccatatgcccaagcttcggaccttccggctgcactccaaccacctgttctgtgactgtcacctggcctggctctcgcagtggctgagacagaggcccaccatcgggctcttcacccagtgctctgggcccgccagccttcggggcctcaatgtggcagaggtgcaaaagagtgagttcagctgctcaggccagggggaggctgcacaagtacctgcctgcaccctctcatccggttcctgcccagccatgtgcagctgtagcaatggcatcgtggactgccgtggcaaaggcctcactgccatccctgctaaccttccggagacgatgaccgagatccgcctggagctgaacggtatcaaatccatcccaccaggagccttctctccctacagaaarctgcgcaggatagacctgagtaacaaccagattgctgagattgcacccgatgccttccaaggcctccgctccttgaattccctggtcctctatggcaacaagatcacagacttgccccgaggtgtatttggaggcctgtacaccctccagctgctgcttctgaatgccaacaagatcaactgcatccggcctgatgccttccaggacctgcagaacctctctctgctctccctatatgacaacaagatccagagtctcgccaagggcaccttcacctccctgcgggccatccagacactgcatctggcccagaaccctttcatctgtgactgtaacctcaagtggctggcagacttcttacgtaccaaccccattgagacaactggggcccgctgtgccagcccccggcgccttgccaacaagcgtatcgggcagatcaaaagcaagaagttccggtgctcagccaaagagcagtacttcattccagggacggaggattaccacctgaacagcgagtgtacgagtgacgtggcctgtccccacaagtgccgctgtgaggccagtgtggtggagtgctctggcctgaagctctctaagatccctgagcgaatcccccagtccacgactgagctacgactgaacaacaatgagatttcaatcctagaggccactgggttgtttaagaagctctcacatctgaagaaaataaacctgagcaacaacaaggtgtcagagattgaagacgggacgtttgaaggcgccacctccgtcagcgagctgcacctgaccgccaaccagctggagtctgtcagaagcggcatgttccggggtctagatggcttgyggascctgatgctgaggaacaaccgtatcagctgcatccacaatgacagcttcactgggctgcgtaacgtgcggctcctgtctctttacgacaaccacatcaccaccatctcccctggagccttcgacaccctccaggccctgtccacactaaacctcctggccaacccattcaactgcaactgccagttggcctggctgggggactggcttcggaagaggaaaattgtgacagggaaccctcgctgtcagaacccagacttcctgcggcagattcctctgcaagatgtggccttccctgacttcaggtgtgaggaaggccaggaggaggtgggctgcctgccccgcccacagtgcccccaagagtgcgcctgcctggacaccgtggtccggtgtagcaacaagcacctccaggctctgcycaagggcatccccaagaatgtcacagaactctacttggatgggaaccagttcacactggttccgggacagctgtctaccttcaagtatctgcagcttgtcgacctgagcaacaacaagatcagctccttaagcaactcttccttcaccaacatgagtcagctgaccacactgatcctcagctacaacgccctccagtgcatcccccctctggccttccaaggacttcgttcactgcgcttgctgtctttgcatggcaatgatgtctccaccctccaagagggaatctttgcagacgtgacgtctctgtctcacctggccattggtgccaaccccctgtactgcgactgccacctccgatggctctccagctgggtgaagactggctacaaggaacctggcattgcccgctgtgctggacccccagagatggagggcaaactgttgctcaccacacctgccaagaagtttgaatgccaaggtccccccagcctggcggttcaggccaagtgtgatccctgcttgtccarcccatgccagaatcagggcacttgtcacaatgaccctcttgaggtatacaggtgtacctgccccagtggctacaagggccgaaactgtgaggtgtctctggacagctgttccagcaacccatgtggaaatgggggaacctgccatgcccaggagggcgaggatgctggcttcacgtgctcctgtccttccggctttgaagggctgacgtgtggaatgaacacagatgattgtgtgaagcacgactgtgtcaatgggggtgtctgtgtggatggcatagggaattacacatgtcagtgccccctgcagtacacaggaagggcctgtgaacagctagtggacttctgctctccggatctgaacccatgtcagcatgaggcccaatgtgttggcaccccagaggggcccaggtgtgagtgtgtgccaggctacacgggtgacaattgcagcaaaaaccaggacgactgcaaggaccaccagtgtcagaacggggctcagtgtgtggatgagatcaacagctacgcctgtctctgtgctgagggctacagcggacagctctgtgagatcccacctgcccccaggaactcctgtgaagggactgagtgccagaatggagccaactgtgtagaccagggcagccggcccgtatgccagtgcctaccaggctttggaggtcccgaatgtgagaagttgctcagtgtcaactttgtggaccgggacacttacctgcagttcactgacctgcagaactggcctcgggccaacatcactcttcaggtctccacagcagaggacaatgggatcctcctctacaatggggataatgaccacattgcagttgagctgtaccagggccatgtccgtgttagctacgacccaggcagctaccccagctctgctatctacagtgctgaaacaatcaacgatgggcagttccacacagttragctggtgacctttgaccagatggtgaacctctycatcgatggtggmagccccatgaccatggacaactttggaaagcactacacactyaacagtgaggssccccyctmtgtgggagggatgcccgtggatgtgaactcagctgccttccgcctgtggcagatcctcaatggcaccagcttccacggttgcatccggaatctatacatcaacaacgaactgcaggacttcaccaagacacagatgaagccgggcgtggtgcccggctgcgagccctgccgaaaactctactgtctacatggcatttgccagcccaacgccaccccagggcccgtgtgccactgcgaggctggctgggggggcctgcactgtgaccagccagtggacggcccctgccatggccacaagtgtgtccatgggaaatgcgtgcccctcgatgcacttgcctacagctgccartgccaggatggrtactcgggggctctgtgcaaccaggtcggggctgtggcagagccctgtgggggcttacartgcctgcatggtcactgccaggcctcggycaccagaggggcacactgtgtgtgcagcccaggtttttcaggcgagctgtgtgagcaagagtccgagtgccggggggaccctgtccgggactttcaccgggtccagaggggctatgccatytgccagaccacgcgcccactgtcatgggtggaatgccggggcgcgtgcccgggccagggctgctgccagggcctgcggctgaagcggaggaagctcaccttcgagtgcagcgatgggacctcgtttgctgargaggtggagaagcccaccaagtgcggctgtgccccgtgtgcgtaacgtgcgggtggcacactakcagctgggctggggcgggcatcaccaggatakcgcttgggtcctggtgggcscggggacactgagctgcctttccagcggactgmactgccagggcagaggagcaaggcccgggttgccaagccctctcccaaagtgccttgcacarataggcgcttaataaatatttgttgartgmaaaaaaaaaaaaaaaaa

SEQ ID NO: 2732 - DNA, 1581 bp, Rattus norvegicus
ctcggatcgatagtttcccttgtttggtcccggaggcggctgatccgcggagtggcgtggacctcatgtagaaatgacagcaatggaaggggccagcgggtcgagttttggaatagacacgattttgtccggtgccggttccggcagtccgggcatgatgaacggagatttccgatcgctcggtgaagcgaggaccacggattttaggagccaggccaccccgtcaccctgttcggagattgataccgtgggaacggcgccctcttcaccgatctcggtcaccctggagcccccggagccgcatcttgtgacagacggaccccagcatcaccatcacctccaccacggccaacagccaccgccaccgtccgcgccccccgcgcaaagtttgcagccttctccccaacagcaaccgccgccgcagccgcagtctgcagcccagcaactgggctcggccgccgcggcccccaggacttccacctcttcctttttaattaaggacatcttgggagacagcaamcccctggcggcttgtgcaccctacagcaccagcgtttcttctcctcatcacaccccgaagcaggagtgcaacgcggcgcacgagagcttcaggccaaagctggagcaggaggacagcaaaaccaagctggacaagagggaagactctcagagcgacatcaaatgccacggaacaaaggaggaaggagaccgggagattacaagtagccgagagagtccccctgtgagagccaagaaacctcgaaaggccaggacagctttctcggaccaccagctcaatcaactggaacgtagctttgagcggcagaagtacctcagtgtacaggaccgmatggacctggcagctgcactcaacctcactgatacccaagtcaagacctggtaccagaaccgcagaaccaagtggaagcggcagactgcagtgggcctggagttgcttgccgaggcggggaactactccgcgctgcagaggatgtttccgtcgccttatttctaccacccaagcctgctggggagcatggacagcacgacggcggccgcggcggccgcggcaatgtacagcagcatgtaccgaactcctcctgcaccccatccgcagctgcagcggccactggtgccccgcgtgctcatccacggcctggggcctgggggacagccggccctcaaccctttgtccaaccccatcccaggcaccccgcatccccggtgaggaaggagggacagtgcagcccgagcagccctccaggtttccacccggccgccgacagctgccccacctctccccgcaccaaaccaacaggaatagaggcagacgagtaaagggggggagctcaccggtgggctgggtccccaaggaccggccagccctctgttctccatctgccccctcagaggcagggccgcaaagctccccaacagtgtgactggagaaaatactgaccccactgaaagtgcaaccagtaagtgaaaacacccacccacccacccacccacacacacacacaaaatgaaccctcgagttctttctttctttctttttttttttttttgaaaaaaaaaaaa

SEQ ID NO: 2733 - DNA, 2054 bp, Rattus norvegicus
tacccgtcaagacactcagccaccacaatacagaaatggcagccacaatgaggttcttccccattctgtgcctggtgctgttcttcagtcacggggtggcttcccgccaacgctcccattctaaggagaagaagaagtctaaagagtcctctgtgggtgctgtggggacttcccgaagcagagactttgccttcaggctctacagggccttggcttctgaagcccctggtcagaatgttttcttctcccccatgagcgtgtctatgagcttgggtatgctctccctggggtctggcttgaagactaaggcacagatcctggagggcctgggcctcagcctccagcaaggccaagaggatatgctccacaagggcttccaacagctgctgcagcagttcagccagcctagtgatggcctccagctgagcctaggcagtgccctttttacagacccagcagtacatatccgggaccactttctgagtgccatgaagacattgtacatgtcagacatgttctctaccaactttgggaaccctgaaagtgctaagaagcagatcaatgactatgtagccaagaagaccaacggcaagattgtagacttgatcaaggatcttgacagcacccacgtcatggtggtggtaaattatatcttcttcaaagccaagtggcagacggccttcagtagcaccaacacccacaagatggatttccatgtgactcccaagaagaccattcaggtgccaatgatgaaccgcgaagatatatattcctacatcctcgaccaaaacatttcctgcacggtggtggggatcccttaccaaggcaatacatttgctctgtttattcttcccagcgagggcaagatgaagcgggtagaggatggcctggatgagagaacgttgaggaactggcttaagatgttcacaaagagacagttagatctttacctccccaagttctccattgagggtacctataaactggaaaaaatcctccccaagctgggcatccaggacatcttcaccacccatgctgacttgtctggccttactgaccacaccaatattaagttgtctgagatggtacacaaatccatggtggaggtagacgagtcaggaacaacagcagctgcctccacaggaattctcttcacactcagatctgctcgaccgagctctctgaaggtagaattcaccagaccctttctggtggtcattatggatggtacaaacctctatttcattggcaaagtgattcagccctgaggtgggactccttctgaaactcacaggcctatacagaaggagccaggcatattctacagactatccacctcttggtagctagtgattttcatagagtagattgactaataaggtgttgtaagtgagaagatcaatatcctggtggaagcttccttgatcacagttgcaagatgtgctcttgctctattttttcattattgacactgatgctaaagaggccacttgattgctccaaggtcctatcaccatatttgtgacatagttatgcccagacctcagacctctcttgctcagtctagcgctacaaagctctgcaagaggctggtcagcatagataaaggccaccaggaagcacggttataaacctggtctcacacctattagcaccatsgkyrmgarrggacattggactgagattctgaaatggtgctaatagctatgtaactcgaaaatgaaaatgttcctctctgcctgtgtttctttgagtatccagtcaatgatcagaacaagtagcccattcagtgatctgtgaaattgttacacaagggttggctactctatgctagccatggttgatgtaagaactcagtttaatagcatacttgagcaatcagggtaaaagtgttccaccatgaacaaaggtatcaaatcacaaacctggctgactgcagttggatgttagaggtctgttgtaaatagtagaacatagattgcagactgacttgttgatttctactttggcaatagcaataaagcactttgcaarggaaaaaaaaaaaaaaaaaa

SEQ ID NO: 2734 - DNA, 3096 bp, Rattus norvegicus
cttgtcatgggggaggcggagaagttccactacatctacagctgtgacctggacatcaacgtgcagctgaagatagggagcttggaagggaagagagaacaaaagagctacaaagctgtcctagaagatcccatgctaaagttttccggactataccaagagacatgctctgatctgtatgtgacttgtcaagtttttgctgaagggaagcccttggccttgccagtcagaacatcctacaaaccatttagtacacgatggaattggaacgagtggctgaaactcccggtgaaataccctgacctgcccaggaacgcccaagtggccttgactatatgggatgtgtatggacccggaagggctgtgccggtgggaggaacaaccgtgtcactctttggaaaatatggcatgtttcgccaaggaatgcacgacttgaaagtctggcctaacgtggaggcagatggctccgaacccacacgaaccccgggcagaacaagcagcacactctcagaagaccagatgagccgccttgccaagcttaccaaggctcatcggcagggacacatggtgaaggtggattggttggacagactaacgtttagagagatagaaatgataaatgagagtgagaaacgaagctctaatttcatgtacttgatggttgagtttcgctgtgtcaaatgcgatgacaaggaatatggtattgtctactatgaaaaggatggtgacgaatcatctccaattttaacaagctttgagttagtgaaagttcctgatcctcaaatgtctatggagaacttagtggagagcaaacaccacaagcttgctcggagtttaagaagtggaccatctgaccacgatctcaaacccaacgctaccacaagagatcagctaaatattattgtgagctacccaccaaccaagcagctcacatatgaagaacaagatcttgtttggaaatttagatattatcttactaatcaagaaaaggctctgacaaagttcttgaagtgtgttaactgggacctaccccaggaggccaagcaggcgctggaacttctgggaaagtggaagccaatggatgtggaggattccctagagctgctctcctctcattacaccaaccccaccgtgcggcggtacgctgtggcccgcttgaggcaggccgatgacgaggatttgctgatgtacttgctgcagctggtccaggctctgaaatatgaaaactttgatgacataaagaacggtttggagcctaccaagaaggatagtcaagcttccgtgtcagagagcctgtcaagttctggagtcagttctgcagatatagatagctctcaaattataaccaaccctcttcctccggtggcctcccctcctcctgcatctaaatcaaaggaagtttctgatggggaaaacctagagcaggatctttgtaccttcttgatatcaagagcctgtaagaactcaacactggctaactatttatactggtatgtgatagtggagtgcgaagatcaggacacacagcagagggacccaaagactcacgagatgtacctgaacgtcatgaggcgcttcagccaagccctgctcaagggtgacaagtccgtgcgggtcatgcgctccctgctggcggcacagcagacctttgtagatcgcctggtgcatctgatgaaggcagtgcagagagaaagtgggaaccgcaagaagaagaatgagagacttcaagccttgcttggagataatgaaaaaatgaacttatcagatgtggagctgatcccattgccgttagagccacaggtgaaaatacggggaatcatcccggaaacagccacactgttcaagagtgctcttatgcctgcccagctgttcttcaagacagaagacggtggcaaataccctgtgatcttcaagcatggggacgacttgcgtcaagatcagcttatccttcagatcatctccctcatggacaagctgttgcggaaagaaaatctggatttgaaattgaccccttacaaggtgttagccacgagtacaaaacatggcttcatgcagttcatccagtcagttcccgtcgcsgamgwksttgacacggagggaagcattcagaactttttcaggaaatatgccccaagcgagactggacccaatggcatcagtgcagaggtcatggacacttacgttaagagctgtgctggctactgtgtgatcacctacatccttggggttggagaccggcacctggataaccttctgttaacaaagacaggcaaactcttccatatagatttcgggtatattctgggccgagatcccaagcctcttcctcctccaatgaagctgaataaggagatggtcgaagggatgggtggtacccagagtgagcagtaccaagagttcagaaagcagtgttacacggccttcctccacctgcgaaggtattcaaatctgattctgaacttgttctccttgatggttgatgcaaacattccagatattgctcttgmacsagrtaaaactgtaaaaaaggttcaggataagttccgtctggacctgtcagatgaggaggccgtgcattacatgcagagtctratcgacgaaagtgttcacgccctgttcgytgcggtgrtggagcaratccataagtttgcccagtactggagaaaatgaaagtggatttgacccatcgtgawgcctgacttagtaagaaaacacatgagaaaccactgctgtgtactgaggacattagagaaagaaccaggaagagaaggtgtccaggagttacggcatgctcaagcwttgtgccagtggacsccactgctgaaatccggccgagagggtttgtctaaagctgctgctgtagcgtaggcctcagatytgcaattccaaacctcagaggytgaagcatgaagagtaycacagttgtgaagccatcctcagctgcaaatgacttytgggttggacaaaaagcactgtatatttgttttataatgtataaagatggaraatggawwawrwawawrwwwwaagaattcaggggaagktytattakgaaacagtaaagcattttagcctytgaraaaaaaaaaaaaaaaa

SEQ ID NO: 2735 - DNA, 3269 bp, Rattus norvegicus
ggacaggattgacagattgatagctctttctcgattccgtgggtggtggtgcatggccgttcttagatggcggctcacctgtcatacgggcgagtgaacctgaacgtgctgcgcgaggcggtgcgtcgggagctgcgcgagtttctggacaagtgcgctgggagcaaggcaatagtgtgggatgaatacttaacaggaccgtttggactgattgcacagtactcactactaaaggaacatgaagtggaaaaaatgttcaccctcaaaggaagtcgtttgccagcggctgatgtcaagaatatcatttttttggtcagacccaggctagaattaatggatatgattgccgagaacgtactcagtgaggacaggcgtggccctaccagggatttccatattttatttgtgcctcgtcggagcctactgtgtgagcaaaggctgaaggacctgggtgtgttgggatcctttatttatcgagaggagtacagtttagatctcattccatttgatggggacctcttatccatggagtcagagagcgctttcaaagaatgctaccttgaaggcgaccagacaagcctgtaccacgcagccaaggggctgatgaccctgcaggcgctgtatggaactatcccccagatctttgggaaaggagagtgtgctcggcaagtggccaatatgatggtcaggatgaaaagggagtttacaggcagccaaaactcagtgttccccgtgtttgataacctcttactgcttgatcgcaacgtggatctgctgacgccgctcgcctcccagctcacgtacgaaggactcatcgacgagatttacggcattcagaacagttatgtgaagttacctccagagaaatttgcacccaagaagcagggcggtggtggcgggaaggaccttcccacagaggcaaagaagcttcagctcaactccgcagaggaactctatgccgagatccgagacaagaacttcaacgctgtgggctccgtgctcagcaagaargsgaakatcakctycgcggcckywraggagcgacacaatgctaagacggttggagagatcaagcaattcgtctcccagcttccccacatgcaggcggccagggggtcgcttgccaaccacacctcaattgcagagttaatcaaagacgtcaccacttctgaagacttctttgataagttgacggtggagcaggagttcatgtccgggatagacaccgataaggtcaacaattacatcgaggactgcattgcccaaargcacccgctcatcaaggtcctgagattggtttgcctccagtctrtgtgcaacagtgggctcaagcagaaggttctggactactacaaaagggaaattctccagacctacggctatgagcacatactgaccctgaacaacctggagaaggccggcctgctaaaggctcagacagggggcagaaacaactacccaacgattcrgaawrsmthrygcckmtkswtggacgatgtcaatgaacaaaaccccacagacatatcctacgtgtacagtggttacgcaccactcagcgtgcgactcgcccagctcctttctcggccaggttggaggagcatcgaggaggttctccgcattctcccagggccccactttgaagaaaggcagccactgcccaccggcgtgcagaagaaacgccagccaggagaaaacagagtcacactggtgtttttcctcgggggcgtcacctttgctgaaatcgcagccctgcgttttctctcccagctggaagacggaggcacagagtatgtaattgcgaccactaaactgataaatggaagcagctggctagaagctctcatggaaaagcctttctaggctgtcagaggggacagtgagctgcccctgagaacgtgttgcccaaaggacataaagccaggagcatggaggcaacgggattgtgttccttcctgctcctctctgtgctcctaaaccctgaagaagggagggtcggcctgggtaaggacacaatgagctgggcgtggcggctcatgcctagaactcctccacttaagagacacaggcaggaggatcgctgcaagtttgggacagctggggctacatagcgagttccaggcaaaagccctcccttccagaaataaaggagatcctgtttcggaatttttaagcttaaagtcttcattttctggaatagactgtggggatgatagccccagcagccacgcaactgtgcacgggcattaaaaaggagagctaaggggataaataagaaaatagaagcggaattctgaccactgactcacggtggcattttctagaccacctatcccaggagagtggttttgggttgaatacgaagccagcatcgtccatcgcgtgcttctccccgcagagcacatttgtgtctccagtctcggctgatgtgattcctcaggcaagctttgtttcctcctgagaatctgagaagcttgaaggagcttcttgacatgatgacgtttctgctgtctgcgttgactgcgtctgtgcagttctctgataaagagtgagctaagcgccaggcagcctctgccagctaaccttcggaggcacttctgggtgtgcacgttgttaactcaagactctctggtgtaggccgccccctgatgggacttctgtcttacctccgtgtcctctgtggttggttcttctgctccttcgagttcatgcagctgtctcagtggaaactgccacatgcacctctctagccctctgactgtactcatcttcacactcccctttacctggtcagtctggtgaccgagtgcacgcggtcagtgtcagtcacacagtgacagtgcctgtgctgcagggagcaggagcaggcatgttgctgccagtgtctgcctcctgatcatttccacatctgaaggagttaagagcgccaagtggcagaccaagttgatggttttctgtcatcacccaagtctccagaaaagctagctgattcagccggtctggtcctggcccaggtgaagtttctgtggttaatagtttcccaatataaagtggtggtgtctacattatgccctgtgatgtaagtccccttagtactcaaagctgcctttgtctcttaagagtatgctctgagaaagactgtgggaacggaaggcttattcttagacagggtggattgtttacgacatgtctggacttgttctgagtttgaggactattctgctacactggctgtcccaattaaagatcctattttctgtctcaaaaaaaaa

SEQ ID NO: 2736 - DNA, 5731 bp, Rattus norvegicus
gagctctgacgccgcccccgcccctccgcctccacgcctcgctccccgggaggggcgcagacccgcgcgcccggggccggggccgcctccggagcgccgcgatccgccttttctttccttttttttcccttcccttcttcccttttaaattttggttggtggcggcagtgctgggccggaggaaagaagggacacggagtcctccctcgctcagccaccccctccccgcttccccctgggccgggctccgggagatgtgccgggcggggggcccggcttcgcggagccgcgggaggagcgcgcacggccgaccccgaagcgccgctggacaggctggtgggccaggmmttggkaccctggtgatgcggggcaaggccccccccacagtccgctgagatcaccgtgcccgcccctggccttcgccatggcccgcttggctgcagcactctggagtctctgtgtgacgactgtcctcgtcacctctgctacccaaggcctgagccgggctggactcccatttggattgatgcgccgggagctagcatgcgaaggctaccccattgagctgcggtgcccgggcagtgacgtcatcatggtggagaatgcaaactatgggcgcacagatgacaagatctgcgatgccgacccttttcagatggagaacgtgcagtgctacctgcctgacgccttcaaaatcatgtcacagagatgtaataaccgaacccagtgtgtggtggtggccggctctgacgcctttcctgacccctgtcctggaacctacaagtacctggaggtgcagtacgactgtgtcccttacaaagtggagcagaaagtcttcgtgtgcccagggacactgcagaaggtgctggagcccacctccacacatgaatcggagcaccagtctggcgcatggtgcaaggacccactgcaggcaggtgaccgtatctacgttatgccctggatcccctaccgcacggacacactgaccgagtatgcttcctgggaggactatgtggctgcacgccacaccaccacgtacagactgcccaaccgtgtagatggcactggctttgtggtatatgatggtgccgtcttctataacaaggaacgtactcgcaacattgtcaaatatgacctgcggacccgcatcaagagcggagaaacagtcataaacacagccaactaccacgacacctcaccttatcgctggggaggcaaaaccgacattgacctggcagtggatgagaacgggctgtgggtcatctatgccaccgaggggaacaacgggcgtctggtggtgagccagctcaacccctacacactgcgtttcgagggcacctgggaaacaggctatgacaagcgctcagcctccaatgccttcatggtgtgtggtgtcctctatgtgctgcgctctgtttatgtggatgacgacagtgaggcagcaggcaaccgcgtggactatgcctttaacaccaatgcaaaccgagaggagcccgtcagtctcgccttccccaacccctaccagtttgtatcttctgttgactacaatccccgggacaaccagctgtatgtgtggaacaactatttcgtggtgcgctacagcctggagtttggacccccagatcccagtgctggcccagccacttccccacctctcagtaccaccaccacagctcggcctacgcccctcaccagcacagcctcacctgcagccaccactccactccgccgggcgcccctcaccacgcacccagtaggtgccatcaaccagctgggacctgacctgcctccagccacagccccagcacccagtacccggcggcctccagcccccaatctgcatgtgtcccctgagctcttctgtgaaccccgagaggtccggcgggtccagtggccagctacccagcagggtatgctggtagagagaccttgccccaagggaactcgaggaattgcctcgttccagtgcctcccagctctggggctctggaatcctcggggccctgacctcagcaactgcacttccccctgggtcaaccaagtcgcccagaagatcaagagtggagagaatgcagccaacattgctagtgagctggcccgccacacgcggggctccatctatgctggggacgtgtcctcatcggtgaagctgatggagcaactgctagatatcctggatgcccagctccaggccctacggcccattgaacgagagtcagctggcaagaactacaataagatgcacaagcgagagagaacctgcaaggactatatcaaggctgtggtggagacagtggacaacctgcttcggccagaggcacttgagtcatggaaagacatgaatgccaccgaacaggtccatacggccaccatgctcctagatgtcttagaggagggtgccttcctgctggccgacaatgtcagagaacctgctcgcttcttggctgccaagcagaatgtggtcctggaggtcactgtcctgagcacagagggtcaagtgcaggagttggtgttcccccaggagtatgccagtgagagctccattcagctgtccgccaacaccatcaagcagaacagccgcaatggtgtggtgaaggttgtcttcattctctacaacaacctgggcctcttcttgtccacggagaatgccacagtgaagctggcaggtgaggcagggaccggtggccctggaggtgcctccctggtggttaactcacaggtcatcgcagcatccatcaataaggagtccagccgtgtcttcctcatggaccctgtcatctttactgtggcccacttggaggccaagaaccacttcaatgcaaactgctccttctggaactactcagagcgctccatgctgggctactggtcaacccagggctgccgactggtggagtccaataagacccataccacatgtgcctgcagccacctcaccaacttcgcagtgctcatggctcaccgagagatctaccaaggccgtattaatgagctgttgctgtcagtcatcacctgggttggcattgtcatctccctggtctgtctggctatctgcatctccaccttctgcttcctgcggggcctgcagaccgaccgcaacaccatccacaagaacctgtgcatcaacctcttccttgcagagctgctcttcctggttggaatagacaaaactcagtatgaggtcgcctgccctatctttgcgggcctgctgcactacttcttcctggccgccttctcctggctgtgcctagagggcgtgcacctctacctcctgctggtcgaggtgttcgagagcgaatattcacgcaccaagtactattacctgggcggctactgcttcccagccctggtggtaggcatcgcagccgccattgactaccgaagctacggcactgagaaggcctgctggctgagggtggataactatttcatctggagcttcattgggcccgtctcctttgttattgtggtgaacctggtgttcctcatggtgaccctgcacaagatgatccgaagctcatccgtgctcaagcctgactccagccgccttgacaacatcaagtcctgggcgctgggtgccattgcactgctcttcctgctgggcctcacctgggctttcggcctcctcttcatcaacaaggagtcagtagtaatggcttacctcttcacaaccttcaacgccttccagggggtcttcatctttgtctttcactgcgccttacagaaaaaggtgcacaaggagtacagcaagtgcctgcgtcactcctactgctgcattcgctccccacctgggggggctcacggctcccttaagacctcagccatgcgaagtaacacccgctactacacagggacccagagccgaatccggaggatgtggaatgacaccgtgaggaagcagacagagtcgtcctttatggcaggggacatcaacagcacccccaccctgaaccgaggtaccatggggaaccacctactgaccaaccctgtgctacagccccgtgggggcactagcccatacaatacactcattgcagagtctgtgggcttcaatccctcctcgcccccagtcttcaactccccaggaagctacagggaacctaagcaccccttgggcggccgggaagcctgtggcatggacacactgccccttaatggcaacttcaacaacagctactccttgcgaagtggtgatttccctccgggggatgggggtcctgagccaccccgaggccgaaacctagcggatgctgcggcctttgagaagatgatcatctcagagctggtgcacaacaaccttcggggggccagtgggggcgccaaaggtcctccaccagagcctcctgtgccacccgtgccaggagtcagtgaggacgaggctggtgggcctgggggtgctgaccgggctgagattgaacttctctacaaggccctggaggagccactgctgctgccccgggcccagtcggtgctgtaccagagtgatctggatgagtcggagagctgtacggcagaggatggggccaccagccggcccctctcctcccctcccggccgggactccctctatgccagcggggccaacctgcgggactcgccctcctacccggacagcagccccgaagggcctaatgaggccctgccccctcccccacctgctccccctgggcccccagaaatctactacacctctcgcccgccggccctggtggctcggaatcccctacagggctactaccaggtgcggcggcccagccatgagggctacctggcagcccccagccttgaggggccagggcccgatggggatgggcaaatgcagttggtcactagtctctgaggggcctcatggaccagaggcctggccagggagggaatccaggaggggctctggtgggagcagagactgatggaggcagtggctggtgggccactctctccaggtgcccctctgcctgtgggccccacagtccccttggggactatgacctgggccccaggtgccagggttagtagacagggtttccaccagccacaagccccagcytctttaggggagtgcattgaggagaagcccccagggccctaggagtgagggagaagctggtaggtgtgaccaacgtccaaagctccctccctttggagggagaaagcaagggataaggcttccctaggtgtacaggggtggccacttttgaggtggccgaagccttgcaggatacaccctatctgctgctcactcttcttcgtccaccagaaaggagcagtgggacagatggacagggtccttccatgctacagttccttgcttcttggagactgggcctwacatcctgagagagcccaggcccaggggatggatggggttgtgagggctggtggttaatggtggaactttctctgaagctcctttctcccttgctattggtccctatctcccgagcaagcctaccctaaacccccagagtgcacccaatgaccccctcccttggggtgactcctgatgaagcacaactccccgcagggccccaacccactgcagtggccatatttgggcagttcccagtcctgtgggytgggctatytggggrgcagatgtggggtctggggctccctgrggagtgggtcctgggwttggatctttccctagggggtcctytwacccttctcttcctcccctattgctgtaaatrtttcamcaaaawrraaaarraaaaaaaaaagacaaaaa

SEQ ID NO: 2737 - DNA, 1957 bp, Rattus norvegicus
ggctaggctgtgccttccagccaaagtcccrgsrygagcagaacaggccgctggcctggaagccaagctggctgccatttgcgtactgagaggtgggggaccctgggcaggaagctggctgagcaccaagagctcgggggccatgggcggggagctggtgactggcctgggggccctgagacggagaaagcgcctgctggagcaggagaagagggtggccggctgggcactggtactggcgggaactggcatcggactcatggtgctgcacgctgagatgttgtggttcctgggttgcaagtgggtgctgtacctgctcttggttaagtgtttaatcacgctgtccactgccttcctcctttgtcttattgtggtcttccatgccaaggaggtccagctgttcatgactgacaacgggctccgggactggcgcgtggcgctgacccggcggcaggtggcgcaratcctgctggagctgctggtatgcggggtgcacccggtgcccctacggagcccgcactgcaccctggcgggggaggccacagactcacaggcctggccgggcttcctgggcgaaggcgargcgttgctgtccctggccatgctgctacgtctctacctggtgcctcgcgcggtacttctgcgtagcggggtcctgctcaacgcgtcttaccgcagcatcggggcgctcaaccaagtccgattccgccactggttcgtggccaaactatacatgaacacgcacccgggtcgcctgcttctgggcctcacgctgggcytctggctcaccacagcttgggtgctgtctgtggctgagaggcaggctgtcaatgccacgggacacctcacagacacactgtggctgatacccatcacgttcctgaccattggctatggggacgtcgtacctggcaccctatggggcaagattgtctgcttgtgcaccggagtcatgggggtctgctgcacggctctactaktggctgtggtggcccggaagctggagttcaacaaggcggagaaacacgtgcacaacttcatgatggacatccattatgccaaagagatgaaggagtcggccgctcggctgctgcaggaagcctggatgtactacaaacacactcgaaggaaggactcccgagcggctcgcaggcatcagcgcaagatgctggctgccatccacacgttccgccaggtacggctgaaacatcggaagctccgggaacaagtgaattccatggtggacatctccaagatgcacatgatcctgtgcgacctgcagctcgggctcagcgcctcgcaccttgccctggagaagagaatcsatgggctggcarggaagctggatgccctgactgaactgctcagtwctgccctgcagcagcagcagccgccagaacccatccaggargccacatagctgcctgttatcgatctacattctactcaggacccacagaagaatcaggctatgtaccgaaggactgagctcaaggacatcctccctgcstattctgaccaagccccatgaataaatcacctcaagatgccaggrcacargtggatccacgttgagatgcatggactctggtggtggcagccatgagtggacactggcttggacctcccatggcagtggggttactatggtcaccastacacataggccatcatcaaaagtcctttctgctgtgctgctgctgttcatgacccctcaagctctgttggaagaggaggtgcccggggtccaagatgctaggaagaagcttcagtcaccgcaggccggcctcgctgaaggaaccaggtccgagcggcgggaggtgctgccccmtggtggacgctgcttcccccagaatgcggaaactgcgcgggagtarggtgcggggtgccgctcaccaatccacsmatymyactttgtaataaatggtaarcaaagmmaaaaaaaaaaaaaaaaaaa

SEQ ID NO: 2738 - DNA, 1837 bp, Rattus norvegicus
atgctcgccaccgcgggctctctgatagccacgatctgggcagcgctccatctcaggactctgctggtggctgcactcaccttcctactcctggctgactacttcaaaacccggcgccccaagaactatcccccggggccttggggtctcccattcgtgggcaacatattccagttggactttgggcagccccacctctcaatccagccgtttgtgaagaaatatgggaatatttttagcctgaatcttggtgacataacatccgtggtcataactggactgcccttaatcaaagaaacctttactcacatagaacaaaacattttgaatcgccctctcagtgttatgcaagaacgcatcaccaataaaaatggattgatcttctccagtggtcagacatggaaggagcaaagaaggtttgccctgatgacactcaggaattttggcttgggaaagaagagcttagagcagcgcatgcaggaggaggcccactacctcgtggaagccataagagaggagaaaggaaaacctttcaaccctcacttcagtatcaacaatgcagtttccaatatcatttgctctgtcacctttggggagcgctttgagtaccatgacagtagatttcaggagatgctgaggttgctggatgaggtcatgtatttggagacaacaatgataagccagctctataatatttttccatggataatgaagtatattcctggatcacatcaaacagttttcagaaactgggaaaaactgaaattgtttgtctcttctatgatcgatgatcaccggaaagactggaaccctgaggagccaagagacttcattgatgctttcctcaaggaaatgtcaaagtacccagagaagactacaagtttcaatgaagaaaacctcatctgcagcaccctggacctcttctttgcgggaacagagacaacatccactacactgcgctgggctctgctctacatggccctctacccagaagtgcaagaaaaagtacaggcagagattgacagagtcattggccagaagagggcagcaagcctggccgatcgagaatccatgccctataccaatgccgtcatccatgaggtgcagaggatgggcaacatcatccccctgaatgttcccagggaagtagcaatggataccactttgaatggattccacctgccaaagggtaccatggttctaaccaacctaaytgcaytgcacagggacccaaaagagtgggccaccccagatgtgttcaacccagagcactttttggagaatggacagtttaagaagagagaatcttttctgccattctcaatgggaaagagagcttgccttggagaacaactggccaggtctgaactgttcattttctycacttctcttatgcaaaaatttaccttyaagccmccaaccaatgagaagctgagcctgaagttcagaaatggcctcacactttctccagtcacgcaccgcatctgtgctgtccctagagaatgatgctggagaagcaaagagaaaaaggaagatgtggtgtatgccctraagcatctgggcttgctcaagtgagaggagaaggtgtyacrgaatgaatgtgattcgagcaatattgaagaaatttgacttagaaaattgaagcaaactcctagaatgatggcctcttgatttggtggtgggcacatcacttatgagctcagtggcgtgcctttgcatctaaaagttaggaggacaatggtgattcttcctataaayaaggtggaktagtgaatttaaaatgaattaaacatcaaaattaaaactataattattattttaaaarwaaaaaaaaaaa

SEQ ID NO: 2739 - DNA, 2344 bp, Rattus norvegicus
atgagccggggcgcgggcgcgcttcagcgccggacaacgacctacctcatctcgctgaccctggtcaagctcgagtcggtacctccgccgccgccttctccgtctgcagctgcggtcggcgcccctggggccagaggctcggagccccgagatcctggcagcccccgaggcgcggaggaacccggcaagaagcggcacgagcgtctcttccaccggcaggatgcgctgtggatcagtaccagcagcgcgggcgccgggggcgcggagccccccgcgctgtccccggctccggccagtccggctcgcccggtctccccggctccgggccgccgactgtccctctgggccgcccctccgggacccccgctctccggggggctgagcccggactccaagccggggggcgccccctcttcctctcggcgccctctactcagcagcccgagctgggggggtccggaacctgaaggccggacgggtggcggcgtcccgggctcgtcctccccgcatcctggcaccggtagccgaaggctcaaggtggcgcctcctccgccagctcccaagcctttcaagaccgtgaccactagtggagccaaagccggcgggggcaagggcgcgggtagccgcctgtcatggcccgaaagcgagggcaaacccagggtcaaggggtcaaagagcaccgccgggactggagcctctgccgttgcggccggcgggggagggagcgctgcagtcacgacctctggtggggtcggtgctggggctggagcgagaggaaaattgtcccctcggaaaggcaagagtaagaccttggacaatagtgacttgcacccaggacccagtgccggttctcctccgctcaccgtgccagcaatcccagttccagctacttctgtcactgccgcctccacgcagcccctcgggcctgcaccccctatcactctggagccaccagctccggggctaaaaaggggccgggagggcggccgagcgtccactcgtgaccgcaagatgctcaagtttatcagcggtatcttcaccaagagcacaggagggcctcccggtcccgggccccttcccggaccccaaggcttgtcttccagcagcgggtccagggagctgctgggcgcagagctacgcgcctcccctaaggctgtggtcaatagtcaggaatggactttgagccgatcaattcccgaactgcgcctgggtgtgctgggtgatgtcaggagtgggaagtcatccctcatccacagattcctcacgggttcataccaggtgctggagaagcctgagagtgagcagtacaagaaggagatgctggtggatgggcagacccatctggtgctgatccgagaggaagcaggggcaccggatgccaagttctcaggctgggcagatgctgtgatcttcgtcttcagcctggaggatgagagcagcttccaggctgtgagccatctccatgggcagctgatctccctccggggggagggacgaggaggtctggcccttgccctggttgggacccaagacaggatcagcgcatcgtcccctcgagtggtgggtgatgctcgagcccgggcattgtgtaccgacatgaagcgctgcagctactatgagacctgtgcaacctatgggctcaatgtggaccgggtcttccaggaggtggcccagaaggtggtgaccttgcgcaaacagcagcaactcctggcggcttgcaagtccctgcccagctcaccgagccattcagctgcttctactcctgtagctgggcaggctagtaatgggggccacactagcgactactcttcttccctcccatcttcacccaatgttggacaccgggagctccgggctgaggcagctgcggtggctggswygagsaccccagggtccttacatcgagcagccaagcggcggaccagcctttttgcgaaccgtcgaggcagtgattctgagaaacggagcttagacagtcggggcgagacaacagggagtgggcgagccatccccattaaacagagtttcytgctaaagcgaagtggcaattccttgaacaaagagtggaagaagaaatacgtgaccttgtccagcaatggctttytgctctaccaccctagcattaatgattacatccacagtacacacggcaaagagatggacttgttacgaacaacagtcaaagtcccaggcaagcggcccccaagggctatctctgctttcggcccctcagccagcatcaatgggttggtcaggatatgagcactgtccaratgggtgaaggscctgaagcctcaactccaatgccaagccccagtcccarccccagctccctgcagctccc

SEQ ID NO: 2740 - DNA, 3000 bp, Rattus norvegicus
tcgtgccaggcaccgctgagatgttgcctaaagttctcctgatgctcctcaacatgttcctggccctccagtggagggttggacctcacattaaactggagaataaaccccctgcccaagataaggtagtctttggccctcagcctcagcctgtgccacaacctctgattccgcctgaatctcctgctggagatgatgtagtcttcgactctcagccccagccccagtcggaatcccctggccatgatgatgtctttagctcccagccccagcctctgccccagccccagcctctgccggagccccagcctctgccggagcctgagccacagccgcagccacagccacagccgcagccgcagccacagcccctggctgggcgccagcctctgccccagcccctgccttggcccctgcctcagcctcagcccgaaccggagccccagccggagccccagccggagccccagcctgagccccagccggagccccagcctgagccccaaccagaaccccagccagaaccccagcctcaacctcagcctctggctgggcgccagcctttgccttggcccctgccactgcccctgcccgagccccaacctgatccccagcctgatccccaaccggagcctcagccagaaccccaacctgagccccagcctcagccccagaccccaggccaggtccaggctgggcgccaaccccgccccaaacctcagcctgatccccatccccatccgcagcctgaacctcagcctgagccacgtctccatccctttcaccgtctccgtctccgtccccatccctatcctgagccccatccaggaccccagccggagcctgagcctgagcctgagccggagccccagccggagccccagccggagccccagccggagccccaaccggagcctgagccccagccggagccggagccggagcctgagcctgagcctgagcctgagcctgagcccgagcccgagcccgagcccgagcctgagcctgagcctgagcctgagcctgagcctgagcctgagcctgagccccagccggagccggagccggagccggagccggagcccgaacctgagcccgagcccgagcccgagcccgagcctcagccagagccccagccagaacctgagcctgagcccgagccccagcccgagccccagcccgagcccgagcccgagcccgagcccgagcccgagcccgagcccgaacctgaacctgagcctcagccggagccccagcctgagcctgagccccagcctgagccccagccagatcctgagcctcagcctgagcccggacctgaacctggacctgaacctgaacctgagcctcagctggagccccagccagagcctgagcctgagccacagccggagcctgagtcggagctggacctggagccggaaccagagccccagcccctgccggagccccagcctgagcctgagcctgagcctgagccggagccggagccggagccggagccggagccggagccggagccggagccggagccggagcctgagccagaaccggagccagagctggaactggagccccagtcccagctggagcctcagcctagtggaaagaagcttccagcaagagaaacagaactcactgctgatcatacaactgaacgcccacgtggaaaactgacaagagcttctcaaatccttaacaccatcctgagcaactacgaccataaactgcgccctagcattggagagaagcctaccgtggtcactgttaaagtctttgtcaacagcctcggacctatttccatcctagacatggaatattccattgacatcatcttctaccagacctggtatgatgagcgtcttcgttacaatgacacctttgagacacttattctacatggcaacgtggtgagccagttgtggatcccggatactttttttaggaattctaagaggacccaagagtatgatatcaccatacccaaccagatggctctcatccataaggatggaaaagtgttgtacacagttaggatgaccattgatgcaagatgctcactccacatgctcaattttccaatggattctcactcttgccctctgtctttctctagcttttcctatgatgagcatgagatgatatacaagtgggagaatttcaaactcaaaatcgatgcgaagaacacttggaagctattggagtttgattttacaggagtgaacaacaaaactgaaatcatctccaccccagttggtgacttcatggtcatgacattcttcttcaatgtaagcaggaggtttggcttcattgtctttcaaaactatatcccttcatctgttaccacaatgctttcctgggtgtccttctggatcaagatagaagctgctgctgccagggcctctgtaggggtcagttctgtgctcaccatggccacactgggtaccttttctcgtaagaatttccctcgtgtctcctatctcacagctttggacttctatattgcaatttgtttcgtcttgtgcttctgtactctactagagttcactgtgctcaacttcctgacctacaataatattgaacgacaggcttctccaaagttctaccaatttccaaccaatagccgtgctaatgcacgtactcgtgctcgtgcccgcactcgtgctcgtgctcgtgcccgtgctcgtcagcagcaggaagtgtttgtgtgtgagattgttacctatgaggaaaatgctgaagagggttaccagtggtctccaagatcaagaagacctcagtgtccctggaggcgatgtggccgaagctatgtgtgcttcagggttctcaggaagtatttctgcatggttcctggttgtgagggcaacagctggcagcggggccgcatctgcatccacgtttatcgcctggataactactcgcgggtgcttttccccattacattcttcttctttaatgtggtctactgggtgatttgccttaacctgtaggctccagctg

SEQ ID NO: 2741 - DNA, 1854 bp, Rattus norvegicus
tcagctagtattttcccgcttatctttctcccgggctccccacgagccacttcaaggctcgtccatcgtcccaaattcttccgttggtctgtttaaccggcgagttgtaaatcttgaagactttattattttattttgattcttttcatttcatcccccctgtgggcaacggagcaatgaaatttccaatcgagacgccaagaaagcaggtgaactgggatcctaaagtggccgtgcctgcagcagccccaccagtgtgccagcccaagagtgccactaacgggcaccatcctgttcctcgactctccatttcctccagagccacggtggtagccaggatggaaggcgcctcccagggaggcctgcaaacagttatgaaatggaaaacagtggttgccatctttgtggtggtcgtggtctacctcgtcaccggtggccttgtcttccgggcattggaacagccctttgagagcagtcagaagaacacaattgccttggagaaggcagaattcttgagagatcatatctgtgtgagcccccaggaactggagacactgatccagcacgcacttgatgctgataatgcaggggtcagcccggtaggaaactcctccaacagcagcagtcactgggacctcggaagtgccttcttctttgctgggacggtcatcacgaccatagggtatgggaatattgctccgagtactgaaggaggcaaaatcttttgtattttatacgccatctttgggatcccgctcttcggtttcttattggctggaattggagaccaacttggaaccatctttggcaaaagcattgcaagagtggaaaaggttttccgaaaaaagcaagtgagtcagaccaagatccgggtcatctcaactattcttttcatcttggctggctgcatcgtgtttgtgacgatccctgctgtcatctttaaatacatagagggctggaccgccttggagtccatctactttgtggtagtcactctgaccacagtgggctttggtgattttgtggcagggggaaatgctggcatcaattaccgagaatggtacaagccgctggtgtggttttggatccttgttggccttgcctactttgcagctgtcctcagtatgattggagactggctgcgagttttatccaaaaagacaaaagaagaggtgggtgagatcaaagcccatgcagctgaatggaaggctaatgtcactgctgagttccgggagacgagacgacggctcagcgttgagatccatgacaagctgcaacgggcagccaccatccgaagtatggagcgccggagactgggattggaccagagggcccactcactggacatgctttcccccgagaagcgctctgtctttgcagccctggacacaggccgtttcaaggcctcatcccaggagagtatcaacaacagacccaataacctacgccttaaggggccagaacagctcaacaaacacgggcagggcgcttctgaggacaacatcatcaacaagtttgggtccacctccaaactcacaaagaggaaaaacaaagatctcaaaaagaccttacctgaggatgttcagaaaatctacaaaaccttccggaattactctctggatgaagagaagaaagaggacgagacagagaagatgtgtaactcagacaactccagcacagccatgctgacagagtgcatacagcagcaagctgagatggagaatggaatggtacccatggacaccaaagaccaggggctggagaacaattctttacttgaagacagaaactaaatgttaaagacactggagctggactaaagtgtggcttgttttggttggtcttggtttgttt

SEQ ID NO: 2742 - DNA, 1165 bp, Rattus norvegicus
atggcgaacgctagtgagccgggcggcggcggcggcggggccgaggctgccgcgctgggcctcaggctggccacactcagcctgctgctgtgcgtgagcctggcgggcaacgtgctgttcgctctgctcatcgtgagggagcgcagcctgcaccgcgcgccttactacctgctgctcgacctgtgcctggccgacgggctgcgcgcgctcgcctgtctcccggccgtcatgctggctgcgcggcgcgcggcagccgcggcggggacgcctccgggtgcgctgggctgcaagctgctggccttcctggccgcgctcttctgcttccacgcggccttcctgctgctgggcgtgggcgtcacccgctacctggccatcgctcaccaccgcttctatgccgagcgcctggccggctggccgtgcgccgcgatgctggtgtgcgccgcctgggcgctggctttggccgcggccttcccgccggtgctggacggcggtggcgcggacgacgaggatgcgccgtgcgccctggagcagcggcccgacggcgccccgggtgcgctaggcttcctgctgctcctggccgcggtggtgggcgccacgcacctcgtctaccttcgcctgctcttcttmatccacgaccgccgcaagatgcggcccgcacgcctggtgcccgccgtcagccacgactggaccttccacggcccgggcgccaccggtcaagcggccgccaactggacggcggkcttcggccgcgggcccacgccacctgcgctcgtgggcatcaggcctgcaggcccgggccgcggagcccggcgcctcctggtgctggaggaattcaagacggagaagaggctgtgcaagatgttctacgccatcacgctgctcttcctgctcctctgggggccctatgtggttgccagttacctgcgcgtcctggtgcggcccggagctgtcccgcaggcctacctgacagcctcggtgtggctgacattcgcacaggccggcatcaaccccgtggtgtgtttcctcttcaaccgggagctgagggactgtttcagagcccagttcccctgttgccagagcccccaggccacgcaggccaccctcccctgcgacctgaaaggcattggtttgtgaagcgagctctgccacccaggctccctctggg

SEQ ID NO: 2743 - DNA, 1239 bp, Rattus norvegicus
atgctctccccaaatgcttcaacgggcctcttgtcctgcaatgacagtgagttcaaggagcactttgaccttgaggacctgaaccttactcatgaggacctgaggctgaagtacttggggccacagcaggtaaaacaatttttgcccatctgtgtcacgtacctgttgatcttcgtagtgggcactctgggcaacgggttgacctgcaccgtcatcctgcgccagaaggcaatgcacacgcccaccaacttctacctcttcagtctcgcggtgtccgatttgctggtgctcctggtgggcttgcccctggaactttatgagatgcagcacaattacccattccagctgggtgcaggtggctgttacttccggatactgcttttggagactgtctgcctggcttcagtgctcaatgtcacagccctaagtgtggagcgttatgtggccgtggtgcacccactccaagccaagtctgtgatgacacggacccatgtgcgccgcatgttgggagccatctgggtcttcgctattctcttctctctgcccaacaccagcttacatggcctcagtccactctatgtaccctgccgggggccggtgcccgattcagttacgtgtacgctggtgcgtccccagttcttctacaagttggtaatacagacgaccatactgctcttcttctgtctgcccatggtcaccatcagtgtgctgtacctgctcattgggctgaggctgcggagggagaggatrttgctccaagaggaggtcaagggcaggatatctgcagcagccaggcaggcctcccacagaagtattcagcttcgagatagggaacgcagacaggtgaccaagatgctaattgctctggttatagtatttggcacctgctgggttccattccatgctgaccgtctcatgtggagtatggtgtcccattggactgacggcctgcgcctggccttccagtctgtgcaccttgcttctggtgtcttcttgtacctcggctcagcggctaacccggwgctctacaacctcatgtccactcgcttccgagagtccttccgggaaaccctgggccttgggacacggtgctgtcatcgccaccaaccgcgtcacgactcccatagccaccttaggttgaccacagtcagcaccctgtgtgacaggaacagcagggatgtacccctggctgagaacagggatccagggtgtgagcaagagacagaccctcctgaataa

SEQ ID NO: 2744 - DNA, 1572 bp, Rattus norvegicus
ctctctctgcaagtgaccctgaggccaccaagatgagcacctcggccgggcctgtgagcgtacccgggtgtcaatagccgggagccaaggggccaccaggcgcaatggtgtactaggccgggcgcgagctcaggtttcgcactcggatctcacggcagagtcaccgtggagaggccagggtaccacaaacttatggattttgacaagaaaggagggaagggggagttggaggagggcaggagaatgtccaaaaccggcacgaatcggagcaaccacggcgtccgcaattcggggaccagctcaggsgkcmygakggtgggccccaacttccgagtcggcaagaagataggctgtgggaatttcggggassttcgcctaggaaagaacctgtatacaaatgagtacgtggctatcaaactggagcccatcaagtcccgggccscgcagctgcatctggagtaccgcttctacaagcagctcagcaccacaggtgtccctcaggtctactacttcggcccttgcgggaagtacaacgccatggtgctggagctgctggggcccagcctggaggacctgttcgacctgtgcgaccgcaccttcacgctaaagacggtgctgatgatcgccatccagctgatcacgcgcatggagtatgtgcataccaagagcctcatctaccgcgacgtgaagcctgagaacttcctggttgggcggccgggcagcaagcggcagcactccatccacatcatcgactttggcctggccaaggagtacatcgaccctgagaccaagaagcacatcccgtaccgcgagcacaagagcctgacgggcacggcgcgctacatgagcatcaacacgcacctgggcaaggagcagagccgccgggacgacctggaagcgctagggcacatgttcatgtacttcctacgcggcagtctgccctggcaggggctcaaggcggacacgctgaaggaacgctaccagaagattggtgataccaagcgtgccacgccaatcgaggtgctgtgtgagagcttcccggaggagatggccacctacttgcgctatgtgcggcgcctagacttctttgagaagccagactacgactacctgaggaagctcttcaccgacctcttcgaccgcagcggctacgtgtttgactacgagtatgactgggccggcaagcccctgccgacacctatcggcaccgtccatcctgatgtgccctcccagccgccacatcgtgacaaagctcagctccacaccaagaaccaggcgctgaactccaccaatggagagctgaacacagacgaccccaccgcgggccactccaacgcccccatcgcggcccctgcagaagtagaggtggcggatgaaaccaagtgctgctgcttcttcaagaggaggaagagaaaatcgctgcagcgacataagtgagggactttggcggaaatctctacacccgtgtctcgtcatccccttcgagagcattaactatttaaaaccaggagagaagccgtgcgccgtccctcgtgcgcccctgttagctctaaagtccagcttgtcccctca

SEQ ID NO: 2745 - DNA, 1040 bp, Rattus norvegicus
cgaggagagtggggggcgatggcgaagctcagggtgtcttacgagtacacggaagccgaagacaagagcatccggctcggcttgttcctcatcgtctctggcatcctgtcgctcttcatcttcggcttctgctggctcagtcccgccttgcaggatctgcaagccacggcggccaactgcacggtgctgtcggtgcagcagatcggcgaggtgttcgagtgcaccttcacctgtggcaccgactgcaggggcacctcgcagtatccctgcgtccaggtgtacgtgaacaactccgagtccaactccagggcgctgctacacagcgaccagcaccagctcctgactaaccccaagtgctcctatatcccgccctgtaagagagaaaaccagaagaactcggaaagtgtcatgaactggcaacagtattggaaagatgagatcggttcccagccattcacttgctattttaatcaacatcaaagaccagaggacgttctcctgcagcgcacacatgacgagattgtcctcctgcactgcttcctctggccggtggtggcgtttgtggtgggtgtcctcatcgtggtcctcaccatctgtgccaagagcctggcagtcaaggcagaagccatgaagaaacgcaagttctcttaacggggaggaggattgtgggaagccaagaccagaggctgcctcatgggcactcgcctaccctgcagagcccacatttggtggcgcaggagatggaagggrccacaaaaggcctccaagaggcccctccctcaacggcagcagaagcaggcacagctggaagactggggaayttgttgcttgtatcccgtgtgctgtagcaatggctaaagggtcaagctyttagctctatggagtgactgtttgggaaaccctctaagaagtcggtttcccttggaaagttacagtctattatttgtatagtgtagtatacaaaccattatgacttatgctcctcacaaatattaaaagacagtgttctgtgwwmwwmwmwwraaaaaaaaaaaaaaaaa

SEQ ID NO: 2746 - DNA, 639 bp, Rattus norvegicus
atggctcccttgaccgaagtcggtgccttcttgggcggcctggagggcttgggccagcaggtggggtcgcacttcttgctgcctcctgcaggggagcgaccgccgctgctaggggagcggcggggcgcgttggagcggggcgcccgcggcgggccgggttccgtggagctggcgcacctgcacggcatcctgcgccgccggcagctctactgccgcaccggcttccacctgcagatcctgcccgacggcagtgtgcagggcacccggcaggatcacagcctcttcggtatcctggaattcatcagtgtggcggtggggctggtcagtatcagaggtgtggacagcggcctgtaccttggcatgaatggcaaaggagagctttatggctcagagaaattgacttctgaatgcatcttcagggaacaatttgaagagaactggtataatacctattcatccaacatatacaaacacggagacacaggtcgcaggtattttgtagcacttaacaaagacgggactccaagggacggtgccaggtccaaaagacaccaaaagtttacccattttttacccagaccagtggacccagagagagtcccagagttatacaaagacctactggtgtacactggatga

SEQ ID NO: 2747 - DNA, 2072 bp, Rattus norvegicus
cagtaatcagctacctttatccctagccccctgcgccccgcgcccctggcagccttcaacgcttgtccccaggcagtatggtgaggtctgctctgggtccctcgccaccatgtacgtgagctaccttctggacaaggacgtgagcatgtaccctagctccgtgcgccactccggcggcctcaacctggcgccgcagaactttgtcagtcccccgcagtacccggactacggtggttaccacgtggcggccgccgctgctgcggcggcgaacttggacagcgctcagtccccagggccatcctggcccaccgcgtacggcgcccctctccgcgaggactggaatggctacgcacccgggggcgctgcygcagccaacgcggtagcccacggcctcaatggtggctccccggccgccgctatgggctacagcagccccgccgaataccacgcacaccatcacccgcatcatcaccctcaccatccggccgctgcgccgtcctgcgcctccggattgctscagacgctcaaccccggscctccagggcccgcagccaccgccgccgcagaacagctgtcccccagcggccagcggcgaaacctttgtgaatggatgaggaagccagctcagccgtccctaggaagccaagtgaaaaccaggacgaaagacaaataccgggtggtgtacacagaccatcagcggctggagctggagaaggaatttcactatagtcgatacatcaccatcaggaggaaagctgagttggccgccacactcgggctctcggagaggcaggttaaaatttggtttcagaaccgcagagccaaggaaaggaaaatcaacaaaaagaagttgcaacagcagcagcagcagcagcctcccgcaccgccgccaccacagccttcccagcctcagtccggtgcattgcggagcgtgccggagcccttgagtcctgtgacctccttgcaaggctcggtgcctggttctgttcctggggttctggggccagctggaggggttttaaactccactgtcacccagtgacccctcctgtggcctgaagtggcggtggctcagcaatcccaggctgagccatgaggagcacggacactgtgagaaacctcagaagagacccctcttctcctacccacaaacaacacctacagatggagatcgaggacagagggcagaagacgagtgggattgtggacctcaggagaagatatggtttagattttttttttaaatttttcccgttctgacttttcctgtcagcaaaggaagtgattcctggggcttcttcattcatgctccttgccaggactggctacaggcaccaagctttcagcttcttttgcctcagctctttgcctccaaaaaaaaagagactgtatttctgtttggagctgaggagagatagagtgtgaggccggagttgggggttggggcgggcggggcaagcaacacttgagccaagatggctgtttcctgctgactgctttctgagaaccagctggccatcctgcctcaggggcagggactgttgaaacttacttgagccagaggcagctaagacagaaagctggattgaccgaagtctgcagaaccttccccccctcaggtggtctgtgctttcttctctgtccacagatcaggaaggggtggtgggttcagggaccatcgtgtgagaggagggggggtggttagccaactccaggcccctgcgacaagggcttgtttagaaagcctgtcaccagagctgctgtaggctgaatgtatgtctgtgtcgtaaatgccagagccaacctggacttcctgtcccttccctcgtctttggctgaagaagaccggaattgctgctgttcgagtcactggtctgtgtaacaagccaaacaagccttttaaaaagccttctggatccatgggtagagagagagagtgagagacgttgtatggtgaagggaagtggggagggggatatctgaacacagttgacttttattttgtaaaaagacaaaagatataaaaggagctttacagatttcagatcctaaaaaaaaaaaaaaaaaaaaaa

SEQ ID NO: 2748 - DNA, 1713 bp, Rattus norvegicus
atggggaactgggctgtgaatgagggactctccatctttgtcattctggtgtggttggggctgaatgtcttcctctttgtcaagtattacaaggtttatgacgatgagcctaaatataattacactcgaaaacttcttgggtcagcactggctctggcccgggcacctgcagcctgcctgaatttcaactgcatgcygatcttgctgccagtgtgtcggaatctcctctccttcctcaggggttccagtgcgtgttgctcaaccagaattcgaagacaactggacaggaaccttactttccataagatggtagcttggatgatagcacttcacacggccattcacaccattgcacatctgttcaacgtggagtggtgtgtgaatgccagagtcgggacttcggacccatattcagtagcactctctaacattggagacaaagaaaatgaagagtatctcaattttgctagagaaaaaatcaagaaccctgaagggggcctgtatgtggctgtgactcggttggctggcatcacaggaattgtcatcacactgtgtcttatattgatcatcacatcctccaccaaaaccattcggaggtcttactttgaagtgttctggtatacacaccatctctttgtgatcttcttcatcggccttgccatccatggagytgaacgaattgtacgtggacagacttcggacagtttgaaagagcataatttagatgtttgtgcagacaaaatcaaagaatggggaaaaataaaggagtgcccagtaccaaagtttgccggaaaccctcctatgacttggaaatggatmgtgggtcccatgttcctgtayctktgygagaggytggtscggttttggcgwtctcarcagaaggtggtcatyacyaaggtggtcackcaycctttcaaaaccatcgagcttcagatgaagaagaagggattcargatggaggtgggacartacattttygtcaagygtcccgcagtrtccaagctrgagtggcacccwttcacmctgacctctgcycctgaggaagacttytttagcatccatatccgyattgtkggmgactggacwgagggrctrttcaawgcytgtggctgtgataagcaggagttycragatgcctggaaactacctaagatagcagttgatgggccctttggtacagccagtgaagatgtgttcagctatgaggtggtgatgttagtgggagctgggattggagtcacgccctytgcctccattctcaagtctgtctggtacaaatattgtgacaatgccaccagtctgagactcaaaaagatctacttctactggctgtgcagggacacgcatgcttttgagtggttcgcagacctgctgcagctcctggagacccagatgcaagaaagaaacaatgccaacttcctcagctacaacatctaccttactggctgggatgaatctcaggccaatcactttgctgtgcaccacgatgaggagaaagatgtgattacaggcctaaaacagaagactctgtatggacggcccaactgggataacgagttcaagaccattgcaagtcaacaccccaacaccagaataggagtttttctgtgtggccccgaagccttggctaaaactctcagtaaacagagcatctccaactctgagtccggcccacgtggagtccacttcatcttcaacaaggaaaacttctaa

SEQ ID NO: 2749 - DNA, 1660 bp, Rattus norvegicus
tcttccagtgtcgtcttcagtgtcctttccatcacacaccaccgcccacatctacattctcgcacccgcgcgcactcgcgcagccagccagcggcggccaccgcggcgatgctcgccagcaggtttgggaagtttcccgccggcctcggccgcgggctccggtgcacccaggtgtagcgcccccgcgcggcgcgggcgcctgggcatctccagcatgacccgccagagcctgtgggacctgtctgagaccgacgtcgaggatggagagatccgaatcaatgtaggcggcttcaagagacggctgcgttcccacacgctgctgcgcttccctgagacacgcctgggccgtctgctcctctgccactcgagagaggccattctggaactctgcgatgactacgacgatgtccagcgtgagttctacttcgaccgtaaccctgagctcttcccctacgtgttgcatttctaccacaccggcaagctccatgtcatggccgagctgtgcgtcttctccttcagccaggagatcgagtactggggtatcaacgagttctttattgactcttgctgcagctacagctatcacggccgcaaagtggaacctgagcaggagaagtgggacgagcagagtgaccaggaaagcactacttcctccttcgacgagatcttagccttctataatgatgcttccaagttcgatgggcaacccctgggcaacttccgcaggcagctgtggctggcgttggataacccgggctactcagtcctgagcagggtcttcagcgtcctttccatcttggtggtgttgggctccatcatcaccatgtgcctcaacagcctgccagacttccagatccccgatagccagggtaaccctggcgaagaccccaggttcgaaatcgtggagcactttggcattgcctggttcacgtttgagttggtggccaggttcgctgtggcccctgactttctcaagttcttcaagaatgccctaaaccttattgacctcatgtccattgtcccgttttacataactctagtggtgaacctggtggtggagagttcgcctaccttggctaacttgggcagggtggctcaagtcctgaggctgatgagaatcttccgaattctcaagctggccagacactccactggcctccggtccttgggggccaccctgaagtacagctacaaggaagtggggttgctcttgctctacctctcggtggggatttccatcttctctgtggtggcctacaccattgaaaaggaagagaacgagggcctggccaccattcctgcctgctggtggtgggccacggtcagcatgactaccgttgggtatggagacgtggtcccagggaccacagctgggaagctgactgcctctgcctgcatcttggcaggtatcctggtggtggtcttgcccatcactttgatcttcaataagttctcccacttttatcggcgccagaagcaacttgagagcgccatgcgcagctgtgactttggggatggaatgaaggaggtcccctccgtcaatttaagggactactatgctcataaagttaagtccctcatggcaagcctgacaaatatgagtaggagttcacccagtgaactgagtttagacgactctctacattagttgggacccagg

SEQ ID NO: 2750 - DNA, 1147 bp, Rattus norvegicus
atgggcccattaggtgcagaggcagatgagaatcaaactgtagaagtgaaagtggaactctatgggtcggggcccaccactcctagaggtgagttgccccctgatccagagccggagctcatagacagcaccaaactggttgaggtgcaggtggtccttatactggcctattgttccatcatcttgctgggcgtagttggcaactctctggtaatccatgtggtgatcaaattcaagagcatgcgcacagtaaccaacttttttattgccaacctggctgtggcggatcttttggtgaacaccctgtgcctgccattcactcttacctataccttgatgggggagtggaaaatgggtccagttttgtgccatttggtgccctatgcccagggtctggcagtacaagtgtccacaataactttgacagtcattgctttggaccgacatcgttgcattgtctaccacctggagagcaagatctccaagcaaatcagcttcctgattattggcctggcgtggggtgtcagcgctctgctggcaagtccccttgccatcttccgggagtactcactgattgagattattcctgactttgagattgtagcctgtactgagaaatggcccggggaggagaagagtgtgtacggtacagtctacagcctttccaccctgctaatcctctacgttttgcctctgggcatcatatctttctcctacacccggatctggagtaagctaaagaaccacgttagtcctggagctgcaagtgaccaytaccatcagcgaaggcacaaaacgaccaaaatgctcgtgtgcgtggtagtggtgtttgcagtcagctggctgcccctccatgccttccaacttgctgtggacatcgacagccatgtcctggacctgaaggagtacaaactcatcttcaccgtgttccacattattgcgatgtgctccaccttcgccaacccccttctctatggctggatgaacagcaactacagaaaagctttcctctcagccttccgctgtgagcagaggttggatgccattcactcggaggtgtccatgaccttcaaggctaaaaagaacctggaagtcaaaaagaacaatggcctcactgactctttttcagaggccaccaacgtgtaag

SEQ ID NO: 2751 - DNA, 2374 bp, Rattus norvegicus
cggcaagcggatggactttttctacaacaggagcaacacagacacggcggacgagtggacggggacgaagctcgtgatcgtcctgtgcgttgggacattcttctgcctctttatatttttttctaactccctggtcatcgcagcagtgatcacgaataggaagttccactttcccttctactacctgctggctaacttggcggtggcggatttctttgccggaatcgcttatgtgttcctgatgtttaacaccggcccggtgtcgaaaaccttgactgtcaaccgctggcttctccgccaggggctcctagacacaagcctgacggcctccctggccaatctgctggtaattgctgtggaaagacacatgtcaatcatgaggatgagaatccacagcaacttgaccaaaaaacgggtgacgctgctcatcctgctggtgtgggccatagccattttcatgggggcggtccccacgctgggctggaattgcctctgcaacatctcagcctgctcctctctggccccgatttacagcaggagttacctcatcttctggacggtgtcaaacctcctggccttcttcatcatggtggtggtgtacgtgcgcatctacatgtatgtcaagaggaaaaccaacgtcctctctccgcacacgagtggctccatcagccgccggagggcccccatgaagctaatgaagacggtgatgactgtcttaggagccttcgtggtgtgctggaccccgggtctcgtggtgctgctgctggacggcctgaactgcaagcagtgtaatgtgcagcacgtgaagcgctggttcctgctgctggcgctgctcaactccgtcatgaaccccatcatctactcgtacaaggacgaggacatgtacaacaccatgcggaagatgatctgctgtgccccgcacgacagcaacgccgagaggcacccctcccgcatcccctctaccatccacagcaggagcgacacgggcagccagtacctggaggacagcatcagccagggccaggtgtgcaataaaagcagctcctaagccagggacgcctccgccctctccccctggggaaagagcccttaagagtcctcgcctgtctcacaaagcacatggacagggttgtttgagggctccatgaatcactgctgggccttgtaagttttcattgtcaaggaagataagatactgcatttagtaagagtgcacagaaaagggagagatgaacagtgggctcctgctcgtcgtctgcgaaccgctccgaacatcctccagctctcgcgcaaagcatgctgggctctgccaccatcttgccgccatggtctgtgtgttttcaaagatggtgttgaaggtcckaggtcaaaagaagtagtaaataatggtacctgagcctccatgtgtagctgctagactctagttgtttccgcgtgggtttaamaygkkcagaaaatattttagcagtggacttggatttccccagaggagccatgatccggaactagatgtattgcagaaatctgggaacaaactgtatagaggggtaaacttggtgtataaccacgtgactttctgaggaaagagaacactgcaagggtggaggtgtagaagctcttctggagtggaaagagctttttgtcctttgtacacgtgggtgtacatgctacacacacgggtgtacatccacctctacttatacaattcaacttcatttaacgaagcccatccgtgatggcgagtttagaccactgcctcctagagttttcagtccaggctagtggctttagagattgtctttgtgttctaaacaagaagagaaaacactattcacttctaaaggggcaactgtacagcagagtaagtgatgatattgaccagcaggctgaacctcttccacatagcgccaaatacgagcatgaggagatcgctagatccccccgtcttggtgggcggaaaccactgatgggagtgctggagtatccatgtgcgaagagaggctgcacaagctagtatgttagaccggagctggccagcatactctatgcgtacttgtggagctgaaggtttgatcttgcatttggttttctccgtcaaagacctatggagaggcagatcagtgagaaacacaaatagtgtttcatacacataggctactgaccagtgttttctatgtgagacatttagagactattctgacgtaaagaataacttcaaggcaggtactatggtatttatgtagtttgcaaacgtttacatgttctctctctctctctctctctctctctctctctctctgctgttgtgatgtaacatttatgtgcacaaactacttgtaataaaagattttaagaagtaaaaaaaaaaaaaaaa

SEQ ID NO: 2752 - DNA, 3140 bp, Rattus norvegicus
tgcttttcaggctcttccgctttgctcttctgcttcaaatgaattgaaatctccgcgagccgccacggcactgakacykkkakarwrctgwcmywgckctstckgcattcgtccwgtcragggywtctttgccwsagagacagcctagcctgggcctcccggcttccagctaccgcctgcttcgcagacctgacggaatcagaaggtgtttgatgctccacagttggtctactgccaatcctcaccctccatgagccttggttctgatgcaacctttggtcatgcagggatgcccttacaccctcccacgatgtcatgagtggcatgctgctgacaggtttcatcacagcagcagcctccgaaacacctgtccccagcctcaggttagagctgcggtcaccatccctgcaccaccttgggatggtgccggggatccctgcctaagtccaaagctcttgaacgggtctgttggagccgttggccccctggaaccatcagccatgaatctgtgttggaatgaaataaaaaagaagtctcacaacctccgcgctcgcctagaggccttctcagaccacagtggaaaacttcagctcccacttcaagagattattgactggctcagccaaaaggatgaagaattgtcagctcagctgcccttgcaaggggatgtggccctggtacaacaggagaaggagacacatgctgcctttatggaagaagtgaagtctaaaggcccctatatctactctgtgctggaatcggcacaggctttcctgtctcagcacccatttgaggaattagaggagtctcattctgagagcaaagatacctccccaagacagcggattcaaaacctcagtcgctttgtgtggaagcaggcaacagtggccagtgaactgtgggagaagctgacagcccgctgtgtggatcagcatcgccacattgagcacaccctggaacatctattggagatccaaggggcaatggaggaactgagcagtactttgacccaagcagagggagtccgagccacatgggagcccataggagatctctttatcgattccctcccagagcatatccaagccatcaagttattcaaagaagaattctctcctgtgaaagacggggtgaagttagtgaatgacctggcccaccagcttgctatttctgatgtgcacttgtcaatggagaattcaagggctctggaacagatcaacgtccgctggaaacagctccaggtgtcagttgctgagaggcttaaacagctccaggatgcccaccgggactttgggcctgggtcacagcacttcctctccacttctgttcaagttccctgggaaagagcaatttctcccaataaagtcccctactacatcaaccaccaggctcagaccacatgctgggaccatcccaagatgaccgagttataccaaaccctagctgacctgaacaacatcaagttctcagcttaccgcactgccatgaagctccgccgagtccagaaggccctgcgcttggatctggtaactttaactacagctctggagatcttcaatgagcacgacttgcaggccagtgaacatgtaatggatgtggtggaggtcattcactgcttgactgccttgtatgaacgactggaggaggaaagaggcatcctggtcaacgtgccgctgtgtgtagacatgagcctcaactggctcctcaacgtttttgatagtggccgcagtggaaagatgcgagcattgtcctttaagactggcatcgcatgcctgtgtggcactgaagtgaaagaaaaacttcagtatctcttcagccaagtggccaattcaggcagcaagtgtgaccagcgccacctcggtgccctgcttcatgaagccatccaagtgccccgtcagctgggtgaagtggcagcatttgggggcagcaatgtggagcccagtgtccgtagttgctttcgcttcagcactggcaagccagtcattgaagcttcccaattcctggagtgggtcaacctggagccccagtctatggtgtggctggctgttcttcatcgggtcaccgttgctgagcaagtgaagcatcagaccaagtgttctatctgtagacagtgccccatcaaagggttcaggtaccggagtctgaaacaatttaacgtggatatctgccaaacctgcttcttgacgggcagggcaagcaagggcaacaagctccactatcccatcatggagtattacacaccgaccacatctagtgaaaacatgagggactttgccacaaccttaaagaataaatttcgctccaagcagtatttcagcaaacaccctcaacgaggttatctgcctgtgcaatcagtactggagagcgactgcagtgagacacctgcttcttccccgatgttgccacacgctgacacacactctcgaattgagcattttgccagcaggcttgctgagatggaaagtcaaaattgttccttttttaatgacagcttgtccccggatgacagcatcgacgaggaccagtacctgttgaggcactccagccccatcacagaccgagagccggcctttggacagcaggctccgtgcagcatggccacagaaagcaagggggaactcgagaagattctggcccatttagaagatgagaaccggattcttcagggagagctgaggcgcctgaaatggcagcacgaagaagcagtcgaggcacctaccctagctgagggctctgctgaagcaaccccagaccaccgcaatgaagagcttctagctgaagccaggatcytgcggcagcacaagagccgcytggagacacgcatgcagatccttgaagaccacaacaagcagttagagtctcagctgcaacgcctgagagagctgctcctgcagccacccactgaatcagatggcaatggctctgcaggctcatccctagcctcctccccacgccagtcagaaggcagtcatccccgggagaagggacagactactccagacactgaggctgcagatgatgtgggttcaaagagtcaggatgtcagccatagcttagaagacatcatggagaagctccgccacgccttccccagtgtgcgaagctctgacgtgactgcgaacactctgctggcctcttga

SEQ ID NO: 2753 - DNA, 4467 bp, Rattus norvegicus
atggcaggaaacagtctagttctgcccattgttctctggggccgcaaagcacccacacactgtatttcgtcaatactgctgacagatgatgggggcacgattgtgactggatgccacgatggacagatatgtctctgggatctctcagaagagctggaagttaatccccgagcactattatttggtcacacagcagccatcacttgtttgtcaaaagcctgtgcttctggagacaaacagtacaccgtgagtgcgtccgcaaatggagagatgtgcctctgggatgtgaatgacggcagatgtattgaatttacaaaattagcctgcacacatactggcatacagttctaccagttctctgttggaaatcagcgagagggaaggcttctgtgccatgggcattaccctgaaatcctcgttgtggatgccaccagccttgaggtgttgtattccttggtatcgaagatctctccagactggatcagctccatgagyatyatccgctctcaccggacacaagaggacactgtggtagcgctgtccgtgacaggtattctgaaggtgtggattgtgacctctgaaattagtggattgcaggacactgagccaatatttgaggaggaatccaaaccaatttattgtcagaattgccaaagcctctctttttgtgcattcacacagaggtcgctcttggttgtatgctccaagtactggagggtgttcgatgctggcgactactccctgctgtgttcaggtcctagtgaagatggacagacatggactggaggggactttgtgtctgcagacaaagtcattatttggactgaaaacgggcagagttacatttacaaactccctgccagttgccttccagctagtgattcattccgcagtgacgtggggaaagcagttgaaaatctgattcctcccgtgcagcatagcctcttggatcagaaggatagagagttggtaatttgtcctcctgttactcggtttttctatggatgcaaggaatatttgcataagctactaattcagggtgattcttctggaaggttaagtatttggaacatagcagacatagcagacaaacaggaagccaatgaagggctaaaaacgacaacttgtattagtttgcaagatgcatttgacaaactgaagccttgtcctgctggaattatcgatcagctgagtgtgattccaaacagcaacgaaccacttaaagtaactgcgagtgtctacataccagcacacgggcgccttgtttgcggccgggaagacggaagcatcattatcgtccctgccacccagacggccatagttcagctgctgcagggagaacacatgctcagacgaggttggcccccgcacagaaccctccgtggccaccggaacaaagtcacgtgtttgctgtatcctcatcaggtctcagctcggtatgatcaaagatacctgatatccggaggtgtggatttttccgtcatcatttgggacattttttccggagaaatgaaacatatcttctgtgttcatggtggtgagatcacacaacttctggtcccgccagaaaactgtagtgcaagagttcaacactgcgtctgttctgtggccagtgaccactctgtagggctgctaagtctgcgagagaaaaaatgcatcatgctggcgtctcgtcacctgttccctattcaggtgatcaagtggaggccttctgacgactacctggtggtggggtgcacggacggctctgtgtgtgtctggcagatggacactggtgcgctggaccgctgtgcaatggggataacagccgtggagattctcaatgcttgtgacgaagctgtccctgcagcagtggactcactcagtcacccagcagtcaacctgaagcaagccatgacacggcggagtctcgccgcccttaaaaacatggcccaccacaagctgcaaacccttgcaactaaccttttggcttctgaggcctctgacaaggggaatttacctaaatattctcataactccctgatggttcaagcaataaagacaaacctaactgacccggatatccatgtgcttttctttgatgtggaagctttgattattcaactcctgactgaagaagcctctaggccgaatactgcacttatttccccagagaatctgcagaaagcatctggcagttcagacaaagggggctctttcctgactggaaaacgagcggcagttcttttccagcaagtgaaagaaactatcaaagagaacataaaggagcacctccttgatgaggaggaggacgaggaagaggtgatgaggcagaggagggaagaaagtgaccctgagtaccgggccagcaagtccaaaccacttaccctactagaatacaaccttactatggataccgcaaaattattcatgtcctgtctccacgcctggggtttgaatgaagttctggatgaagtttgcctcgatcgcctcggcatgctgaaaccacactgcacagtgtcctttggtctcctatccagaggaggtcatatgtccttgatgcttcctggttataatcaggctgctggaaagctactgcaggcgaaagcagaagcaggacggaaggggccagcaacggagagcgtaggcaaggggacctacacagtgtcccgagcggtcaccacgcaacatctgttgtccatcatatctctggcaaatactttaatgagcatgaccaatgcgacgttcattggagatcacatgaagaagggccccaccaggccgcctagaccaggcaccccagacctttctaaggcaagggattcccccccagcctccagtaacattgtgcaaggacagattaaacaagctgctgcgcctgtctctgctcggtctgccgccgaccactctggctctgcctctgcctctcctgctttacgtacctgcttcttagtgaatgaaggatggagccaactagctgccatgcactgtgtcatgctgccggacctgctggggctgggtaaattcaggcctcctcttctggagatgctagctcgaagatggcaagatcggtgcttggaggtgagagaggctgcacaggcccttcttctagcagagctgagaagaattgagcaggcaggacggaaggagactattgatacctgggctccttacttacctcagtacatggaccatgtcatatcacctggagtcacggcggaagccatgcagactatggcagctgctccagatgcctcggggccagaagccaaagtccaggaagaagagcatgacctcgtggacgatgacatcaccactggttgcttatcaagtgtcccacaaatgaaaaagatgtccacatcttacgaagaaagaaggaagcaggccactgctattgttctcctgggagtgataggagcagagtttggagctgaaattgaaccaccaaaactgctgaccagacctcggagctctagtcaaattcctgaaggatttggtttgacaagtggaggttccaactactctctggccagacatacgtgcaaggcactgacatttcttctgctacagccaccaagtcccaaacttcctcctcatagcaccatccggagaactgccattgacctgatcgggcgagggttcaccgtgtgggagccttacatggacgtgtctgctgtcctgatggggctgctggagctgtgtgcagatgctgagaagcagctggccaacatcacaatggggctgcctctgagccctgcagctgactctgcccgatccgcaagacacgccctttctctcatagccaccgccagaccacccgccttcatcaccaccatagctaaggaggtgcacagacacacggcccttgcagcaaatacccagtcccagcagagtatccacaccaccacactggcaagggctaaaggcgaaatcctgagagtcattgaaattcttatcgaaaagatgcctacggatgttgtggatcttcttgtggaggtcatggacatcatcatgtactgcctggaaggatctttagttaagaagaagggtcttcaggagtgtttcccagccatctgcaggttctacatggtcagctattatgagcggagtcacagaattgcagttggagcacgccatggctcagtggccctgtatgacatccggactgggaaatgtcagacaatccacggacacaagggacctatcactgcagtgtcctttgctcctgatgggcgttaccttgccacctactcaaacactgacagccacatttctttctggcagatgaacacctcacttctgggaagcattggcatgctgaactcagcacctcagctgcgctgcatcaagacctaccaggtacctccagtgcagcccgcatcccctggctcgcacaacgccctcaggttggcccggctcatctggacttccaaccggaatgttatcctcatggcccacgatgggaaggagcaccgcttcatggtctga

SEQ ID NO: 2754 - DNA, 1254 bp, Rattus norvegicus
atgggcaagagatgggactcaaactcttcaggaagctgggatcacatctggagtggcaatgacacacagcatccttggtattcagatatcaacatcacatacatgaactactatctccaccagccccacgtgacagctgtcttcattagctcctacttcctgatcttcttcctgtgcatggtgggaaacactgtcgtttgctttgttgtaataaggaataggtacatgcacacggtcactaatttcttcatcttcaacctcgcaataagtgacttactggttggaatattctgcatgcctatcacattgctggacaacatcatagcaggatggccgtttggaagcagcatgtgcaagatcagcgggctggtgcaagggatatcggttgccgcttctgtcttcaccttggttgccatagccgtagacagattccggtgtgtggtctacccctttaagcccaagctcactgtcaagacagcctttgtcatgatcgtgatcatctggggcctggccatcaccattatgaccccatctgcaatcatgttacatgtacaggaagaaaaatactaccgtgtgaggctcagctcccacaataaaaccagcacagtctactggtgtcgggaggattggccaaaccaggaaatgaggaggatctacaccaccgtgctctttgccactatctacctggctccactctccctcattgttatcatgtatgcaaggattggggcttccctcttcaagacctcagcacacagcacaggtaagcagcgcctggagcagtggcatgtatccaagaagaaacagaaggtcatcaagatgctgctgactgtggccctccttttcatcctttcctggcttcccctgtggactctgatgatgctctcagactatgctgacctgtcacctaacaaactacgtgtcatcaatatttatgtctacccttttgcccactggctcgccttctgcaatagcagtgtcaaccccatcatttatggtttctttaatgaaaattttcgcagtggtttccaagatgctttccagttctgccaaaagaaagtcaaaccccaggaagcctatggcctaagagctaaacgcaacctggacataaacacatctggcctgttggtccatgaacctgcatctcaaaacccaagtggggaaaacttgggatgtagaaaaagtgcagacaatcccacacaggaatccttgatggaggaaacgggagaagctaccaacagtactgagacttag

SEQ ID NO: 2755 - DNA, 4886 bp, Rattus norvegicus
  misc_feature (4847)..(4847): n is a, c, g, or t
atgagcatacgattgccccatagtatagacagatcagccagtaaaaagcagtctcacctgtccagtcccattgcatcctggttaagtagcctgtcttctctgggagattctacacctgaacgcacatccccttctcaccaccgccagccctctgacacttctgagacaacagcaggtcttgttcagcgctgtgtcatcatccaaaaggaccagcatggctttggcttcacagttagtggagatcgcattgtactggtgcagtccgtgcgccctggaggcgcagccatgaaagctggtgtgaaagagggtgaccggatcatcaaagtaaacggcaccatggtgaccaatagctcacacctggaggtggtaaagcttatcaaatctggcgcctatgctgcgcttaccctcctaggctcttctcctccctccgtcggcgtctctgggctccagcagaatccatctgtggcaggagtgctcagagttaaccccatcattcctccaccacctcccccgccacccttgccacctccacagcacattactggacccaaacctcttcaggatcctgaagtccaaaagcacgccactcaaatcctctggaatatgctaagacaggaggaggaagagttacaggacatacttccaccctgtggtgagaccagtcagagaacatgtgagggccgcctctctgtggactcccaggaggcagacagtggcttggattctgggacagaacgctttccctccatcagtgagtcattgatgaatcggaactcagtattgtcagatcctggactagacagccctcaaacctcccctgtaatcctggccagggtggcccagcaccacaggcgacagggctcagatgcagcgttgctcccgctcaaccaccagggtatagatcaaagcccaaagcctctgattattggcccagaggaagattatgacccaggttatttcaacaatgagagtgacatcatcttccaagatcttgaaaaactgaagtcacatccagcttacttggtagtttttctacgttacatcctctctcaggcagaccctggccccctgcttttttatttgtgttcagaagtttatcaacagacaaatcccaaagattcccgaagtctggggaaagacatctggaacattttcctggagaaaaatgcgcctctcagagtgaagatccctgagatgttgcaggctgaaattgacctacgcctgcggaacaatgaggaccctcgcaatgtgctctgtgaagctcaggaggcagtcatgctggaaatccaggagcagatcaacgactacagatccaagcgtactctgggcctgggcagcctctatggtgaaaatgacctgctaggcctggatggggaccctcttcgagaacgccaaatggctgagaagcagctggctgcccttggagatatcttgtccaaatatgaggaagatcggagtgcccccatggactttgctgttaatacctttatgagccacgctgggatccgtcttcgggagtctcgatcctcctgcacggcagaaaagacccagtctgcccctgacaaggacaagtggctgcccttcttccctaagaccaagaagcagagcagcaattccaagaaagaaaaggatgccttggaggacaagaagcgaaaccccatcctcagatatattgggaagcccaagagctcctctcagagcattaagccaggcaatgtgaggaacatcattcagcactttgagaacagccatcagtatgatgtcccagagccggggacacaacgactctcaacaggaagctttcctgaggacctgctggagagtgacagttcgcgctcagagattcgactgggccgctctgggagcctcaagggccgggaagagatgaagcgatcccggaaagcagagaacgtgccccggcctcgaagtgacgttgacatggatgctgctgcagaggctgcccgccttcaccagtcagcctcgtcctctgcctccagcctctccaccaggtctcttgagaacccaacccctcccttcacccccaaaatgggccgcaggagcattgagtcccccaatctggggttctgtacagacgtcatccttccccacctcctggaggatgatctgggccaattgtctgacctggagccagagccagaggtccaaaactggcagcatacagtaggcaaggatgtggtggccaacctgacccagagggaaattgaccggcaagaggtcatcaatgagctttttgtgacagaagcatctcacctgcgcacactccgagtcctggacctcatcttctaccagcgcatgagaaaggagaacctaatgcctcgggaagagctagcgcggctcttccctaacctgcctgagctcatagagattcacaattcctggtgtgaggccatgaagaagctccgggaggagggccccattatcagagacatcagtgaccccatgctggctcggtttgatggtcctgcccgagaagaactccagcaagtagctgcacaattctgttcctatcagtcagtagccctagagctaatcaggactaagcaacgtaaggagagtcggttccagctcttcatgcaggaggctgagagccaccctcagtgccggcgtctgcagctccgagacctcatcgtctctgaaatgcaacggctcaccaagtacccactgctgctagagaacatcatcaagcacacagagggtggcacctctgagcatgagaagctctgccgtgcccgggaccagtgccgggagattctcaagtttgtgaatgaagcagtaaagcagacagagaaccgccaccggctagaggggtaccagaaacgcctggatgccactgccctagagcgggccagcaaccccttggcagcagagttcaagagcctggatcttacaacaaggaagatgatccacgaggggcctctgacctggaggatcagcaaagacaagaccctggacctccaggtgcttctgcttgaggacctggtggtactgctgcagagacaagaggagcggctgctgctaaagtgccacagcaagacagccgtgggctcctccgacagcaagcagacgttcagccctgtgctgaagctcaatgctgtgctcatccgctccgtggctacagacaagcgagccttcttcatcatctgcacctccgagctgggccctccccagatctatgagctggttgcattgacgtcatcagacaagaatatatggatggagctcttagaagaggccgtgcagaatgccaccaagcaccctggagctgccccaatccccatccatccctcaccaccaggatcccaggagccggcctaccagggctccacctccagcagggtagaaataaatgactcagaagtatatcacactgaaaaagaacccaagaagctacctgaaggccccgggcctgagcagagagttcaagacaagcagctgatagcacaaggggagcctgtgcaggaagaggatgaagaggaattgaggaccttgcctcgagctcccccctccctggatggagaaaacagaggcatcaggacaagggaccctgtccttctggccctcacaggccctctgctcatggagggacttgctgatgctgccctggaagatgtggagaacttgcgtcacctgatcctgtggagcctgctgcctggtcacactgtgaagactcaggctgctggcgagcctgaggatgacctcacacccaccccttctgtcgtgagcatcacctctcacccctgggacccagggtccccagggcaagctcccaccataagtgacagcacccgacttgcgaggccagagggcagccagccagagggcgaggatgttgctgtcagttctctggcacacctgccgccaaggaccagaagttctggcgtctgggactctcctgagctggataggaatccggctgcagaggctgcaagcacagaaccagcagcaagttacaaggttgtgagaaaagtctctctactccctggtggtggtgtcggtgcagccaaggtggcgggcagcaatgctatccctgacagtggccagtcagaatctgagctatctgaagtggaaggcggagcacaggctacggggaactgtttctatgtcagcatgccagcaggacctctggactccagcactgagcctactgggacacccccaagcccctcacagtgtcacagcctccctgcatggccaacagagcctcagccctacaggggagtccgtgggggtcagtgttccagcctggtccgcagggatgtggatgtgatcttccataccatcgagcagctcaccatcaagcttcacagactgaaggacatggagctggcccacagagagctgctcaagtcccttggaggagagtcatcgggtggaaccacacctgtggggagttttcacacagaggcagccagatggacagactactccctctctcctccagccaaggaagccctggcctctgattcccaaaatggtcaggagcaggggtcctgccctgaagaaggctccgacatcgccctggaagacagtgccactgacacagctgtgtcaccaggaccatagcatccagacaaccagagtctggcctgcctcagagcacaaccctgggagacccaagcctccccttgaaagatgccacagggccagggaatccctcgtgttgcctggtctgtttccaccagacagtccagttcagtgtctcttcctctgttagcccaagtctccatggcttttgtctcctgagcatgttgaccacaacagaaaggcctccaccctgcatagccacatagccagtgtggggtgtgctgtgtgcacagtgccctcangtgtgcatgtcagaggaggaggcttatgtgtgattgcac

SEQ ID NO: 2756 - DNA, 2106 bp, Rattus norvegicus
cctccgtcggggaagcatggggctgcccaggctggtctgcgccttcttattcgctgcctgctgctgctgtcgcagcgccacgggtgtgccaggagaggaaaagcagcccacacccacgccggacccggtggaggtagaagtgggcaacacggcccttctgaagtgtggccccgcacatccctcaggcaacttcagccaagtggaatggtttttgattcacaaggagaggcagatacccattttccgtgtgcaccagggcaagggccagagtgaacctggggaatatgaacaccgcctcagcctccacggcccaggagctactctggccctgagtcaagtcactccccatgatgaccggatgttcctgtgtaagagcaagcagccacggccccaggatcactatgttcagctgcaagtctacaaggctccagaggagccaactatccaagccaacgtgctgggcatccacgtggacatacaagagcttaaggaggttgctacctgtgtggggaggaatggctaccccattcctcaagtcatctggtacaagaatggccggcccttgcaagaggaggagaaccgcgttcatatccagtcgtcacagaccgtggagtccagtggcttgtacaccttgaagagtgttctaagtgcacgggtagtcaaggaagacaaagatgcccagttttactgtgaagtcagctaccggccgcccagtgggaaccgcatgaaggaatctaaggaggtcactgtccctgtcttataccctgcagaaaaagtgtgggtggaggtagaacccgtgggactgctgaaggaaggggaccatgtgaagatcaggtgtctgactgacggcaaccctcaaccccacttcactatcaacaagaagaaccccagcactgaggagatggaagaggagagcaccgatgaaaacggtctcctgtccttggagcccgcccagaagcaccacagtggggtctaccaatgtcagagcctagacttggaaactacagttatgctgtcgagtgaccccctggagctgctggtgaactatgtgtctgatgttcaagtggatccaactgcccctgaagtccaggaaggtgatagcctcacactgacctgtaaggcagagagtaaccaggaccttgagtttgagtggctgagagacaagacaggccagcttctgggaaaggggcccatccttcagctaaacaacgtgaaaagggaagcagggggaagatatctctgtgtggcatctgtccccagcgttcctggcttgaatcgcacacggcgggtcagcgtgggcatttttgggtccccgtggatggcagcaaaggagaggaaggtgtgggcgcaagagaatgcaatgctgaatctgtcttgtgaggcttcaggccatcctcagcccaccatctcctggaatatcaatggctcggcaactgaatggaaccctgatcctcagacagtagtgagcaccttgaatgtccttgtgaccccagagcttctggagaccggtgcagaatgtacagcctccaactccctgggctcatacaccacggtcatcattctgaagctcgtcactttaaccaccctcacacatgactccagccaaaccactggcctcagcacccccacagtcagtcctcacagcagagccaacagcacctccacagagaaaaagctgccacagcaggagagcaaaggtgtggtcatcgtggctgtgatagtatgtacgctggtgcttgctgtactgggcgctaccctctattacttctacaagaagggcaaactgccttgtggacgctcaggaaaacaggagatcacgctgcccccgactcgtaagagtgaatttgtagttgaagttaagtcagataagctcccagaagagatggctctccttcagggcagcaacggtgacaagagggctccaggagaccagggagagaaatacatcgatctgaggcattagccggttcaccaatgttttgggctccctgctcagtcttcaccccaagctaaagcctccagagggacagcggggaagatccttactcaactgccctgtagaccaggtccagagagctgcaacaagagtcacctggaagacctcac

SEQ ID NO: 2757 - DNA, 2106 bp, Rattus norvegicus
atgaacatggttcaagacagcgccttcctggccaagctgatgaagagtgccgacacctttgagttgaagtacgacttttcatgtgagctgtaccgcttgtccacatattcaactttccctgctggagtccctgtctcagagaggagtctggctcgtgctggcttttactacacaggtgtcaatgacaaggtcaagtgcttctgctgtggcctgatgctggacaactggaaacaaggggacagtcccatcgagaagcacagaaagctgtatcccagctgcagctttgtgcagaccctgaatccagccaacagtctggaagctagccctcagcctcctcttccttccacagcgacaagcaccatgccctccggctttgcagcttccgagagcactggctacttcagtggctcctactcaagctttccctcagaccctgtgaacttccgcgcaaatcaagactgccctgctttcagcacaagtccctaccactttgcaatgaacacggagaaggccagattactcacctatcaaacgtggccgttgtcttttctgtccccagcagagctggccaaagcaggattctactacacagggcctggagatagagtggcctgctttgcgtgtggtgggaaactgagcaactgggatcgtaaggatgatcctctgtcagagcacaggagacatttccccagctgcccattcttaaaagatgtgggtcagttcacttcacaatacactgtctctaacctgagcatgcagacccacgcagcacgtgttagaacgttctctacctggccttctagcgctctcgttcatcctcaggaacttgcaagtgcgggcttttattacacgggacacagtgatgacgtcaagtgcttttgctgtgatggtgggctaagatgctgggaatctggagacgacccctgggtggaacacgccaagtggtttccaaggtgtgagtacttgatcagaatcaaaggccaagagttcgttggccaagttcaagctggttaccctcatcyacwkgarsagctrtyatctayktsrgrctssmsagaggmtsagrstsragaggcagcrattgtgcatctgggccctggagagaattgggaagatgcagtgatgatgaacacacctgtggttaaagcagccttggacatgggcttcagtaggagcctggtgagacagacggttcagcgrcagatcctggccactggtgagaactacaggacggtcagtgacctcgtgataggcctactggatgcagaagatgagatgagagaggagcagacggagcaggaggccgaggaggaggagtcagatgatctaacattaatccggaagaacaaaatggtgcttcttcaacatttgacgcctgtgacaccaatcctggattgcctcctaagtgccagggtcattaccgaacaggagtacgatgccgtaaaacagaaaccacacaccttgcaggcaaggacactgatcgatactgtattagcgaaaggaaacaccgcagcgacctcattcagaaactccctgcaggaaatcgaccctgggttgtacagagatatatttgtgcgacagaacattaggagtcttcccacagatgacattgcagctctaccgatggaagaacagttgcggaaactccaggargagagaacgtgtaaagtgtgtatggaccgagaggygtccctcgtgttcattccctgtggccatmtggtcgtgtgcaaagaatgtgccccctctctgaggaagtgtcccatctgcagagggaytatcaagggcacagtgcgcacatttctctcctgaacaggactggactgatggtccacggttgtgaccccagccaggaggagcagaagttcaatgtcactcccagctccataaggaacttgaggccggcctggatgacatgagacactgcctctaaatagtgtaaaaatgaaaaacatggggaaaaaaaaccttttgtctaaactcaaagaatggattacttacataataattttaattggtttccttaaaagtgctatttattcccaactcagagaactgttttcagtaaagtattttcatactatctgcatctaaaaaaaaaaaaaaaaa

SEQ ID NO: 2758 - DNA, 1683 bp, Rattus norvegicus
atggctgtggatttgctggctgctcgagggacggagcctgtgacgttcagggacgtcgctgtgtccttcagccaggatgagtggctgcatctggaccctgctcagagaaccctgtaccgagaggtgatgctggagaactacagcaacctggcctcgctggggtttcaggcttccatacctcccgtgattggcaagctgcagaaagggcaagacccttgcatggaaagagaagccccggaagacacctgcctagatttccagattcagtcggagatagaagcgtcgtcccctgaacaagacgtttttattgaaggaccatctcgtgggctgctaaagaacagatctactaagtgtgcttactggaaaatcagctttggagagcttgtgaaatatgagaggctagagacagcacaggagcaagaaaagaaagctcacgagccaggggcagcttcccccaaggaagtcaccagtgaagatggaattcccacagaccctgagctcgagaagcccttgttcatgaataaagcactagtttcacaagagaccgatcccatagaaagggtccctggtatgtatcacacttcagagaaagatttaccacaggattttgatttaatgagaaactttcagatttatccgggacaaaaaccttatgtctgcagtgaatgtgggaagggttttagccaaagtcttcatcttctagagcacaagaggattcacactggggagaaaccttacaaatgcagtgagtgtggcaaaagcttcagccatagatcttccctcctggctcaccagagaacccacaccggagagaagccgtacaaatgtagtgagtgtgagaaagccttcggcagcagctccacactcatcaaacacctgagggtgcacaccggagagaaaccttaccgctgccgggaatgtgggaaggccttcagccagtgttcaaccctcactgtgcaccagaggattcacactggggaaaagctctacaaatgtgctgagtgtgacaaagccttcaactgcagagcaaagctccacagacatcagaggatccacacgggtgagaaaccttataaatgtgctgagtgtgggaaaggatacagccagttcccatccctggctgagcatcagagactccatactggaggacagctttgccagtgcttacagtgtgggagaacctttacacgtgtgtctacccttatcgaacaccagagaattcatactggacagaaaccatatcaatgcaacgaatgtgggaagaccttcaaccagtattcctccttcaacgaacatcggaagattcacactggggagaaactttacacatgtgaagaatgtgggaaagcctttggctgtaaatcaaacctttatcggcatcagaggatccatactggtgagaaaccctatcagtgtaatcagtgtggcaaggccttcagccagtattcattcctaacggaacacgagcgaatccatactggagagaagctctacaagtgtatggagtgtgggaaagcctatagttacaggtcaaacctctgtagacacaagaaagtccacctgaaagaaaggctctataaatggaaagaatacggcacacctttcatgtacggctcatccctcgctccacatcagaggtgtctgaagggggagaagcctgaggaccttaattcatccctctga

SEQ ID NO: 2759 - DNA, 1598 bp, Rattus norvegicus
gaattcggcacgagaatcgctgaatcttgactcggcggtggttggctctcgctctcctctctctccctctccctctccctctccctctctctgcctcgggttctctctctgcgcgcgcaccgggccgctctccttcctccctctctatgtggctgcgcgggtgtgtgtgtatgtggatgtgtgtggggtgtgggtgtcccttacgtccttcctcctccccctccttctccttctgctcccccctcctttccatctcctcctcccccctcttctctccctcctcctggtcctcatcgcccctctcctcctcttcctcccctctctcttcctctccctgaattttctcctctcctctcaggtcagtccatggtattccgctcccccctagacctctattcctcccacttcttgttgccaaacttcgccgattctcaccactgctccctacttctggcgagtagcggcggcgggagcggtgcgggcggcggcggcggcgcgggaggaggcggcggcggcggcggcgggaaccgtgcgggaggcggcggtgctggcggagcaggcggcggcggcggcggcggcggcggcggctccagggcccccccggaagagttgtccatrtwccagctgcccaccctcaacttctcgccggagcagrtgrccagcgtctgcgagacgctggaggagacgggcgacatcgagcggctggrccgcttcctctggtcgctgcccgtggcccctggggcgtgcgaggccatcaacaaacacgagtcgatcctgcgcgcgcgcgccgtcgtcgccttccacaccggcaacttccgagacctgtaccacatcctggagaatcacaagttcaccaaggagtctcacggcaagctgcaggccatgtggctcgaggcgcactaccaggagrccgagaagstgcgcggccgccctctcggcccggtggacamrtaccgcgtgcgcaagaagttccctctgccgcrcaccwtctgggatggggakcakaagacccattgcttcaakgagcggactcggarcctgctgcgggaatggtacctgcaggatccctaccccaaccccagcaagaaacgagaactggcgcaggccaccggcctcacccccacacaagtaggcaactggtttaagaaccggcgacagygcgaccgcgcagcggcggccaakaacaggctccagcaccargccatcgggccgagcgggatgcgctcgctggccgagcccggytgccccacrcacggctcagcakagtcaccgtccacggcagccagtccgaccaccagtgtgtccagcctgacggagcgcgcggacactggcacttctatcctctcggtaacctccagcgactcggaatgtgatgtatgatagccaaggccgccctcctcctccttcccctcctccccctccaccttcccctcctcctcctagccctgctcctcttcctcctcttctactccatccctagaacaaaccgaaatcaggatacacagccacacacacacacacacacacacacacacaagtccatacacactcccaccccagccaaaaatatatttaaaaaaaaaaaaaaaaaactcgag

SEQ ID NO: 2760 - DNA, 1188 bp, Rattus norvegicus
atggccgcagaggcgacgttgggtccgaacgtgagctggtgggctccgtccaacgcttcgggatgcccgggctgcggtgtcaatgcctcggatggcccaggctccgcgccaaggcccctggatgcctggctggtgcccctgtttttcgctgccctaatgttgctggggctagtcgggaactcactggtcatcttcgttatctgccgccacaagcacatgcagaccgtcaccaatttctacatcgctaacctggcggccacagatgtcactttccttctgtgctgcgtacccttcaccgcgctcctctatccgctgcccacctgggtgctgggagacttcatgtgcaaattcgtcaactacatccagcaggtctcggtgcaagccacatgtgccactttgacagccatgagtgtggaccgctggtacgtgactgtgttcccgctgcgtgcacttcaccgccgcactccgcgcctggccctgactgtcagccttagcatctgggtgggttccgcagctgtttccgccccggtgctggctctgcaccgcctgtcgcccgggcctcacacctactgcagtgaggcgtttcccagccgtgccctggagcgcgctttcgcgctctacaacctgctggccctatacctgctgccgctgctcgccacctgcgcctgctacggtgccatgctgcgccacctgggccgcgccgctgtacgccccgcacccactgatggcgccctgcaggggcagctgctagcacagcgcgctggagcagtgcgcaccaaggtctcccggctggtggccgctgtcgtcctgctcttcgccgcctgctggggcccgatccagctgttcctggtgcttcaagccctgccsctcgggggcctggcaccctcgaagctatgcgcctacgcgctcaagatctgggctcactgcatgtcctacagcaattctgcgctcaacccgctgctctatgccttcctgggttcccacttcagacaggccttctgccgcgtgtgcccctgcggcccgcaacgccagcgtcggccccacgcgtcagcgcactcggaccgagccgcaccccatagtgtgccgcacagccgggctgcgcaccctgtccgggtcaggacccccgagcctgggaaccctgtggtgcrctcgccctctgttcaggatgaacacactgccccactctga

SEQ ID NO: 2761 - DNA, 2055 bp, Rattus norvegicus
  misc_feature (1490)..(1490): n is a, c, g, or t
ccgacggttggggtcgtgcaccgggtggactgatctgtttcccagaagttgggggcccgggagagcggacaggagccggaccagtcaccgcgtcctccagcagggggcgggcggcggcagcgctcctcagtgttcccgaggggcgggaagggggcgggctagcgtcacccgcgtccgtggcgatcgcggggcgcccaggacaccgctcagtatcccgcgcgcggacccccgccgctccccactccccgccgcgccctctcgcgctcccgcggccgggcaatgacgcgcaccgacccggcggcggggcggcgggaggggccccggcgtgacgcagcccgttgccaggcgccgccttataaacctcccgctcggccgccgccgagccgagtccgagccgcgcacgggaccgggacgcassggagcccgcgggccccgcgttcatgcaccgcctgctggcctgggacgcagcatgcctcccgccgccgcccgccgcctttagacccatggaagtggccaacttctacwwcgagcccrrctgcctggccwwcggggccaaggcggcccgcgccgcgccgcgcgcccccgccgccgagccggccatcggcgagcacgagcgcgccatcgacttcagcccctacctggagccgctcgcgcccgccgccgcggacttcgccgcgcccgcgcccgcgcaccacgacttcctttccgacctcttcgccgacgactacggcgccaagccgagcaagaagccgtccgactacggttacgtgagcctcggccgcgcgggcgccaaggccgcaccgcccgcctgcttcccgccgccgcctcccgccgcactcaaggccgagccgggcttcgaacccgcggactgcaagcgcgcggacgacgcgcccgccatggcggccggcttcccgttcgccctgcgcgcctacctgggctaccaggcgacgccgagcggcagcagcggcagcctgtccacgtcgtcgtcgtccagcccgcccgggacgccgagccccgccgacgccaaggccgcgcccgccgcctgcttcgcggggccgccggccgcgsccgccaaggccaaggccaagaaggcggtggacaagctgagcgacgagtacaagatgcggcgcgagcgcaacaacatcgcggtgcgcaagagccgcgacaaggccaagatgcgcaacctggagacgcagcacaaggtgctggagctgacggcggagaacgagcggctgcagaagaaggtggagcagctgtcgcgagagctcagcacgctgcggaacttgttcaagcagctgcccgagccgctgctggcctcggcgggtcacyscyaryyckkmgrgggwsrmgtgggggcgccgcggccaccytgggcaccgtgcgccctgccccgcgcgctccgtcyccgcgcgcgcccgrggcaccgtgcgtgcaccgcgcgcacytgcacytgcaccgaggggacaccgtgggcaccgcgcgcacgcacntgcaccgcgcaccgggtttcgggacttgatgcaatccggatcaaacgtggctgagcgcgtgtggacacgggactgacgcaacacacgtgtaactgtcagccgggccctgagtaatcacttaaagatgttcctgmggggttgttgctgttgatgtttttstttttgttttttgtyttttgttttttttttggtctwattatttttttgtattatataaaaaagttckatttctatgagaaaagaggsgtatgtatattttgagaaccttttccgtttcgagcattaaagtgaagacattttaawhaamhwykkydsgagaatgtttaaaaammwwwwrrrrrmagtagttggcttttgaaaaaaaattttttttcttccctcctgactttggatttatgcgagattttgttttttgtgtttctggtgtgtagggggctgcgggttatttttgggttgtgtgtggtggtgggtgggggtgtcgcatctgggtttttctcctcccctggcagatgggatgccagcccctccccccaggagagggggcagagtgccgggtcaggaattc

SEQ ID NO: 2762 - DNA, 857 bp, Rattus norvegicus
gcacgagggcagtgttccccagcgaggctaagcaagaagccggcgagagcagagacgcgagggtgggagccagcgcagagccggcgccgggcactgwgggggccaggagcagcccgcgcgccgcgtgagggactcgcacttgcaatatgactttggaggaattctcggccgcagagcagaagatcgaaaggatggacacggtgggcgatgccctggaggaagtgctcagcaaggctcggagtcagcgcaccataactgtcggcgtgtacgargcagccaagctgctcaacgtagacccggacaacgtggtcctgtgcctgctggctgcggatgaagatgacgaccgggacgtggctctgcagatccatttcaccctcattcgtgctttctgttgcgagaacgacatcaacatcctgcgggtcagcaacccgggtcggctggcaragctgttgctactggagaacgacaagagccccgctgagagcggrggcctggcgcagaccccggacttacactgtgtgctggtgacgaacccacattcatcacaatggaaggatcctgccttaagtcaacttatttgtttttgccgggaaagtcgctacatggatcagtgggtgccagtgattaatctccccgaacggtgattccccgaacggtgatggcatctgaatggaaataactgaaccaaattgcactgaagttttgaaatacctttgtagttactcaagcagtcactccccacgctgatgcaaggattacagaaactgatgtcaaggggctgagttcaactacaggagggctaggagatgactttgcagawggasagagagstgaramtraaggaggaagctgtgtgg

SEQ ID NO: 2763 - DNA, 3708 bp, Rattus norvegicus
ggaattcggcacgaggcgacagcggactgcagagtcaagatgcgcccgaaggaccaggtgcagagcagtgccggggacgggacggggtcgggggacccagcaacaggcacccccacgacccagcctgcagcggatcccgctccggagccctcggcagagcccaaacctgctccggcgcagggaaccgggtccggacagaaatcaggatcccgaaccaagacaggaggaagcttttgtaggtccaggatccgtggcgactcggacgcaccatggacccgctacatattccaggggccttacggtccccgggctactggcctgggcactggaagggctgagggaatctggaagacgccagccgcgtacatcggccgaaggcccggcgtgtccggccctgagcgcgcggcgtttattcgagagctgcaggaagcgctgtgtcctaatccactgcccaggaagaagatcaccgaagatgatatcaaagtgatgttgtatttgctggaagagaaagaacgggacctgaacacagccgctcgcatcggccagtccctggtgaaacagaatagtgttctgatggaggagaataacaagctggaaaccatgctgggctcagccagagaggagattttacatctccggaagcaggtgaacctgcgagatgatctccttcagctctactcggactccgatgacgatgaggaggatgaagaggatgaggaagaggaagagggagaagaggaggaacgagaaggacagagggaccaagatcagcagcacgaccatccctatggtgcccccaagccgccccctaaggctgagacgctgcaccactgcccacagctggaagccctgaagcagaagctgaaactgctggaagaagagaacgaccatcttcgagaggaggcctcccaccttgacaacctggaagacaaagaacagatgctcattctggagtgtgtggaacagttttctgaagccagccagcagatggcagagctatccgaggtgttggtgctgaggctggaaggctatgagaggcagcagaaggagatcactcagctgcaggccgagatcaccaagctacaacagcgttgtcagtcttatggggcccagacggagaaactgcagcagcagctggcctcagagaagggagtccacccagagagcctgcgagctggctcccacatgcaggattatggaagcaggcctcgtgaacgccaggaggatgggaagagccatcgtcagcgttcctcaatgcctgcaggttctgtcacccactatggatacagtgtgcctctggatgcacttccaagtttcccagagacactggcggaggagctccggacatccctgaggaagttcatcactgaccctgcgtatttcatggagagatgtgacactcgctgcagagaggaacgaaagaaggagcaggggacaatgccacccccaccggtgcaagatctcaagccgcctgaagatttcgaggctccagaggagctggttcctgaggaggagctgggggccatagaagaggtggggacagctgaggatgggccggcagaagagacagagcaggcatctgaggagaccgaggcctgggaggaggtggaaccggaggtggacgaggccacaaggatgaatgtggtggtctctgccctggaggccagcggcctgggcccttcacacctggacatgaagtatgtcctccagcaactgtccaactggcaggacgcccattctaagcggcagcagaagcagaaggtggtcccgaaaggtgagtgttcccgcagaggacaccctcctgccagtgggacaagctaccgatcatcaaccctatgagaggtgagagtaggtgagaccccccacccccaagggctcacttacctcaccttggtcccactcggtgtgctgatttgcatggactttgcatactatttgcatagtatttacatacttgcctccagtcccccttggctagaactgctgcctcagtgtttatttatgcaaaatttgcttacaagtccagctatccatccaccttcttcctgggggggctgaactgggaatcagggttggactatacactcctttgtacctcaacttcctgtctctgcccatcctctccctatccccaattcctctaccctcaagactccccagccccgcagcagcaaacaaacatggggggcgggatcgtggagcagcagcccatagtgccgacccaggactctcagaggctggaggaggacagggccactcactctcccagtgccagggaggaagaggggccttctggggccacctaggcctggaacgaaggcctctgccagcaaaggccacagttggaccaatcccccgggtgagtgtggggctcccgcagggtggtaggggcgggtcagggtctcctctgcctatctggaaaccccagttcctaggagatgctgtccgtgaaatcagatgatttagcattggatctctttctgtgttagctcctttcgtcttctggccctgtgggtgggtggatgtgattgtgcaccatttattagaagaggaatctgaagttcagagatctgagatgacttggccaaggtcatacagctaggagcagatctgagccggtgtctcttgaggactgaaaccctggcctggtctcactgccgtccacacctcctcctgctcccgtccttgagctccacctgaagctttggcagcctccctcatgtcggtctgttgccatttttggggggcaccagtgagtggaacatcactggctgcagcacagtcaaatcatgcaggttgtaagctgagtcagcacacccgtggctgaccacgggagaccgggagacctgagtaacggctagcggtggctttctgttgtctcctgacccggctgactgggtttgagggtgatctgtctcccggttcacccccttctcttcctggctttgctgwttctcagcagcctgaagaagaccctcagacagcwcgagrcccctccttccrctgcctggccaagtccgacccttccttgctttcctctgagacaggacccccacccccatgtctgtcagcagttctccctctgtcttgatagatcttwcsmbkcttgtaggacaggctgaaagaaccccagtccctcattctgaaactggggccaaagctgtgcctgctggmgccccagggggtggaagcaacctgtgggtagattggttggttacyagacccagctctgaratggtgtrrgtgsgcacrtccytagggtagscagttattggggggaccctttctatcccttgaacctctcrcgtaaagggacttccccagtcctggttggcttttggaamctggkccttcttgctgttttttamccttccccgtttcwaktactgcgtgtaacgtaaagtgtatctgagtragggtggtgggarccctstgyccagtgctgtctytgtctcctrtggsctgtgagtttccttstagwgttctactcttctccacctcwttgctcawacagagctgtggccttggcgcctgccmtgcwtstgcagtgcttcattgtctcgtagcttgtcagctkwyrmygkawbbrysdaygkgmyraakacstbrygarrtaamaravmwwvdravaktcgatttgtattgatgtatgtgccaatgtgggaaataaagaccttgtgagataaaaaaaaaaaaaaaaaaaaaaaa

SEQ ID NO: 2764 - DNA, 3845 bp, Rattus norvegicus
gactaacttgacagcagcatctcattttagctagtcaccggccccttccccagaatgcctgtgtgtctctagcctctgaagagaggtacttctcccggagccccggtgggccacggagctccggagaaccggggaggagacgcaccagccatgtgcccctgcgggtatctgccaaggaaccaggggcctggaatcgtctctctcctgctgcttcggaggcagaggtgagcaccgggcggccggctccaaccaaaggtgccgggaacccgactgtcatggtggccgtctgcagccagcctgaggcactcccagacgggtttgcagctgagcctgttgatctggtgtgggaagaagatggggagttacttgtctgtcccggcttacttcacctccagagacccctttaggtgttccgagtgccaggagtccctcaccaactggtactatgagaaggacgggaagctctactgccacaaggactactgggccaagtttggagaattctgccacgggtgctccctgctgatgacagggccagccatggtggctggggagtttaagtaccacccagagtgctttgcctgcatgagttgcaaggtgatcatcgaggatggggatgcgtacgccctggtgcagcatgctacactctactgcgggaagtgccacaatgaggtggtgctggcacccatgtttgaaagactgtctacggagtctgtccaggaccagctgccctactctgtcacgctcatctccatgcctgccaccaccgagtgcagacgtggcttctctgtgtctgtggaaagcgcctcctctaactatgccaccaccgtgcaagtgaaagagtaagtgttttgagagcctggcagcagaggctcacggtcagaacccacaggacttcctcctgacctccatcacctttctcctgacctgggctcttcatggttctcctgctccactacttttcagggtcaaccggatgcacatcagccccaacaaccgaaatgccatccaccccggggaccgcatcttggagatcaatgggacccctgtccgcactctccgagtagaagaggtggaggatgcgattaaccagacgagccagacacttcaactgctgattgaacatgaccctgtcccccagcgcctggaccagttacggctagacacccggctttctccccacatgcagagtagtggacatactctcatgctcagcaccttggacgccaaggaaaatcaggagggaacactgaggagacgttctctgaggcgcagtaacagcatctccaagtctcctggccccagctcccccaaggagccgctgctcctgagccgagacatcagtcgctcagagtcccttcgctgctccagcagctactcacagcagatcttccggccctgtgacctgatccacggggaggtcctggggaagggcttcttcggacaggccatcaagagctgggagggggggtcaggtgactcacaaagccacaggcaaagtgatggtcatgaaggagttaattcgctgtgatgaggaaacccagaagactttcctgactgaggtgaaagtgatgcgaagcctggaccaccctaacgtgcttaagttcatcggggtcctgtacaaggacaagaagctgaatctgctgacagagtacattgaggggggcaccctgaaggactttctgcgcaatgtggacccgtttccctggcaacagaaggtcaggtttgccaaaggcatcgcttccggaatggcttatttacactccatgtgcatcatccaccgagatctgaactcgcacaactgtctcatcaaattggacaagacggtggtggtagcagacttcgggctgtcacgtctcatagtggaagagaggaaaaggcctccagtagagaaggccgccaccaagaaacgcaccttacgcaagagtgatcgcaagaagcgctacactgtggtgggaaacccctactggatggcccctgagatgctgaatggcaagagctacgatgagactgtggatgtcttctcttttgggattgttctctgtgagatcattgggcaggtatatgctgatcccgactgccttccccgcacactggacttcggcctcaacgtaaagcttttctgggagaagtttgtcccaacagactgtcccccagccttcttccccctggctgctatctgctgcaaactggagcctgagagcagaccggcattctcaaagctggaggactcattcgaggcgctctccctgttcttgggagagttggccatcccactgccagcagagctggaagagctggaccacactgtgagcatggagtatggcctaacccgggactcgccaccctagccctggtccatccccctgcagggggacattccacagccagcattgccccctctgcgccctgtcctcgctgtgagcgagcaagcgggactgcctaggcttcctgtggattgacggcttgcttagaagcagaacaagccatccctacctccccaggaggcacttgggtgcagggaagcaattctccacaggtttgggcctagtttctgtctgtaaatccaacactcacctgaaagctgtgaagaggataaaagcctggattctagaccaagagtctgttactggggaccgcccgggacctctggactgagatgccgggagcctgtagctttacactaacctacacggcctgggcccgccgggccggatgagtggactggcctgagggcctctggttcagcaaggtgcaggacttgaagcgatagtatgagtttcagaaacggggccgtcaaaacgtgtgaaatgacagagcggtttctccttccatcctagccatgccctttggagcaggttttgaagagtcttagtagtggtaaaacctacaggatccaaaaaaaaaggactggtttctgctcagcagcccagggaccacatcagtgtgtggggaatttccacttcagcaccctgtctcaacaagcagtctcaaaaacaccaaagaaggtggggctggaaagaaagcggccctgccgtctaaaagccccacacccaggctggtgggctcagtcagaaacttaaggtgttgcctaacaatagatgggttctggatgccagtgtggtttgcctcagactttgggcctaagcagggagaagggggtcccattaatttctttgcacccttgtggcagctactgcataycctctaggatgtctggtccaggcagcaacttgggacaggcattggtgsmtgmtgagtcccaaactgagatatgaagagagctccctgagctggaccttgtagagtcyaccyctgttgtgctggyccagctyacwksctgakmcacactcgagggccgtgggcatgggaaactctaggggcactttccacccctggctaccaggtgtccagsgacyccgtagctcmccaaggttcgccatctcctaagtgggagctcacatcatatttaacacattgggaatgggtttggttataaatacgtgtgagggtttgtgctggtggggggatccggggagagtggctgctcttattagctttwatctgtggggtgatatgtgaaatattttgtacatagacaagatgaattatgggatgggaagtctttggccactttamwwrmwrwrwaramwrwacttgtgtgtggagtttgcaaacgtgccgcagagggaatcctgaactcccgacatcagtgtggttcagcgtcctgcggcgaattatgcacgcgctgtccccagcgagtgtgggagtggtgggcctgcactgggccatgaggcagactaaataaattaagcagttaacrgrgmaaaaaaaaaaaaaaaaaa

SEQ ID NO: 2765 - DNA, 2897 bp, Rattus norvegicus
aggcaccaaaccctagtttgccggggcctccggagcagctggctgagggttcctgtcgctgcctgggccgggtgtgacctcccgtccacacagacccagacrccwsyytggcmccctgcgktgscamrykrmtrcwsagyatkkckswkscagggtgtgaagccttcctattggaacctcggtgctgggacagtgggactcagagcagctctctagacgccaggtccacgctcatggctgatgatgtcaggtactaacaacgtcgcccaggcccggaagctggtggagcagttgcgcatcgaagctgggatcgaacgcatcaaggtctccaaggcctcgtcagaactgatgagctactgtgagcaacatgcccggaatgaccccttgctggttggtgtaccagcctctgaaaatccattcaaagacaaaaagccttgcataattctctagttctctctctcttsctccctccttcctctccctctctttctccccaccccaaaggtattgtccagtttttcctgtaagaaaaaaatatttgaatcccttctactttgaattttaaaggaacagaaaccattgtgaatgcctggagcctcctgacctagctggagttcgtcctggcctaactttagcctcatccaccccctcccgtcgagaaccactgatgtgacagtttttaagctccccttagttggcctggggaaagggttctgttggccaacggcgagcctagcaagtttgcggaccatagctgcagtcctcgggtcccacataaaacatgcaggtgcggtswcagawggctgagatggaaggatccccgaggcttggggactgcatcctagcagccagtaaactccagacagtgagaaacgatgcctccaaacacaaggcagaggaggatacccagccttgacctctggctccacacgcggcacacacaatgcaccctgtactacccagtgtcattctcgagtggccctgtcgtgtgcacggtgayagtgatgccctttctccagagagttggcccattctakaaacgggcatttgggtctccatacaaaggaagcacttgctggtatggccgagtgtgtaactttgtctccgaagcctgagatccatgtgttcattggtgactcctcgtttttctcccagttacacagatggttgtgagggcagaagtgcagatttaattatcttgaggtgattgagaaggwmcgatgggrttctccatcccacacgtgactgtgcctccagatcccccttcctgggtcaaactattttttaactaactagaacccaagtccctcaatgtgtggactgtggccattttctgcactccttcattgggagattcatctctgaccacacccccaacccctcactgagggattctagacggggctccacccctgaccacgccccagtcccccattgagggattctagaaggggttccacctctgaccatgcctcagccccctactggggattctagaaggggctccaccctgaccacgcccccagacccttactggtaaattctagatggcactccacttctgaggcgggcatcttctctattgtgtgagcagagccctagagtccaggctggcctggactggaactggagatcttcctgcctctggctccggagtacctacctgataggcctgtgttgcatgcctggcatcggattggacggaagatgacagaccgtctgtctatgacagtgacagtggcaggtctagggaggacacagcttaggtgtgccagtgtggtctgcagccatacacaaaggcatctcaagcatttgagactccagttacctctttctcctgccggatcagtgtgggagcagaaatgaagccagtccagttactccctgcagctctggtggaaatctgcttcccaaaccctgtgccaggctcatccctggacagttgctcaaactgcccatgggcaaagtgaatggagctggcagatctggctcctagcctattaggcacaacctaccacctagataaggtggcagccccccccctccccagtccatttgatggaatcagggaaagaagtttgggatgtgactaagggggaggggcactgcaggtgctaagagaggaccctgtttccccctccatgggccacagagagcacagaccaagggtcaggcccctcctgtgcactgactcccaattactggtcagagagggccaggactttggtgagcctgactctcagaacctgtggtggaatcagaaaagccagtgtccctccagaactgcagccacctttcattaggctaggaaccaggtcccagcaggtgtgtctccagctgcactggcaggggacagtgaggagagaggaaaggacatacattctggggaccgggactgcagaacacccagccagtatggtagaaacctgggttccaccccaagctcgcaaaaaaacaggcatgggcactggggatgtagaggcaggaagatcagaacttcagggtctttctcagccacaggatgggctcaaggttagcctgggctgcatgagaccatgtctcaaagacagaaatctcagtgtgctctctcatgttcctaacacgcctgattgtttccctctggaggctgctgtgccagcctggccagcctgcgtttggtcgcagccttgtttctcagctctgggacaaaaactcaaatctgcatctctgcccacacctccagttccccctccccgggtgactcacaggccaaggacaaagtggcctcttgctcccagggagggtaggatgtgctggtgtagcctgtgtacgtcctaagcactggagccctgcctcggcctagagacgcttagggaaaccagaacacatcagagcaattaggagccaagaatggtggc

SEQ ID NO: 2766 - DNA, 1675 bp, Rattus norvegicus
tgctaaacccgaagaagccaagcttccctgaaggtgaacgacaccagagagccgtgtgacgatgcaggctgtgtctgttggactgttcctcttcagtatgacctgggcggcaccaaagctgaatgaagatggcagcagcggcggtaaccaaggcaacatccacttagcatctgtgaagcctgagcccatggtgggtaaaggaacagagggtgggcgagatgctccccttcacctgcttgaccagaacaggcagggtgccaccctcctcagaaatatcactcagcctgtaaagagtctggtgacggggactgaagtacagagcgacagaaacaaagagaagaaacctcagagtgttctaagcgtaattccaacagatgtccacaatactaacgactactcagaagatacagagaaccaacagagggatctactactccagaacagcccaggacaaagcaaacacacccctcgggcccgacgaagcacgcactacctaacacatctcccccaaatcagaaagattctcagtgacttcgaggacagtgcttccccagaccttctagtgaggggggataatgatgtccctcctttcagtggagatggacaacattttatgcacactcccgacagaggaggtgctgttggatctgatcctgaaagctcagctggtcaccctgtgtcaggctccagcaatgtcgagattgttgacccacacacgaatggactgggctctaatgagatcccagggagagaaggtcacataggcggtgcctatgcaaccagaggaaaaactgcgcagggggcaggttccgcggatgtgagccttgtggagggcagcaatgaaatcacgggcagtaccaaatttagggagctccctggaaaagaaggaaacagagtcgatgccagcagccaaaatgctcatcaaggaaaagtagaatttcactacccacaagcgccctcaaaagagaaggtaaaagggggcagcagggagcacacagggaaagccggttacaatgaaatccccaagagcagcaagggcggcgctagcaaggatgcggaagaatctaaagggaaccaagtaaccttgactgaaagccaaaggttcccaggcaaaggcaaaggccagtcttctcacagtcttggtaatgaggttaaaagtgaagaagactcttctaatagtctcagtagagaggggattgcaatagcacacaggagaacaagccaccctacacggaatagggggatgtcacagcggagaggctcytgggcctcgagaagaccccatccccaccggcgcgtaagcacccgccaaagagacagtagtgagtcatcatccagtgggagttctagcgagagcagtggtgactagaccccggggttgaaccagttcccagctctggtcctggagaaagagaggacgcagcagggactgagcaaggtaccagacttggtcacctccaggacactgtgctgttttagtggttgtaataagaatccctactcaaagttctaatgctttctgaataaaaactttcgtaagaatttatataataggtaatatttgactaggcggcccattaaaatagtctgtggatgtcacaggtgccttgatatgtgatttgctcttcagacatgaaaataaagaggctttctctatgaaaaaaaaaaaaaaaaa

SEQ ID NO: 2767 - DNA, 2208 bp, Rattus norvegicus
ctcaacacacagatgatgtttttggtaaagggtgagaggagccaggatgtagtttaggactctggggtgactgaaccagacaccagcaactaggcctattcggtccaggaagaaaggtttcctggaagaggtttccggcacccccccccgcccccagggaccatgcatcagtcctactgacccaggagtaggggcctgtgggcaggacacctggaatgggctgtgtgttctgcaagaagttagagcctgcacccaaggaggatgttggcctggaaggggacttccggagccaaggcgctgaagaacgctattaccctgaccctactcaaggccggtcttcgtccatctcgcctcagcccatcagccctgctttccttaatgttggcaacataagaagcgtctctgggacgggagtgaccatattcgtcgccctgtatgactatgaggccaggacaggggatgacctcaccttcaccaaaggcgagaagttccacatcctgaacaatacggagtatgactggtgggaggctaggtccctgagctccggacgcacgggctatgttcccagcaactatgtggctcccgtggattccatccaggctgaagagtggtacttcggaaagatcagcagaaaggatgcagagaggcagcttctctccgatggcaaccctcaaggggcctttctcattcgggaaagcgagaccaccaaaggtgcctactccctgtccatccgtgactgggaccagaacagaggcgaccacataaagcattacaagatccgaaagctggacatgggtggctactacatcaccacgcgggcccagttcgaatccgtgcaggacctggtgcggcactacatggaagtgaatgacggtctatgctacttgctcacggcaccctgtatggtcatgaagccccagactctaggcctggctaaggatgcctgggagatcgaccgtaactccatagcacttgaccgcaggctgggcaccggctgctttggagacgtgtggctgggcacgtggaactgtagcacaaaggtggcagtgaaaacgctgaagccaggcaccatgtcgccgaaggccttcctggaggaggcacagatcatgaaactgctgaggcacgacaagctggtgcagctgtacgcggtggcgtcagaggaacccatttatattgtgacagagttcatgtgctatggtagcttgctggatttcctaaaggatcgaaagggtcacaacttgatgctgcccaatctagtggacatggctgcccaggtagcagagggcatggcctacatggagcgcatgaactatatccaccgagacctgagagcagccaacatcctggtgggggaacatctaatatgcaagatcgctgactttgggttggcacgcctcatagtggatgatgagtacaacccccaacaaggaaccaagtttcccatcaagtggacagccccagaggctgctctctttggcagattcactgtcaaatcagacgtgtggtcctttgggattctgctcactgaactgatcaccaagggcagagttccatacccaggtatgaacaaccgggaagtgttggaacaggtagagcacggctaccacatgccatgccctccgggatgcccagtatccctgtatgaggtcatggagcagacctggcgtctggatccagaggagaggcccacctttgagtacctgcagtctttcctggaagactatttcacctccacagaaccacagtatcagcccggagaccagacatagcctgactgggtatcagtgaccctctgagactatgtactaacccttgccaatcsscasgrsrctctggtcccagtgcccgagacttggwaccctgtggaatcctagcacgtcggaaaaagtccgaagctctgaagccattttatagagggtgcaaatggagactagaaattcatctcttaccttcgctggccccaagcactctttyttcccttcccacccatgccccatgcaaaaatytagggcacccagtcatttcacagacggagtaaatggatgctcagagttcatctctcgtacactctgaccccagtaccatktttcctgtcccattaggctcstacgtaccgttagtcccccccccatctcctaaaaatactcatacattgtgtagttatttataaaattgtatttctcttcttccamwwaaaaaaaaaaaaat

SEQ ID NO: 2768 - DNA, 8236 bp, Rattus norvegicus
gagctctggagtgtctggttggttgatattgttattcctatgtggttagaaaccctttcaattcattcagtccttcccctaactcttcaattgggatccttgtgctcagtctgatggttattggcaagcatcctaatctgcatcactaaggctctgacagagcctctcaggggacagctatatcaggttccctgtcagtgcacttcttggcatcagcaatagtatctgggtttggtgtctgtatatgggatgaatccctaggacaggcagtctctgtacggcctttccttcagtctctgctctactctttgtcccagtattccctctagacagcagcaattgtgggttacaattttggagatgagtgggtggcccatctttcaactgggggttgtgtctaacctctggatatggtctctacaggttctcccccctctttattgaatatttcagttaatgtaatccctgttgggccctgggatattcttcctttcctagcatcagggacgttctggtagctatcctgggttccccatccccctttgctacataactctgttgaatttcctgattcactaccatctcctcccatacctgatcctgtcccctttctccccactccctgctctatttcttccaagtccctccaatcctctacctactgtgatcattttgttacctcttctaagtaggactgaggaacctacacattggtgttatctttattcttcttaggtttcatatggtctgtgagttgtattatgtattttcctaacttcttttgggctaatatccacttatcagtgagtacataccatgtgtgtttttctgtgactgggttacctcactcaggatgatattttctagttccatgcatatgcctgagaattttatgaagtcattgtttttaatagttgagtactccatagtgtaaatgtaccatacttactgtatgcattcctcttttgaaggacatctgggttttttccagcttctggttattataaataaagttgctattatcatagtagagcatgtgtccttgttatatgtaggagcatcttttgggtctatgcccaggagtggtatggctgggtcttcaggtagtactatgtccaattttctgaggaactgccagactgatttccagagtggttgtaccagcttgcaattcaagctgtaatggaggagtgttcctctttctcctcatcctctccagcatctgctgtcacctgagtttttgatattagccaatctcactggtatgaagtagaatcacagggttgttttgattttcatttccctgatgactaaggatgttgagcatttctttaggtacttcttggtcattcaatattcttcagttgagaattttttttttatctctgtgccctattctttaatttggttacttggttctctggagtctaactttttgagttcgtggtttattttggatattacctttgcatgatatgtaagattggtaaagatcttttccaatctattgggtgccaattgtcctattgacagtgtcctttgccttacagaaggttttcagttttatgaggtccaattttcaattattgatcttagagcctgagccactgactggtgttatattcaggaaaatttcccatgtgcccaagtgtttgaggatttcccccactttctcttgtattgcttttggtgtatctggttttatgtggaggtcctaggtccctttggacttgagctttgtacaagaggataagaataggtcaatttgcatttttctacatgctgacctctagttgaactagcaccgtttgttgataatgctgcctmkwcagmctycattctttgygsagksagrgsctccctgcctckttgggagrcarygyagkaaacactgcttcsgtgctccagamgcctaagggctttcktyrcagcgatgccraagcgggggaagagagyggcagbkbaagacrgggaagaacccaastccgagccagagaccaagaagagtaagggggcagcaaagaaaactgagaaggaggccrcaggagaggrccctgtcctgtatsaggaccctccagwtcwsaaaacstcasccagtggcaaatmtrccacactcaagatatgctcctggaatgtggatgggcttcgagcctggwttaaaaagaaaggyttggattgrgtaaaggaagaagcaccagwyatcttgtgccyccaagagaccaaatgctcagagaacaaactcccggctgaactgcaagagctgyctggactyacccatcagtactggtcagctccatcagacaaagaaggatakagtggtgtgggcctactttcccgccartgcccrctcaaagtctcwtatggcattggtgaggaagaacatgatcaagaaggccgggtgattgtggctgaatttgagtcmtttrtcttggtaacmgcctrtgttccsaacgcaggmaggggtctggtaagactrsmgtacmgacagcgwtgggatgaagccttymgaaagtttctaaaggacttggcttcccggaaacctcttgtgctgtgtrkrgatctcaatgtrgctcatgaagaaatagaccttygtaaccccaaaggaaacaaaaagaatgctggttttactccccaggagbsccaaggctttggggaawtgctayaggytgtaccactgkctgacagyttccggcatctytaccccaacaytgcctasgsttawactttytggacttacatgatgaawgccygctctaaraatgttggttggcgccttgattactttttgytgtcycastytyttttacctgcwttgtgygacagcaagatccggtccaaggctyttggcagtgaccactgtcccatcaccctktrcctagcactgtgacactcccctcragtagcttyatgctgggaaawagcctcctytccycsaggagaccagtgbgttatytyttyttcaggkgtttactcccctytaaaccaaamttytggtttcctttaaacaatccaagtgaaataaaagwmswamwtktcwrycttttttccagcatttggcttttttttgtcagagatcaaatgaacataggtatgtgggtcatttctggtcttcagttccatttcattgatctacttgcctgtatctgtactaataccatgcagttttgatcattattggtttgtagtacagtttgaggtcagggatggtgattctctagaagttcttaaattgatgagaatagttttcactatccttgttttttttgttattccaaatgaatttgcaaattgttcgttctaattctatgaggaattgagttggaattttgatggggactgcattgaatctgtagattgtctttggcaagatggccctttttactatattaatccttccaatccaggaacatggaagatctttcaatcttctgaagtcttcttcagtttctttcttcagagtcttgaagttcttgtcctacagatctttcacttacttgcttagggtcacatcaagatattttatattagttgtgactattttgatgggtgtcattccataatttctttttcagcctggttatcctttgagtagagggagcttactgattttttttaaactaatttcatattaaaccgcattgctggcattctttgttagctgtaaaagttctcttgtagaattttggaggtcatttgagtatattatgtcatctgcaagtagtgatattgagtttttcctttctaatttttatcctgttgactttttttgtctagggtttaatagtaattgtggcttcatagaaggaattaggtagtgctccttctgtttctattttgtgtcatggtttgaagaatattggtattaggtcttctttgaatactgcactaaacccatctggtccatggcgtttttttgtttgggtgacttttaatgactgcgtctatttctttaggggttgtaagactgtttaggtggtttatctgattctgaattaactttggaatctgctatttgtctagaaaattatctatttcatccagatttgccagttttgatgagcgtagccttttgtcagaggatttgatggtttttggatttctttggtttctgtttttatgccttccttttcatttctgattgtgttaaattggatactttccctgtgccctttggttattctagctaaggttattttgttgattatcccaaagaaccagtttctagttttgttattctttgtatagtcctttttgtttctgcttggttgattttagtcctgagtttgattatttcctgccttctacaagtgggtatatttagttctttgttctagaactttcagatgttctcttaagctgttagtgtgtcctctctccaatttctttttggaagcactcagagctatgtgttttcctctaagcattgctttcactgtgtcccatatgtttgggtatgttgtgcctttattttcatttaattctaaaaaagcctttaatttctttatttcttccctgaccacattattattcaatagaaagctgttcactttccatgtgtatctggttattgaagaccatccttacttagtctgtggtgatttgatatgatacatgagattatttcaatctttttgtatctcttgagacctgttttgtgaccagttatatgttaaatttttgagaaggtaccacgaggtgctgagaagaaggtatattctttcgttttaggatggaatgttctatagatatctgttaaatctatttggttcataacttctcatactttgagtgtgtctctagtttctgagtccatgatttgtctattggtgattgtgaggtgttgcattctcttactattattgtttgaggttcaatatgtgctttgaactttagtgaagtttcttttgtgaatgtgtatgtccttttatttagagcctagatgtccagaattcagagttcatcttggtagatttttcctgtgatgactatgaagtgtccttcctcatcgtttatgattacttttgggaagttgattttattagatattagaatgactgctccaactttttataggtgaccatttgcttggaaaagattttccaaccttttattctgaggcagtgtctgtctttgtcactgaagtaggtttcctctatgtagcaaaatgctgggtcctatttaagtattcattctgtgagtatatgtaatttttgtgggggcgggggttgattccattgatgctaagagacaataaagatcagtaatctttcccttccttgttagaggtgaaataatgtttgtgtggctatcttctttaggggttctttaaagaagattataatttgctttttcttgggtgtatttttgttccttgtgatggagttttccatttattatctttgtgtggctggttttgtggaaagatagtgtgtaaatttgattttgccattggatatcttggtttctccatgtatggtaattgagagttttgctgtgtagagtagcctgggctggtatttttattctcttagggtctgtgtgacatctgcgcaggatcttttggcttttagagtctctgctaagaagttacttgcccttttccctttctgcttttaatactctttctttgttctacacatttggtattttgattattatgtgactaggggaatttttttctggccaatctatttggggtactgtaggctttttgtatgtttatggccatctgtttctttaagttaggtaagttttttctgtaattttgttgaaaatttattggctctttgagttgggaatcttcactctcttctatgtctattatccttttttttttttttttggtgttttcattgtgtcctggacttcatggatgttttgggttaggagctttgtgcattttgtattttctttgactgttgtgtcaatgttttctatggtatcttctacacttgagattctttcttctagtccttgtgttcagttggtaatgcttgcatctgtgactcctggtctccttcctaggttttctatttctgggtattcttcttttgtgatttctttattgtttctatttccatttttaaatcatggatggttttgttttattcctttttctgtttgtgcttttctgtatttctttagggatttatgtgtttcccctttaaggtcttctatctcttaacctttgttcttctgtatttctttaagggggttatttaaatcctctatcatcatcacgagatgtaattttaaatcagaatcttcttttccagtgtttttgggtatctagggcttgctgtgttcaaagaactaggttctgatgatgccaagtagccttgtcttttgttgctgaagttcttgtgtttgcctcttgagatcttcttatcactgaccttgctgtatctgactgtatcttgtccctcctgtgagcctgtgagcatttaatcattggtatgtcagactcctggaaaaccaggtttctccacgaagcagacataaacctgaagggtcctgttaccatctactctagaggtcatgtgtcctgttggcttctggtggttcccacttggtccggatattggagcaattgtaatagtctcacctatgatccctactgtgttagcactcctgggagaccagctctctccaggtgggatttatgtatatcttacttgttcttgatataaagccagtctactttgcttctcacacctcagtacttattctgctttcagtttgaaatgcagccaaaaataaggataattctttaattgcaactttgcctcttaacaaattcaaagaaacatatttaaaattataagtattttattaaagcaaatattaataaaatgcaaataaaaaataaaatactaaaatttcttcataaatattttacattatagagtcaaatctagaaaattgtgttattttgtacaaatagtttactcttggtacgtatgttctattctatacagtctgacttagaaaaataaggtctttaagtaaatgaaattaaaaatattgcttgttataatgacaagtagctgaaattccagctacttaatctacataaaagttacatggcagcttaagcctagttgtttaagagcagcccaaacaagccaggccattggacaagcaggcttttatatcatctggtgttacatgttttttctaactttaatgttttaaaaaatgtacctattaaattttgaagtttgaagagcagaagtctttgaatatttaaataaaatatgaaactgaaattttcgacgacttttttgtaggcaaaaatttcaggtttgaatcaggattgatgaatggctaatggagtgccatacaaaggattgagcacatactgaataaaaaccattagcactgtactggctaactgtatgtcaacttgacacaggccagagtcatatgggaggacagaaccacaatagagaaaatagtatccaactataaggcatattcttaatcagtgtttgatgggggacaggccagcccattgtaggtggttttgatagtttgaggtgtagccttattgtataggtgtctcactgtgggcatgggatttagtacccttgtcctagccacttggaagtcagtcttctctttgcctttggaacaagatgtagaactcaggttctcctacacagttcctgcctggacactgccattctcctgccttcattataatggactgaacctctgaacctataaggcagccccagttaaatgtttttataagagttgccttagtcctggtgtctctttacagcaataaaaccctacctacatcagtggttcgttgtctgggctgatagtcctaggttctatatcaaagcaggttgagcaagccatggaggtgaaaaccagtaagcagcgctcctcgaggtcctttgcatcagctcctgactgcaggatgttgcccggtttgtgttcctctcttgacttccttcagagataaagaggaatatggaaatatgtgtgaaatatgtctgtgagtgtgtgtatgtatacatgtgctcataaatgtgcacatgtacaagtgactgcaaaggccagaagagagtatctggtcatctgtcttggagttataggtggttgtgacacaccaggcatgggttctgtgaacttaactgaaggatttagggagaccagcatgcatatttaacatctgaaccctctctccaacttcccctttctttttaagataatgtttcagatc

SEQ ID NO: 2769 - DNA, 1081 bp, Rattus norvegicus
cctccttctgctgttgctccccatcsccccgcggccggccggttccagccctcgccccgcgtcccctgcccgcgcccccgccccgggccccgccatgggcctcacggtgtccgcgctcttttcgcggatcttcgggaagaagcagatgcggatccttatggttggcttggatgcggctggcaagactaccatcctgtacaaactgaagttgggggagattgtcaccaccatccccaccataggcttcaatgtggaaacagtggaatataagaacatctgtttcacagtytgggatgtcggaggccaggataagattcgscctttktggcggcactactyccagaacactcagggcctcatctttgtggtggacagcaatgaccgggagcgggtccaggagtctgctgatgaactccagaagatgctgcaggaggatgagcttcgkgatgcggygctgttggtgtttsccaacaagcaggacatgcccaatgccatgcctgtgagcgaactgactgacaagctggggcttcaacacttgcgtagccgcacgtggwamrwccagsccacctgtgccacccaaggcacaggcctgtatgatggtctggactggctgtcccatgagctatcaaagcgctagccasccaggggcmggcccctgytgcccggaagytcccgcgtgcatcccgggatggccagactcccgggactcctcaggcagtgcccttccttcccacttttcctccccacagacaggcctctgctcytgtgcctgcctgcatgctctctcttgttgttggagcctggagccttgctctytgggcacagagggttytgctctcctgcctgctgggacctgtggaagggcttcctggccaaggccccctcttccaggggaggagcaggratctggatttaatttcgttttggttttggttttywtggtttttttytkttttgggtgtacccttgggsccaggtttggggggaggaaagtgagggcyycgggtggtgytatgatgtgggactggatattgagtaataaatttgctgtggtttgwwmmvrraaaammwmrwrmmraaa

SEQ ID NO: 2770 - DNA, 1769 bp, Rattus norvegicus
ctttaactttttttacttagaacaatygkccgkgtrkwktabmkgtgttmcttttakatgkcwtyratgwagagtaaccgttctacttgcwkwttgwtcwggttgcagaattcagctacgatggggaacgtttttgaaaagytgtttaaaagcctattygggaaaaaggaaatgcggattctcatggtgggcttakatgcagctggcaaaacgacgatcttgtacaaactgaagctgggagagattgtgacaaccatccccaccatasgtttcaacgtggagaccgtagaatataaaaacatcagcttcacartctgggatgttggtggccakgacaaaatcakacctttgtggcgacattacttccagaacactcaaggtctgatattcgtggttgatagtaacgacagagagcgggtcaatgaggcccgggaagaactgaccmkmrtgcyagmakwmkwtgagctcagagacgcagtcttattggtgtttgtaaacaaacaggatcttcctaatgctatgaacgcagcagagatcacagacaagcttggcttacattcacttcgccagagaaactggtacattcaggctacctgtgcgaccagtggagatgggctttacgaaggcctggactggctctccaaccaactcaagaaccagaagtgatcagaagcagcccattccccatgccttgtggcaaaggcagctggcctttcccgtgtgcatgtgagtgcgtgaggagccatgtggccgtgtggctgggagtggggcagctttctcacaccgtgccttatccacgctatacgaacaccagtactccattttaagaaaaccagtgttacatttggaatgctaccgtccatttcacgagctttgatggtcttttcgctgaggcctccccggtgtgatagccagaatatctctaggctggaaaagaagagagctggaggcaggcaggtcccgttgttgccatcctgggtttggcctctccacacactcggaatcccgttggactttggtgtccttttacaaaaagaaaggaagggctgccattctttccattgtgccaaagctagcagctcacttgtagtgctttaaagctgtcaagaagaaggatacgttattaccacagtgtgagaggttcagaggggaatacttccccagagttctgttagttcaaactgacgcatttagctgttttagtccaaggaatcagtgacctttttcattagagtatcaagactgtwacactagagaagtttccagcctgtcccatacttgccaaacggaaactctgtgggctgctggcccaacaggaggccagaactcttccctaagcctcctggtccacagcggagtaaaggttgtggggagtgaagtgaggtakctcttgtgtctggcatcacgtytcagtcccctgaggctgcttctcccacttctctgctctgtgctgagtgttcttcacatgsagcagacagtgctcctggtggagttgtcactgtgtccccttgtccwggtctactgtgggcttttgattagtatctgtttcyagaaccgcacacccgtgagttctgagtgtgtgtgagaaagtcaggaggttaatttagaagatgaaggtcccagtggcccccatactccctgggtggtgctaaactttgctctgagaagcgccttttcttcagactgctctcactctccctcatcaatggcagtggcatctgaagagcagcctggatatgtgtgctgtgtcgtcctgcagatagttgata

SEQ ID NO: 2771 - DNA, 1719 bp, Rattus norvegicus
  misc_feature (1682)..(1682): n is a, c, g, or t
gacagccgaacacttaacgccgcgccggagccaccgcaccagtcgccgagcaggtcccggtcccgctacgtcgtgtcccgcggctctgccgacactccggcctgagagacgggtcttcagccttttctcttccgcccactcagttgtgagccggaaccgtgaaggcccgagggcggaccagaccctctctttttttgaccatcaagtgccaccaccgctatgggcctcaccatctcctctctcttctcgcgcctcttcggcaagaagcagatgcgcattttgatggttggattggatgctgcgggcaagacgacgattctgtataaactgaaactaggggagatagtcaccaccattcctaccattggttttaatgtggaaacagtagaatataagaacatttgtttcacagtttgggatgttggtggtcaagataaaattaggcctctctggaggcattacttccagaatacccagggtctcattttcgtggtagatagcaatgatcgtgaaagaattcaggaaggagcagccgtgctgcagaaaatgcttctggaagatgagctgcaggatgctgwgctgctgctttttgccaacaaacaggatttgccaaawgctatggccatcagtgagatgacagacaagttaggtcwysagkctctccggaacagaacatggtatgtccaakccacttgtgctacacaaggaactggtctgtacgaggggctggawtggctgtcaaatgaactttcaaaacgctaaatgaaactggatatctaaccaaggacatgtttgatwgaattggtctargcttgttacaacaaaattagtttgcatcttggttattaaaggatatctgagacggtttgggcagwaattacagcrttyadarsttgktttgktgccaattattswykascaagaacaatgttgctskttakcaatatgcttggswykargagawattctccttgsgggawaaaagwgtccattattatacttcccctgwacctgaatgcctggatagatwgcgattgygacmcccytaaataaatctgttttgagwgytytttgagcccacaccaataatgttttwawgttmcccscttggaactcactgatacctatmattcctcrggcwgtctgctgagttaaaaatgtagcattccatttgtatttatttcccccttgccaaaaagatttttctaataatgcttgtactggscagggatgagctccacaacactattcagttttcttgtactgaggattcccccacctycctcacattattgactcctggcttctatcarccaaactttgatgtastttggatttgayagctaattcwgggctggtttcaaagagttcatattgagataacttttaayactcagcamawtgkcttcctttatattatcttttttatgkygcatgkygccttttggaatcagcctgactctttgcccmgcatatgatagktctgctggtattttactgkttactgrtgaacatatcttcattaagaattttttgaaaactcatcaaattcaatgaataagttttcttcataacccatttggaattwttcctaataaaatgattttwaaaaacatgattgtgtgttcttttgagcctttgcaatatttgaaactgatttccttacataacaaagtggattntcatattttacatagtatggacaaattccagtgaatt

SEQ ID NO: 2772 - DNA, 1156 bp, Rattus norvegicus
agcaggcacgttcgcgcaagccgggccgcagggcgtcctcgcggcggggcggctacttttcgggctcgcagcggcggcggcgttgtaggctgaggggacccgggacacctgaatgcccccggccccggctcttccgacgcgatggggaaggtgctatccaagatcttcgggaacaaggaaatgcggatcctcatgctgggcctggacgcagccggcaagacaacgatcctgtacaagttgaagctgggccagtctgtgaccaccattcccacggtgggtttcaacgtggagacggtgacttacaaaaacgtcaagttcaacgtgtgggatgtgggcggccaggacaagatccggccgctctggcggcattactacaccrsgasscagggtctgatcttcgtggtagactgcgccgaccgsgaccgcatcgatgaggcccgccaggagctgcaccgcattatcaatgaccgggagatgagggacgccataatcctcatcttcgccaacaagcaggacctgcctgatgccatgaaaccccatgagatccaggagaaactgggcctgacccggattcgggacaggaactggtatgtgcasccctcctgtgccacctscggggacggactctatgaggggctcacatggttaacctctaactacaaatyctaatgagcgccctccacccagcccccsgaaggagagaaatcaaaaacccattcataggattatcgccaccatcatcacctctttsaattgccactctcttkwwtgaaactgaactygagttactgttytaccgtttagtggggttgggggtwttmtttgttccccttaccccccctstthtatttccktkcggcwwtgsrttargatgctctgatctgacatwtgacacgaatacagtkmtatatgctmttgtgacttccagcaaacggggtggggtaatagcaactcttggtaaagtcctttataataatggtwtgattttkytwttyatttcgagagaatctccccccatgtatgcctttttcswttttgsccagtttyttatcacttgctgkagawggyktakwtkgymtkcatgcagaytatgtkccaagtctgtttcatctagtaaactgaaaattaytgcktdwdmaaaaaaaaaaaaaaaaaa

SEQ ID NO: 2773 - DNA, 1973 bp, Rattus norvegicus
cacgaggcgcagtcgtagactcagcctgtctccgcaggagaggagcttctgctggcgtgactgaactctgaacgttagctagagccatggaaaccaaaggaggaactgtgaaagctgcttcaggattcaatgcaactgaagatgcccaggtcctgaggaaggccatgaaaggtctgggtactgacgaagatgccattatcggagtcttagcctgccggaacactgcccaacgccaggaaatcaggacggcctacaagagcaccattggcagggacctgcttgaggacttgaagtcggagctgagcagcaacttcgagcaggtgatcctgggcatgatgacgcccacagtgctgtatgacgtgcaggarctccggagggctatgaagggagctggcacggacgagggctgtctgattgagatcctggcctctcgcaaccctgaggagatccgtcgcatcaaccagacataccagcagcaatatggaaggagccttgaagaggacatctgctctgacacatccttcatgttccagcgagtactggtgtccctgacagcgggtggcagggatgaaggaaattacctcgatsaygmgstcgtgargcaggatgcccaggatctgtatgaggctggrgagargaratgggggmcgratraagtgaagttcckargcattctctgttcccggaaccggaaccacctgctccatgtgtttgatgaatacaaacggatctcacagaaggacattgaacagagcattaagtytgagacatctggaagctttgaagryrckmkgctggctatagtgaagtgcatgaggaatawacckgsctattttgmtgmarggytkkmtwmmtycmwsaagggcttaggcactgacgacagcaccctcatcagagtgatggtgtctcgascagagattgacatgctggacatccsggcaaacttcaagaggststacgggaagtctttgtactcttttatcaarggcgacacttytggagactacaggaaggttctgctcattctctgtggaggagatgattaaaakcamggtgcasgacggaaggcttcttaacactgaktttktttttaacttcatttttctgcmctgctattaacattatctcaaatgcttatttccaattaaaacgcctmcagttgcctcctarrawmmaramwrwwawwatcgtctataattagtcattttgatgccttaaacttgtactttcaaagcttttaagacatacgtggagatttagaattagaaattaaaatgtgctccatgtctttatcarawwawwwmmwmrwwwrwrwwttgtagagatttgaatgcactaaatccttctagattttctttttttggtacgaacasaacakaararaarmmmttktcttccctgggaagtcagtcatttctttatgtgggaccatcagcgtctcttactgagatwagccatctggtctcctattttacaacagatccaaagttctcatgagccccctttctttggctwtgcctgtcatgttagctgacagttgctgagcctggtaggggsaggcttcatctcattgtaccctgccaccattttctactcgtgaggtgtaacaaagtaaccvgcacatcaaacaagttcaatttcaagcgtggctaggcagaccacgtgtgtttgtcagtcatgctgaacattcctcagttttagggttactaccctaatcttgctcaagtgatggtcaagrgtggactmggccaaggttgtcctggtaatgrgatgctmtgggtgtggctwgcctaagaagagtttttttytgctaaaaatagttcatctctmtgaaycgtttatttgatccccmctgtgcccttttgatcttattcagaaactgwgcttgcatgtaatcctcaagtttggtttgtwtacaacatgrgacatttttaattaaaaatggtrrctttawccamrwrraaaaaaaaaaa

SEQ ID NO: 2774 - DNA, 2739 bp, Rattus norvegicus
ggaattcccgkctatctgtctgccctgatccgaggmctccccagagcgwggtttctgctgcagaacctgagaccatggccaaaatagcacagggtgccatgtaccgaggctctgtccacgacttcgcagactttgatgcaaatsaggatgccgmggctttgtacacagccatgaagggcttcggcagtgacaaggagtccatattggagctgatcacctcccgcagcaacaagcagaggcaggagmtctgccagagttacaagtccctctatggcaaggacctcatcgcagacttgaagtatgagttgacagggaagttcgagcgactgatagtgaacctgatgaggccgcttgcctattgtgacgccaaagagattaaagacgctatctcgggcattggcactgatgagaagtgcctcattgaaattttggcttcccggaccaatgagcagatacaccagctggtggccgcatacaaagatgcctatgagagagacctggagtctgacatcattggagacacttcaggccacttccagaagatgctggtggtactgctccagggaacccgggagaatgacgatgttgtgagtgaggacttggtccagcaggatgtccaggacctgtatgaggcaggggaattgaaatggggaacagatgaggcccagttcatctatatcttgggaaaccgtagcaaacagcacctacgattggwskwkgatgagtacytgaagaccacagggaagcccatcgaagccagtatcagaggggagctgtctggagactttgagaagctgatgttgsccgtggtgaagtgcatccgaagtaccccggagtattttgctgaaaggctgttcaaagccatgaagggcctggggactcgagacaacactctgatccgtatcatggtctccaggagcgaactggatatgcttgacatccgggagatcttccggaccaagtatgagaagtcactctacagcatgatcaagaatgatacctctggtgaatacaagaaggctttgctgaagctatgtggaggggacgatgatgccgctggccagttcttcmcggaggcagcacaggtggcctatcagatgtgggaacttagtgcagtgtcccgagtcgagctgaagggtaccgtgcgtgcggccracgatttcaaccccgatgctgatgccaaaggcctgcggaaagccatgaagggaattggaaccgacgaagccaccatcatcgacatcatcacacagcgcagcaatgtccagcggcagcagatccggcagaccttcaaatctcactttggccgggatttaatggccgacctgaagtccgagatctcaggagacctggcaaggctgatcctggggctcatgatgccacctgcccattacgatgctaagcagctgaagaaagctatggagggagccggcacagatgaaaaggctcttatagaaatcctggccacccggaccaatgctgaaatccgagccatcaatgaggcctacaaggaggattatcacaagtccctggaggatgccctgagctcggacacatctggccacttcaaaaggatcctcatttctctggccacagggaatcgagaggaaggaggagaaaaccgggaccaggctcaggaagatgctcaggtggctgctgagatcttggaaatagcagacacacccagtggagacaaaacctccttggagactcgattcatgaccgtcctgtgcacccgtagctatccccacctgcgcagagtcttccaggagttcatcaagaaaaccaactatgacatagmgcatgtcatcaagaaggagatgtctgkggacgtcaaggacgcatttgtggccatcgttcagagtgtcaagaacaagcctctcttctttgctgacaaactgtacaagtccatgaagggtgccggcacggatgmgaagaccctcaccagggtgatggtgtcmcggagtgagatagacctgctcaacatccggagggaattcattgagaaatatgacaagtctccacaccaagccattgaaggtgacacctctggagacttcatgaaggctttgctggcgctctgtggtggagaagactaaaactcatggccttggagggtccccctgccatgcagtggccaaccgcaccagccaccgtgacctgaccaagccattgctccagcttcagagactaaggaagaagtgaggggtggagttggactgtgatccggctggggtgctctcttgccattgagggtcccaggcggtcccttctgttatccctcctgctcatggctaagtggctggtgaaccacagccatatatgcattcaaccctgctccccgtctgcctccttctccgcccaccctagcttccatccctccacacgaatccctgcctgatttaagctttgtcacatctctaaacacctccttggatggagccaccctgcccccagccctgaacagccgggggagggtagagagttcctcagagctggctcccagctgtgtccatcattggagtggcagcaggcaggtttcatacagtgctgtggactcgagaagccgttacactggactggaatggtggacagttgggtcacttactggaccccaatggagaaaagtgtgtcaccactcctcgccaagtctctgcttgtcttttccaataaattcggaaaagtggatcaagaataccttggcagggaataggggggcaaagtttagaacagagggaattc

SEQ ID NO: 2775 - DNA, 705 bp, Rattus norvegicus
gggcgattctcackrcckrcatcgacctcctytctcwttgcaccatggcggacgcctttgtcggtacctggaagctagtggacagcaagaattttgatgactacatgaagtcactcggtktgggctttgccaccagacaggtsgctagcatgmccaagccgaccacaatcattgagaagaatggggatmccatcmccwtaargacacacagtaccttcaagaacacagagatcagctttcagctgggagtagagttygrcgasgtcasrgcagatgacaggaaggtcaagtcggtcgtgacactggacggaggcaractggtccatstgcasaagtgggacgggcaggagaytacgcttacacggraactaagtgatgggaaactcatcctgactctcacccatkgcaatgtggtgagcactcggacttacsagaaggaggcktgacytgkctgcyccgtcactgactgmtcstytgmcaatggctacccctaactcagcaccacgttgcstcatgtttctcccctctgacgttttatataaatactckhygswtgkgyttttcctggrgatatgggacmccagcytggacccaggtcccattgtgtatgtggtttmktktktaaaactgtatccaaagggtgcyccaaggtcaataaagcagagccaagkccvmmmmaarwwrwrmrrmmraaacctcgtgccg

SEQ ID NO: 2776 - DNA, 2873 bp, Rattus norvegicus
gaattccgccgggcagggcgcacgtggtgggcgccccctgcgggaagcggggcgctggggagccccggccgcgggctcgggcgcgcagagccggggccatgtggacgggcggccggcggccgggccggcttcgccgggcggcctctgccgcagacatggagaaactcagtgcgctgcaggaacagaagggcgagctgcgcaagcgcctgtcctacaccacgcacaagttggagaagctggagacggagtttgactccacccgccactatctggagattgagctgaggcgcgcacaggaggagctggacaaggtcaccgagaaactgcgcaggattcagagcaactacatggcactccagaggatcaaccaagagctggaagacaagctgtaccggatgggccagcactatgaggaagagaagcgtgccatgagccacgagattgtcgccctcaacagccacctgctggaggctaaggtgaccattgacaagctgtcagaagacaacgagctctataggaaggactgcaatctagcggcccagctgctgcagtgcagccagacctacggcagggtccataaggtgtccgagctgccctcggacttccagcagcgtgtgagcctgcatatggagaagcatggctgcagcctgccgtccccactgtgccatccgtcctacgccgacagcgtgcccacctgcgtcatcgccaaggtgctggagaagcccgaccctggcagcctgtcctcgcgcatgtcggatgcctcggcccgcgacctggcctaccgcgacggagtggagaacccgggcccgcgacccccgtacaagggagacatctactgcagcgacacggctctctactgccctgacgagcgagatcacgaccggcggcccagcgtggacacgccggtgaccgacgtgggcttcctgcgtgcgcagaattccaccgacagcctggcggaagaggaggaggccgaggcggcggccttcccggaggcctaccgtcgcgaggccttccagggctacgcggcctcgctgcccacgtccagctcctactccagcttcagcgccacgtccgaggagaaggagcacgcgcaggccagcacgctgaccgcctcgcagcaggccatctacctgaacagccgcgaagagctcttcagccgcaagccgccctccgccacctacggcagcagccctcgctacgccaaggccgcggccaccctgggctccccgctcgaggcccaggtagccccaggcttcgctcggactgtgtctccgtacccggccgagccctaccgctatccggcctcccagcaggctctcatgcctcccaacctgtggagcctgcgggccaagccgagcggtaaccggcttgccgcccgggaggacattcgaggccagtggcggcccctgagcgtggaggatgtgggcgcctactcttaccaggccggcgctgcaggccgcgccgcctcgccctgcaacttctcagaacgtttctacggcggcggtggcggcggcggcagcccgggcaagaatgccgagggccgtgccagccccctctatgccagctacaaagccgatagtttctcggagggcgatgacctctcccagggtcatctggccgagccctgcttcctccgagcgggtggtgatctgagcctcagccccagccgttcagctgatcctctccctggctatgccaccagtgacggggatggggataggctcggggtgcagctgtgtgggcctggcagtagcccggagcccgagcacggctcccgggattccctggagcctagctccatggaggcctctcccgaaatgcaccctccaacccgcctcagcccccagcaggccttcccaaggactggaggctctgggctgagccgcaaggacagtctcactaaggcccagctctacggaaccctgctcaactgactgccatcagcaggctgcagtcaggggctccctaccaccctgccccatatagggagtagctaaccccctcgtcccaacccctgctaaggaactccagttccagttccagttcctgttccagttccagttcctgttccagttcctgttccagttccagttcccgttcctgttccagttcctgttccagttccagttcccgttccagttcccgttcctgttccagttcccgttccagttcctgttccagttccagttcctcctgaccctgttactaacaccccagtagaacctgaaaagaccccctctgccaatcgtcttgtccaccccagcctctgctgcaaaccctacccagaatatttccgctctgcacccttccctgaagtgagcatcccctgttttataagtgaagctatttttttagggaaaaagagcgtttgttcacgcacttgctgccaacttctggatggcagccttggcgtaccccacacgaagttccttcatttccagtgagggtgcttggggcctgccccagggaaggggaggctggggccctagagggaccagtctccacaagtagggagaagccagcaacaagggaattctgaagttctgaacactgaggaggggaaccaaagccacttagggcgcagaaaatgtcttatgctcgctcccgtgtcacagtgcagccagcctcskscckrattccaccytgagctcttccgtggcccggcctgtgggcccaagaggggccagggacacccccagaacagccggtgctcgttcctmmcctccccctcccaacaccacccgactctacctcagacatgaggctcctcccacccttgtgcacctgtcgtctgtgatgcatgccgtccgttagaactgtatttcacattccttaataaargacagcagtggaaagaaaaaaaaaaaaaaaaa

SEQ ID NO: 2777 - DNA, 763 bp, Rattus norvegicus
  misc_feature (490)..(490): n is a, c, g, or t
caygrrrgacaagctgaagaaggccaagatcatcttcgtggtgggcgggcctggctcaggaaaaggtacccagtgtgagaagattgtgcagaaatatggctacacccacctctctactggggacctgcttcgggcagaagtcagctctggatcgtcgaggggcaagatgctgtcatctatcatggasaagggagagctggtgccactgrasacggtgctggacatgcttcgggatgctatgttwkccaaagtggactcttccaacggcttyttgattgacggctacccsagggaggtkaaacagggakraragtttgawcggaagatcscacagcccacaytgstactktatgtggacgcasgccccsasrccatgacccaackactcctawakcgaggggagwccagtgvccgtgtggacgataacgaggagaccatcaagaagaggctkgagacgtatwacaaagcmacagaacctgtcatctcyttntatgrcmmwcryggcrktrtscscaaggtcaatgbtgarggctcakkggacactgtcttctcccaggtytssacctatcttgactccctgaagtaactggatccctcgrccagttcccagcccaccccgcccttgccccctgaccccaggcagcctggctcgagcccagcacctccaccctgccgggctgtgcacagacacaggaagctrttatcctgtcccatggacatttgagcactaaagaaattgccaaggraaaaaaaaaaaaaaaaa

SEQ ID NO: 2778 - DNA, 2372 bp, Rattus norvegicus
atgcactttcaaagtagtgagaaaattttgatgttttctaatacatagaaatgatatcattaaaaggcagatgtggctcattgaacgcagagccagctctcgggggtctctgtgtggtctcgtcatcagcacagctgggcywacacgcaagcaaccatgtctaagggacctgcrgttggcattgmtcttggcaccacctactcctgtgtgsgkswckwssagcatggaaaggtggaaataattkccaatgrccagggtaaccgcaccacgccgagctatgttgctttcaccgacacagaacgattaattggggatgcggccragaatcaggttgcaatgaaccccaccaacacagtttttratgccaaacgtctgatcggacgtaggttcgatgatgctgttgttcagtctgwcatgaagcaytggcccttcatggtggtgaacgatgcaggcaggcccaaggtccaagtcgaatacaaaggggagacaaaaagtttctatcctgaggaagtgtcttcaatggttctgacaaaaatgaaggaaattgcagaagcttaccttggaaagactgttaccaatgccgtggtcaccgtgccagcttacttcaatgactctmascgacaggcarcaaaagatgctggaactattgctggcctcaacgtacttcgaattatcaatgagccaactgctgctgctattgcctatggcttagataagaaggtcrgggctgaaaggaatgtgctcatttttgacttgggaggtggcacttttgatgtgtcaatyctsactayygaggatggaatttttgaagtcaaatcaacagctkgagacacccacttgggcggagaagactttgacaaccgaatggtcaaccatttcattgctgagtttaagcgraagcacaagaaggmcatcagtgagaacaagagmgctktcaggcgtytccgsactgcctktgascgggccaagcgsaccctytcytccagcacccargccaktattgagattgattctctctatgagggaattgacttctacacctccattacccgtgctcgatttgaggagttgaatgctgacctgttccgtggcacactggaccctgtagagaaggcccttcgagatgccmaactagacaagtcacagatccatgatattgtcctggtgggkggktctaccagaatccccaagatccagaaacttctgcaagacttyttyaatggaaaagagctgaataagagcattaaccccgatgaagctgttgcctatggtgcagctgtccaggcagccattctatctggagacaagtctgagaatgttcaggatttgctgctcttggatgtcactcctctttcccttgggattgaaactgctggtggagtcatgactgtcctcatcaagcgcaataccaccattcccaccaagcagacccagactttcaccacctactctgacaaccagccaggtgtamtcatccaggtgtatgaaggtgaaagggccatgaccaaggrcaacaacctgcttgggaagtttgagctcacaggcatacctccagcaccccgtggggttcctcagattgaggttacttttgacattgatsccaatggcatcctcaatgtttctgctgtagataagagcacaggaaaggagaacaagatcaccatcmccaatgacaaggsccgcttgagtaaggrggwtattgagcgcatggtccargaagctgagaartacaamgctgrggwtgagaagcrgrgagataagktttcytvtaagaaytcgcwggagdmkymbghdbkcarsatgaaagsmactgwkgavgakgagaaacttcaaggcmmgatcaatgrtgaagacaawcagargattcttgacaagtgcaacgawatcatcagctggmtggataagaaccagactgsggagaaggaagaatttgagcatcakcagaaagaactsgagaaggtytgcaaccctatmatcaccaagctgtaccagagtgctggtggcatgcctggaggaatgcctggtggcttccctggtggaggagctcctccatctgstggtgcttyttcaggccccaccattgaagaggtcgattaagtcaaagtagagggtrtagcatkgtkccacaggsasccaaaacaagtaacatggaataataaamctakttaamtkggcvmmhwaaaaaaramaamaamrrarawrwvrwramhmarmwrhaahmvmrrmamhdarrrrgsksmggaaccaattcgcgaaagtgaggcgttaaaatactggcggcgtgtaaacggcggagcgggagacccgggttcccaagtaacgctggagaaactccctagccgcgggggaaagaaaagccgaaatagctccag

SEQ ID NO: 2779 - DNA, 2242 bp, Rattus norvegicus
tttttttttttttttttagagaaaagtttgctttagtttgataagcagccttgtcatctctaagagatcgaaagcaggcctactccagctgcacgaccttgttaatccagtccacaaacacagacacacgtgtgaagatagctggccagcgaggccgtgcacacactctgttcgggatgataagtccctgtaggacccagcagtcatgggtatagcaggcaagtgggcccccgtagtcaccctcacaagcgcccgtaggggccagcaacccctcggtgcatatctcactctcttgtactcgtctccggtacttcacattacattcctgactggagatgaccttcattttggccacatgaaggactgtgctattgcttgtacctttggattcaccccagccagcgatctcgcagttggtccctggaggtaccacatactgttcaggaggtaggcaaatcctggccacgtgatggttcaggatcacaggtcyctcswgcttgagcagaacaagttgggagcctgcaggtccgcacactgtcttggccactgagaccctctgcaggtttgcttctccaggctgtgggttctggttaattgtacccaaccatacctcatatcctgtgagaggatcatggcatgaccagatgcattgccgggcggtcagtacccactgctccttcactagggaacccccacagaaatgctggccctgtcgattccgcaagctgactgtccacggtgagttcccaggatgaccccccaccacacgaagtctattactctggtcaactctcttgccacacttttcaaactgcacctggactggggggtccaagatggatggtggctggtcatcatcacagcgttttagggcacagtagtcaaacagggtctctgggtccaaagtataacaccagggcccatggctatctccatccggattccggcaaaagtttgcctccaagcctgcatgtggtgctgaggtgggtgtgaattgtggcttatgtggtgtctctgaggaccagtgctggcactgaacgcccttgcgtgtcttgctgactgagccacgatactgttcacctgagccatggtagcagccctctggcaccacttcttctgtgcagcgtgggatctggtagcaaaaggccacacgcaaaccaggtcgagatgtgaagcaccaaggcgcctcggagccatcaggattccggcagaaattctcacgaaggtccttgcaagcatatttctccggcacaaagcggtgctggtgcggattctgcgcatcccagcgctggcagggcacacccgcagaggtggtattggttgtgcctcgatagtcttcaccttttccgcggaagcagttcgaagccttgaccttgttgcgctgttgtgacttggatcctttggtggtcggtggcaggttgggcccgcaactgggcaggtcacagaactctcgctcaacattcgggtccgtggtgtagcaccaggggcgctcagatgcatccggattacggcaatagttgtctttcagagctttgtctgggaacttttcagggtggaaagggtgcgagtgtgggtgctgcaggtcccagcgttgacactcccgtcccgattctgtaacgtctacctcgccacggtaatcctcgccgttgcaccaaacacaaaccgcctccctgcatgatttgatgccgcagctctggaaacgcacgctgcggtttgtcgtgtagcaccagggacctctggggtccccatcagggttccgacagaagttctcttccaggccattcttcggtgtgggcgtgtacttgtggtcattggggaacctgcggctccaggcttggcagggcaagccatcagctgtcctggccacagtgccccggtagctggccccattgtccataatgcaggtccgtacatagtctttcttctggaagagatcgcacaggctagaatggtgtagctgtgcacgcagagagtgctgagtccacggtagtagctggcaaccatggctgctcatattgtagtggaaggctcggcagtccagaaggggcccacagcgtctagcacactcctcggcatctgccacatcctcctgccatggccctggcaccactggatgtagcaggttccttaactctgtgccccgaagcagctggaagtcattcagcggtgagcgctgcccaagagcccttgaacactgtgccagaagcagcagtagtgggagccaccccattctcctaagctg

SEQ ID NO: 2780 - DNA, 5297 bp, Rattus norvegicus
gaattccgccgcgccgcaaacaggctcttacaggcgcgcacacagacacgcgcgcgcgcacacagcggggttcccggaggcggcggtggccgcatccccagcagcgactcgcctcgaagtgacaggagcctgctggctagtttctctgtgagtgctgaaaaccatttgagaggattctcaacaaagcaccctggggtctgtgcacaggattcgatcagctagacctcccttgctgctgcacctaaccatctggtcttgaacaccatcatggccaaaccttacgaatttaactggcagaaggaggtaccctctttcttgcaagaaggagcagtttttgacagatatgaagaggaatctttcgtgtttgagcccaactgcctcttcaaagtggatgaattcggcttcttcctgacctggaagagtgaaggcaaggaaggacaagtgctagaatgttccctcatcaacagcattcggctggcagccataccaaaggatcccaaaatcctggctgctctcgagtctgttggaaaatctgaaaatgatctggaagggcggatattgtgtgtctgcagcggcacggatctggtgaatattggcttcacttacatggtggctgaaaacccagaaataactaagcaatgggtagaaggcctgagatcaatcattcacaacttcagggcaaacaacgtcagtccgatgacatgcctcaagaaacactggatgaaactggcctttctgaccaacacaagtggcaaaatcccagtgaggagtattactagaaccttcgcatcagggaaaacagaaaaggtgatctttcaagcactcaaggaattaggtctccccagtggaaagaatgatgaaattgaacctgctgcatttacctatgaaaagttctatgaactgacacagaagatttgtcctcggacagatatagaagatctttttaaaaaaatcaatggagacaaaactgattatttaacggtagaccaattagtgagctttctaaacgaacatcagcgagatcctcggmtgaatgaaattttattcccgttttatgatgctaaaagagcaatgcagatcattgagatgtatgaacctgatgaagagttgaagaaaaaaggcctcatatccagtgatggattctgcagatatctcatgtcagatgaaaatgcccccgtcttcctagatcgcttagaactttaccaggagatggaccaccccctggcccattacttcatcagttcctctcacaacacctatctcaccggccggcagtttggcggaaagtcttcagtggaaatgtaccgacaagtcctcctggctggttgcaggtgtgtggaacttgactgttgggatggaaaaggtgaagatcaggaaccaataataactcacggaaaagcaatgtgtacagacatcctttttaaggatgtaatccaggccatcaaggaaacagcgtttgtcacatcagaatatcctgtaattctctcctttgaaaaccactgcagcaaatatcaasagtaccagatgtccaagtattgtgaagatctatttggggatcttctgttgaaacaagcacttgagtcacatccacttgaaccagggaggctcttgccatctcctaatgacctcaaaagaaaaatactcatcaaaaataaaaggctgaagcctgaagttraaaaaaaacagctggaggctttgaaaagcatgatggaggctggagaatcagctgccccggccagcatcttggaagatgacaatgaggaggaaatagaaagcgcagctgatcaagaggaagaagcccaccctgaatacaagtttggaaatgaactttctgccgatgacttcagtcacaaggaagcggttgcaaacagcgtcaagaagggcctggtcaccgtagaagatgavsaggcatggatggcatcttataaatacgtaggtgctaccacgaatatccatccgtacttgtccacgatgatcaactatgcacagcctgtgaagtttcaaggtttccatgtggctgaagagcgcaacattcattataacatgtcttcttttaacgagtcggttggccttggctacttgaagacgcacgcgattgagtttgtaaattacaataagcgacaaatgagccgcatttaccccaagggaggscgagttgattccagtaattacatgcctcagattttctggaacgctggttgccaratggtttcactgaactatcaaaccccagatttagcgatgcaattgaatcaaggaaaatttgagtataacggatcctgcggatacctcctcaagccagacttcatgagacggcctgatcggacatttgatcccttctctgaaacccctgtggacggggttattgcagccacatgctcagtgcaggttatatcagggcagttcctgtcagataagaagatcggcacatacgtggaagtcgatatgtacgggctgcccaccgacaccmtmcggaaggagttccgaacccrcatggttatgaacaatggactcaacccagtttacaatgaagaatcgttcgtgtttcggaaggtgatcmtgcctgacctggctgtcctgagaatcgctgtgtacracgacaacaacaagctcattggccagaggatccttcctctggatggcctccaggcaggytaccgacacatctccctgagaaatgagggaaacaaaccgttatcactgccaacaattttctgcaatatcgttcttaaaacatatgtgcctgatggattkggagatattgtggatgctctatccgatccaaagaaattcctttmmatcacmgagaagagagcagaccaawtgagagcaatgggcattgaaactagtgacatagcagatgtgcccagtgacacttccaaaaatgacaagaaaggcaaggccaacccagccaaagcgaatgtaacccctcagagcagctctgagctcagaccaaccaccacagctgccctgggatctggccaggaagccaagaaaggtattgaacttatccctmmmgtgaggatagaagatttaaagcaaatgaaggcttacttgaagcatttaaagaaacaacaaaaggagttaaactctttaaagaagaaacacgcaaaggagcacagtaccatgcagaagttacactgcacacaagtggacaaaatcgtggcccagtatgacaaggagaagtcgactcatgagaaaatcctagagaaggccatgaagaagaaggggggaagtaattgccttgaaataaaaaaaraaamagaaattaagattcagaccctgacatcggatcacaaatctaaggyyaaggagattgtggcgcagcacacaaagsagtgstcagaaatgatcaacacgcacagcgccgaggagcaggaaatccgggacctgcacmtgagccagcagtgtgagctgctgaggaagctgctcatcaacgytcatgagcagcagacccagcagctgaagstctcccatgacagggaaagcaaagagatgcgagcccatcaggctaagatttstatggaaaatagcaaagccatcagtcaagataaatctatcaagaataaggcagaacgggagaggcgagtcagggagttgaacagcagcaacactaagaagtttctagaagaaagaaagagactggcaatgaagcagtcgaaagaaatggatcagctgaaaaaggtccagctggagcacctagaattcctagagaaacagaatgagcaggcgaaggagatgcagcagatggtgaaattggaagccgagatggaccgcagaccagcaacagtagtatgaaactccagaatgcaaactgaagctggaagaccatagaacaccagargatcacgcccagcttcagaggacagactccatggacaaaagmtgttttcttttgtktttcttttatgtgtagacacggtgtaacctgaaaccacatggactggggatgaccaaatgttcttctacttaacaatttgactattgaatttytttggccaaccaaaagtagctatgtacacacacacacacacacacacacacacacacacacacacacacagaaatcccctattcctgacaggcagagttgaaccataatccacaacttaaacatgttggctagggkacagcatcacaagccagtgggcttggtgataacaactctgctttgtggtgcattaggacatgttcgagctgctgctgsaaaagsaaaattagtgcattagtactttaatggcaagcgcatgcactagacgaaacaactccgtctacagtccattagcagaagtggtggtctgctatacaaatcactttgcagaactttctacacctaagttacctcatgagtaagtgccatgtctttaccatgccataagatgctaacttccwskarrtgttgcagaatttgttaggacaatagagacacacaaaacggtgtacctgtgccaagctcatcagtgcgccaagggggactcagcaggctcgtttcggacagtttacagctgactctgctttgtaggaagtgcttctgcagatgcctcatgctgcaattcactacacactatcaggagggtggagtggctattggcaaatgtttgtaaatgtgaccatgtacaaagtatttatactccttaattctcatggttatagcgcaaagtcatctaaacattaccacacgacaagactagtaaacaggaatcatagatgttttgcatgatgcacaagcaccaattatgactaacccattgagrcacagttarsctaacaccaaataaataccggttaagtcaawrwawrrmamaraawattatttgactatcargacttttagcataatgaaaaaagtctatatatatgtgtatatgaattatgtgggcattcttgatactkctagtttgaaaaaatacattaatktaattttacacaaaaatatttatgcagattttcagwctttcatatcagsaaataaccttttwatgtctgttaaatatccraacgatttgctaccgtgttvatctgcatggtcttctcacctgctgtagwtgccttgcaggtggtgcataaagtggacgggtgggatgagtcctgctgccccaacccagaggagcgtgcggagacccggtagcctaggagtcagattcctgattttaggatgcmaaacsccaacttaattgttgtatatggttgtacwaatagrttctgtgtgttcctctraggagggcagagaagagtatgatmccatgaaggctgaaattcmacgtacaacttctctaataaaaaaaaaaaaarraaaa

SEQ ID NO: 2781 - DNA, 2348 bp, Rattus norvegicus
agcttcaccatggccaattcgggcmccggggcgccgccgccgctgctgctactgccgctgctgctgctccyasgrrscggcmtckwgsctgctagcagccacatagagacccgggcccatgcggaggagcggctcctgaagagactcttctccggytacaacaagtggtctcggccagtagscaatatctcagatgtggtcctcgtccgctttggcttgtccattgctcagctcattgacgtggacgagaagaaccagatgatgacaaccaacgtgtgggtgaagcaggagtggcacgactacaagctgcgctgggaccctggtgactacgagaatgtcacctccatccgcatcccctctgaactcatctggaggcctgacatcgtcctctacaacaatgcggatggagactttgcagtcacccacctgaccaaggcccacctgttctatgacggaagggtgcagtggacacccccagccatctataagagctcctgcagcatcgacgtcaccttcttcccctttgaccagcagaactgtaccatgaagtttggatcctggacctacgacaaggccaagattgacttagtgagcattcatagccgtgtggaccaactggacttctgggaaagtggggagtgggtcatcgtggatgctgtgggcacctacaacaccaggaagtacgagtgctgtgccgagatctatcctgacatcacctatgccttcatcatccgacgcctgccgctattctacaccatcaacctcatcatcccgtgcctgctcatctcctgtctcaccgtgctggtcttctatctgccttcagagtgtggcgagaaggtcacactgtgcatctcggtgctgctttctctcaccgtcttcctgctgctcatcaccgagatcatcccgtccacctcgctggtcatcccgctcatcggcgagtacctcctcttcaccatgatcttcgtcaccctctccatcgtcatcacggtcttcgtgctcaatgtgcaccaccgctcgccacgcacacacacgatgcccgcctgggtgcgtagagtcttcctggacatcgtgcctcgcctcctcttcatgaagcgcccctctgtggtcaaagacaactgccggagacttattgagtccatgcacaagatggccaacgccccccgcttctggccagagcctgtgggcgagcccggcatcttgagtgacatctgcaaccaaggtctgtcacctgccccaactttctgcaaccccacggacacagcagtcgagacccagcctacgtgcaggtcacccccccttgaggtccctgacttgaagacatcagaggttgagaaggccagtccctgtccatcgcctggctcctgtcctccacccaagagcagcagtggggctccaatgctcatcaaagccaggtccctgagtgtccagcatgtgcccagctcccaagaagcagcagaagatggcatccgctgccggtctcggagtatccagtactgtgtttcccaagatggagctgcctccctggctgacagcaagcccaccagctccccgacctccctgaaggcccgtccatcccagcttcccgtgtcagaccaggcctctccatgcaaatgcacatgcaaggaaccatctcctgtgtccccagtcactgtgctcaaggcgggaggcaccaaagcacctccccaacacctgcccctgtcaccagccctgacacgggcagtagaaggcgtccagtacattgcagaccacctcaaggcagaagacactgacttctcggtgaaggaggactggaaatacgtggccatggtcattgaccgaatcttcctctggatgttcatcattgtctgccttctgggcactgtgggactcttcctgcctccctggctggctggtatgatctagggacgtggtggtgcccagctcccacatctctgtagggccatacgactcgtcagtcacccacatcttccaaaccggctgaccatgagacaccctaggagagagatgatgcttcttgggagatggaagttggccctggttctagtcagactatgggcgtggttggagagaaatgagggctgatacagttgcaggccgagtccccattaaagtttctccagagcaagtggcagtactccctgacttacagacagcacacacccatctgtgtcacagagaatgatcccgagttgatctcagttgtcctttgaggccatgaaaaattcatccaccttgaggaaccagagcctctcatgctgtgggatcaataagaccaggaatctcccactgtgactctgctggccacaccctctccctcccccaagaagtggtccctcatcccccaattc

SEQ ID NO: 2782 - DNA, 3251 bp, Rattus norvegicus
tgagaggaactggaagaagaaaaaggaagaggaaaaaaaaaaagcaaaacaaaacccaaactcagtgagacgctctccctcaccatgagtagcgctgtgttagtgactctccttccagatccaagcagcagcttccgcgaggatgctccgcggcccccggttcccggagaagaaggggagaccccaccgtgtcagcctagcgtgggcaaggtccagtccaccaaacctatgcctgtctcctctaacgctaggcggaatgaagatgggctgggggagcccgaggggcgggcctccccagattcccctctgaccaggtggaccaagtctttgcactccttgttgggggaccaagatggtgcatacctcttccggactttcctggagagggagaaatgtgtggataccctggacttctggtttgcctgcaatgggttcaggcagatgaacttgaaggataccaaaactttgcgagtggccaaagcaatctacaagaggtacattgagaacaacagtgttgtctccaaacagctgaaacccgccaccaagacctacataagagatggcatcaagaagcagcagatcggctmggtmatgtttgaccaggcgcagacggagattcaggcgrtgatggaggaaaatgcctatcaggtgttcttgacttctgacatatacstcgaatatgtgaggagtgggggagaaaacacagcttacatgakcaatgggggaytggggagcctaaaggtcttatgtggctacctccccrscmygarksmksrwgaggagtggacatgtgccgacctgaagtgcaaactttcacccaccgtggttggcctatccagcaaaactctccgggccacagcgagcgtgagatccacagaaacggctgaaaacggattcagatccttcaagagaagcgaaccggttaatccttatcacgtaggttctggctatgtctttgcaccagccaccagcgccaacgacagcgagttatccagcgacgcgctgaccgacgattccatgtccatgacagacagtagcgtagatggaatccctccttaccgcatggggagtaagaaacaactccagagagagatgcaccgcagtgtgaaggccaatggccaagtgtctctacctcacttcccgagaacccaccgcctgcccaaggagatgacgcccgtggaacctgctgccttcgccgcagagctcatctccaggctggagaagctgaaactggagctggagagccgccacagcctggaggaacggctgcagcagatccgggaggatgaagaaaaggaggggtctgagcaggccctgagctcacgggatggagcaccggtccaacaccccctggccctcttaccctctggcagctatgaagaggacccacaaaccatcttggacgaccacctgtccagggtcctcaagacccccggctgccagtcccctggtgtgggccgctacagcccacgctcccgctcccccgaccaccaccaccaccaccatcagcagtgtcacgcccttcttccaactgggggcaagctgccccccgaggctgcttgcccgctccttggaggcaagagcttcctgaccaaacagacgacgaagcacgtccaccaccactacatccaccaccacgccgtccctaagaccaaggaggagatcgaggcagaagccacacagagagtacgctgcctctgccctggaggcacagattattactgctactccaagtgcaagagccactcgaagcctccagagcccctccctggggagcagttttgtggcagcagaggtggcaccttgccaaaacggaatacgaaaggcacagaaccgggtctggcactgccggccagggaaggagggatgtccagtgcagcaggggcccctcagcttcctggggaagaaggagaccggtcacaggatgtctggcagtggatgttggagagtgagcgtcagagcaagtccaagccccatagtacccaaagcataagaaagagctacccgttggagtctgcccgcgcgcccccaggcgaacgagtcagccggcaccatctgctgggggccagtggacacccccgctcagcggcmcgrgstcacccatttacccaggaccctgccatgcctcccctaaccccacccaacaccttggcgcagctagaggaagcctgccgcaggctggccgaggtgtcaaagccccagaaacagaggtgctgcgtggccagtcagcagagggacaggaaccacccagccacaggtcaggcaggacccacatccttctccaacccgagcctggcttcagaagatcacaaagagccaaagagactggctagtgtccacgcactccaagccagcgagctgattgttacctactttttctgtggagaagaaattccatacaggaggatgctgaaggcgcagagcttgactctgggccacttcaaggagcagctcagcaaaaagggaaattacaggtattacttcaagaaggcgagtgacgaatttgcctgtggagcagtctttgaggagatctgggatgatgagacagtgctccccatgtacgaaggcaggatcctgggcaaagtggagaggatcgactgagcctcggcctccgccgcgtgcacctccgcgtgcacctccgcgtgcaccacggagccggagcccagagagacctgtctcaggcctacacaacagccatgaaatattttgaaggaaaatgaaaccaattaagaagacaaagcctagggagggactggcccctgggccttcaggagggcgggggtggttggttttcaatatccacgagctgggtactgagatcagaaaagcccgaactatttattcaaaacatgaccactctgggctatagaagatgctgagtgctcgagagactgccatacataawmgakggcttcctagggatctgaaatccatagactaagagaaaactgtgtatagcttgcccgaacaggagtccttactgatatttattgaacagtcgattcccytaccccactcccacccccaacccccaacccccagtttatgctgctttaaacctggaaatgagagagagaagtttggtttgctgtctatgcttaagagccaagccgggaacgcattaatcatttcttcgttaacagaggaatccgctctgcatggcatctctccaagtgamgacaggcttctttacaaaaraaaaaaaaawawawawrwggtgcccacccatcaacacatgcagaagtcggtca

SEQ ID NO: 2783 - DNA, 8287 bp, Rattus norvegicus
agatgccaaccaagtcagttctccattgtttcctggagatctgggacagaaagtacagactcctcagaagctgaggacagttcatcttcttcatcttgggtgaggtcatcaaagtcctcctcctcttcttcctcagccccgtccttctccgctccagtgtctgttcctgctggggttcccacagactgaccatcagcgttggctgagtcctcaggcttccctggaggactgttaagcactgtgccctggtccatggaggacagagtgctttgtggcaatcctttgcttgcatccctaattgcatcgggagcatcttgagacacagtagcttgccgaattcggcacgagagccaaacttcgggcggcggcctggctgcgcggagtgccggggcggcgtagcggcagctcctggactcggcgagccgcgggggcagggtagagcacgcgagagcggggctcctggtcgggacccgctccccatgcggatctgctttggctgcggcagtgaagatgcccgctctgcgtcccgccgcgctgcgggcgctgctgtggctctggctgtgcggcgcgggccccgcgcacgctttgcagtgtcgaggtggtcaagagccctgtgtaaatgaggggacctgtgttacctaccacaacggcacaggctactgccgatgtccagagggcttcttgggagaatattgtcaacatcgagacccttgtgagaagaaccgctgtcagaatggtggtacttgtgtgacgcaggccatgttgggaaaagccacctgtcgatgtgctccagggttcacaggggaggactgccaatactcgacctctcacccctgttttgtttcccgcccctgtcagaatggaggtacctgccacatgctcagctgggacacctatgagtgcacctgtcaagttggcttcacaggaaagcagtgtcagtggacagatgtctgtctgtctcatccctgtgaaaatggaagcacctgtagctctgtggccaaccagttctcctgcagatgtcctgcaggcatcacaggccagaagtgtgacgccgacatcaatgaatgtgacattccaggacgctgccaacatggtggcacctgcctcaaccttcctgggtcctaccgatgccaatgccctcagcggttcacaggccagcactgtgacagcccttacgtgccctgtgcaccctcaccctgcgtcaatggaggcacctgccgtcagactggagacttcacttctgaatgccattgcctgccaggctttgaagggagcaactgcgagcggaatatcgacgactgccctaaccacaagtgtcagaatggaggggtgtgtgtggatggcgtcaatacttacaactgccgctgcccccctcagtggactgggcagttctgcacagaagacgtggatgagtgtctgctgcagcccaatgcttgtcagaatggaggcacttgcaccaaccgcaacggaggctacggctgcgtgtgcgtgaacggctggagtggggatgactgcagcgagaacatcgatgactgtgccttcgcttcctgcacgccaggctccacctgtattgaccgtgtggcctccttctcctgcctttgtccagagggaaaggcagggctcctgtgtcatctggatgatgcctgtatcagcaacccttgtcacaagggggcgctgtgtgataccaaccccctgaatgggcagtacatttgcacctgcccacaggcgtacaagggcgctgactgcacagaagacgtggatgagtgtgctatggccaacagtaacccttgtgagcatgcaggaaagtgtgtgaatacagatggcgccttccactgcgagtgtctgaagggctacgcagggcctcgctgtgagatggacatcaacgagtgtcactcagacccctgtcagaacgacgccacctgcctggataagattggaggcttcacctgtctctgcatgccgggtttcaaaggtgtgcattgtgaactggaggtgaatgaatgccagagcaacccgtgtgtaaacaatgggcagtgtgtggacaaagtcaatcgcttccagtgtctgtgtccccctggtttcacaggaccagtgtgccagatcgacattgacgactgctccagtactccctgcctgaatggggccaagtgcatcgatcacccgaatggctatgaatgccagtgtgccacaggattcactggcacactgtgtgatgagaacatcgacaactgtgacccggatccttgccaccatggccagtgccaggatgggattgactcctacacctgcatctgcaaccccgggtacatgggagccatctgtagtgaccagattgatgaatgctacagcagcccctgcctgaatgatggacgctgcatcgacctggtgaacggctaccagtgcaactgccaaccgggtacctcaggccttaattgtgaaattaattttgatgactgtgccagcaacccttgtctgcacggagcctgtgtggacggcatcaaccgttacagttgtgtgtgctctccgggattcacagggcagaggtgcaacatagacattgatgagtgtgcctccaacccctgtcgcaaggatgcgacgtgcatcaatgacgtgaatggtttccggtgtatgtgccctgagggaccacaccatcccagctgctactcacaggtgaacgagtgtttgagcagtccctgcatccatggaaactgtactggaggtctcagtggctataagtgcctctgcgatgcaggctgggttggtatcaactgcgaagtggacaaaaatgagtgtctttctaacccgtgccagaatggagggacatgtaataacctggtgaatggctacaggtgtacatgcaagaaggggttcaaaggctataactgccaggtgaacatagatgagtgtgcctcgaacccgtgtctgaaccaagggacctgcctcgatgacgtcagtggctacacctgccactgcatgctgccttacacaggcaagaattgtcaaacggtgttggcgccctgctcccctaacccgtgtgagaacgctgcagtttgtaaagaggcacccaactttgagagcttcacctgcctgtgtgcccctggctggcaaggtcagcgctgtacagttgacgttgatgagtgtgtctccaagccgtgtatgaacaatggcatctgccataatactcagggcagctacatgtgcgagtgccctcccggcttcagtggtatggactgtgaggaggacatcaatgactgccttgccaacccctgccagaacggaggctcctgtgtggacaaagtgaacaccttctcctgcctgtgccttcctggcttcgtaggggacaagtgccaaacagacatgaatgaatgtctgagcgagccctgtaagaatggggggacctgctctgactacgtcaacagctacacctgcacgtgccctgcgggcttccatggagtccactgtgaaaacaacatcgatgagtgcactgagagctcctgtttcaatggcggcacgtgtgttgatgggatcaactctttctcttgcttatgccctgtgggtttcactggtcccttctgcctccatgatatcaatgagtgcagctctaacccgtgcctgaattcgggaacgtgtgttgatggcctgggtacctaccgatgcacctgtcccttgggctacactgggaaaaactgtcagaccctggtgaacctctgcagcccctctccatgtaaaaacaaaggaacttgtgctcaggaaaaggcaaggccacgctgcctgtgtccgcctggatgggatggcgcatactgtgatgtgctcaatgtgtcctgtaaggcggcagccttgcagaaaggagtacctgttgaacacttgtgccagcactcgggtatctgtatcaatgctggcaacacgcatcactgccagtgccccctgggctacacggggagctactgcgaggaacagcttgacgagtgtgcgtccaatccatgccagcatggtgccacctgcagtgacttcatcggaggatacagatgtgagtgtgttccagggtatcagggtgtcaactgtgagtatgaagtggacgagtgccagaaccagccctgtcagaacggaggcacctgcatcgacctcgtgaaccatttcaagtgctcgtgcccaccaggcacccggggcctgctttgtgaagagaacattgatgactgtgctggggccccccactgccttaatggtggccagtgtgtggaccggattggaggctacagttgtcgctgtttgcctggctttgctggggagcggtgtgagggggacatcaatgaatgcctgtccaatccttgcagctcagagggcagcctggactgcattcagctcaaaaataactaccagtgtgtctgccgcagcgccttcacaggccgacactgcgaaaccttcctagatgtgtgtccccagaagccttgcctgaatggagggacttgtgctgtggctagcaacgtgcctgatggcttcatttgtcgttgtcccccagggttctccggggcaagatgccagagcagctgtggacaagtgaagtgcagaagaggggagcagtgtgtgcacaccgcctcgggaccccactgcttctgcccgaaccacaaggactgcgagtcaggttgcgctagtaacccctgccagcacggaggcacctgctaccctcagcgccagcctccttactactcttgccgctgctccccaccgttctggggcagccactgcgagagctacacagcccccaccagcacccctcctgctacctgtctgagtcagtactgtgccgacaaggctcgggacggcatctgtgatgaggcctgcaacagtcatgcctgccagtgggatggaggtgactgttccctcactatggaggacccctgggccaactgcacctcctcacttcgctgctgggagtacatcaacaaccagtgtgatgagctgtgcaacactgcagagtgcctgtttgacaactttgaatgccagaggaatagcaaaacctgcaagtatgacaaatactgtgcagaccacttcaaagacaatcactgcgataagggatgcaacaacgaggagtgtggctgggacgggctggactgcgctgcggaccagcctgagaacctggcggagggcatcctggtcatcgtggtgctcctaccccctgagcagctgcttcaggattctcgaagcttcttgagggccctgggcaccctgctccacaccaacttacgcattaaacaagactctcagggcgccctcatggtgtacccctactatggggagaagtcagctgccatgaagaagcagaaggtggcacgcaggtctcttcctgatgagcaggaacaggagataataggctctaaggtatttctggaaatcgacaaccgacagtgtgttcaagactcagaccagtgcttcaagaacacagatgctgcagctgctctcctggcttctcatgccatccaagggaccttgtcctaccctctggtgtctgttgtcagtgaatcggaggatccaaggaacactccgctcctctatctgcttgcggttgctgtggtcattatcctgttcctcatcctgctgggggtcatcatggcaaagcggaagcgcaagcacggcttcctctggctgcctgaaggcttcacgcttcgccgagactccagcaatcacaagcgccgtgaacctgtggggcaggatgccgtggggctgaagaatctctcagtgcaagtgtcagaggcaaacctgatcggctccacgacaagcgagcattggggtgatgatgaaggaccccagccaaagaaagccaaggctgaggacgacgaggctttgctgtcggaagacgaccctgtcgaccggcgcccctggacacagcagcaccttgaagctgcagacatccgccggactccatccctggcgctcacccctcctcaggcagagcaggaggtggacgtgctggacgtgaatgtccgaggcccagatgggtgcaccccactgatgctggcttctctccgaggaggcagctcagacctgagtgatgaagatgaagatgctgaggactcttctgccaacatcatcacagacttggtctaccaaggtgccagcctccaggcacagacggaccgcactggtgagatggccctgcaccttgcagcccgctattcgagagctgatgctgccaaacgcctcctggatgctggtgcagatgccaacgcccaggacaacatgggccgctgtcctcttcatgctgcagttgcagcggatgcccaaggtgtcttccagattctgatccgcaaccgagtaacggatctagacgccaggatgaatgatggcactacccccctgatcctggctgcccgcctggctgtggaaggaatggtggcagagctgatcaactgccaagcagatgtgaacgcagtggatgaccatggaaaatctgccctccactgggcagccgccgtcaataatgtggaggcaactcttttgctgttgaagaatggggccaaccgggatatgcaggacaacaaggaagagacacctttgtttcttgctgcccgagagggaagttatgaagcagccaaaatcctgttagaccactttgccaaccgggacatcacggaccacatggaccgccttccccgggatgtggctcgggaccgcatgcaccatgacatagttcgcctcctggacgagtacaacgtgactcccagccctccggggactgtcttgacttctgctctctcacctgtcctctgtgggcccaacaggtctttcctcagtctgaagcacaccccaatgggtaagaaggccagacggcccaacaccaagagcaccatgcccacaagcctgcctaaccttgccaaggaggccaaggacgtcaaggggagcaggaggaagaagtgtctcaacgagaaggtccagctctccgagagctcagtgactttatcccctgtcgactcgctcgagtctcctcacacatatgtttctgatgccacgtcttcccccatgatcacgtcccctgggatcttacaggcctcacccacgcctcttctggctgctgccccagctgccccagtgcatgctcagcatgcactgtctttctctaaccttcacgaaatgcagcctttgcgtcctggagccagcaccgtgctcccctcagtcagccagttgttgtcccaccaccacatcgtccccccagggagtggcagtgcaggaagcttgggcaggttacattcagtccctgtcccctcagactggatgaaccgcgtggagatgagtgagacccagtacagtgaaatgtttggcatggtcctggctcctgcagagggaacccaccctggcatggcagctcctcagagcagagctccggaagggaagcccatccccacacagcgtgagcccttgcctcccattgtaactttccagctcatcccgaaaggcagccttgctcaggcagctggggctccccagacacagtccggctgccccccagctgtggcaggccccttgccctctatgtaccagatcccagagatggcccgtttgcccagtgtggctttcccacctaccatgatgccccagcaggaggggcaggtagctcagaccattgtcccaacctatcaccctttcccagcctctgtgggcaagtaccccacacccccttcccaacacagttatgcctcstcaaatkckgcmgagcgcacccccaatcatggtggtcacctccagggcgagcacccgtacctgacaccatccccagagtctcctgaccaatggtcgagctcttcaccgcactctgcgtctgactggtcagatgtgaccaccagcccaactcctggagggggtggaggcggtcagcggggacctggaacacacatgtccgagccaccacacagcaacatgcaggtttatgcatgaagagtgcctcagttasasatggacgtgcccatcacacgcactcctgagggccgagtgaaggttatccaagagaaatgaagagacctctaaccagcctctggaggcaggaggaaagacgctcctgacttcacacaagcatgagcagcattattttcatcttcactgagtatctgtgcagtttagggaggactcagctcctactgacctttgcccatcctgcaagttcatggagatgcaagatgaatgcaagccttggggcccctcgctctcttcttggagagtacgatgaatgcctgttgtcgcccggacatccttgcagcttgtaacatatcaagccctggaggcttctgcctccatgtgg

SEQ ID NO: 2784 - DNA, 1996 bp, Rattus norvegicus
ctcgagatccattgtgctctaaagctccgccccacatgagcagttttcactccactaaacatacagagttcgaacagaattcatgaagacagaaatttaatcacttaattttggcctatatcttttcaaaatatttttcaaacgaacttattatataaagtagctatattgcttgtaggaagaaaaacaaaaaccaaagatgtggccacaaaagaaatagaccagactaaaaccaagacggggggaaaaaaatcctctaaagcaaagcccagaggagttagcaaagggttaaaatccttttgattgacgttgtagcctccggtgccctgggctcaggcgcgcgccattggccgccagaccttgtgcctggcggccaatgggggggcgcagtccacgagcggtgccgcgtgtctcttcctcccattggctgaaagttactgtgggaaagaaagtttgggaagtttcacacgagccgttcgcgtgcagtcccagatatatatagaggccgccagggcctgcggatcasackgkatcgatsgarcysstkcgataacagcggaatcccccgtctacctctctccttggtcctggaatagcgctaccgatcacaaagtagccctaagacataataaaccctcaactgctccgtagtttttcttatgaaagccaagtaaaggggacgtaagcaaaaaaatatttttttttgcgtgaaggattccaaaaataaaattctctggggattgagaagaaagaaaaaaaggaaaatgccagctgatataatggagaaaaattcctcgtccccggtggctgctaccccagccagtgtcaacacgacaccggacaaaccaaagacagcctctgagcacagaaagtcatcaaagcctatcatggagaagaggcgccgggcaagaataaatgaaagtttgagccaactgaaaacactgattttggatgcacttaagaaagatagctcccggcattccaagctggagaaggcagacattctggaaatgacagtgaakcacctccggaacctgcagygggcgcagatgaccgccgctctcagcacagacccgagcgtgttggggaagtaccgcgccggcttcagcgagtgcatgaacgaggtgacccgcttcctgtccacgtgtgagggcgttaacaccgaggtgcgcactcggctgctgggccacctggccaactgcatgacccagatcaacgccatgacctaccccgggcaggcgcaccccgccttgcaggcgccgccgccgccgcccccgtcaggacctggcggtccccagcacgcgccattcgcgccgccgccgccgcttgtgcccatccccgggggcgcggcgccccctcccggcagcgcaccctgcaagttgggcagccaggctggagaggctgccaaggtttttggcggcttccaagtggtgccggctcctgacggccaatttgctttcctcatccccaatggggccttcgccyacagcggcccgswcrwsscggtmtacaccagcaacagcgggacctcggtgggtcmtaamgcagtgtcgccttccagcggctcctcgctcactgcggactccatgtsgagrccgtggcggaaytgaggggctcaggccactgctaatcataaactccstagcccacctctctcttctgacggacactaaatacgaacttsgactttaggagmgacttttataagtcggtggttactttgttgyttytttaamttctaaaaagttactttttgtagagasctgtawyaagtgactgaccatgcactgcatttgtatatattttatatgttcatattggwttgcgcckttgtattataaaagttgagatgacatttcsttttttacacgagatttctttttttatgtgatrccaaagatgtttgaaaaatgctcttaaaatatcttcctttggggaagtttatttgmgaaaatataataaargagtgaaggctttthaaaaaaaaaaaaaaaaa

SEQ ID NO: 2785 - DNA, 4051 bp, Rattus norvegicus
gaattccaagacagaatatcagtcctccctccgtttcccaggtcagctccctagcctttaccctgtgggcccaacgtgaagagcgtgaagagcgcggcatgcagcaccccctggctggcccggtgtcttttgacctgctgttgactgctcccaggaggccctgacgccctggggcacttttgctctgcacaggaccacgttggggtttgccatggtgacataaaggggtgtagaggaaggaaggagcaagaccagcctgtagactgtgcccctggctgggcgaaagggccaggggcccggagccttctctccactgccctctgaacgtctcacttcctaagtctctgcatttctcagtcagtggacaacttttggaactcctgtgtgaggacttcgggggaccaggccaggctgggcctctgctggttgagatctcgggggccagaatgcctgccctggcgtgcctccggaggctgtgtcggcacctgtccccacaggctgtcctgttcctgctgtttgtcttctgcctgttcagcgtgtttgtctcggcctactacctatatggttggaaccggggcctcgagccctcggcagatgcttctgagtccgactgcggggacccaccacctgtcgcccctagccgtctcctgccaatcaagcctgtgcaggcggtcgccccttctcgaacagacccgctggtgctggtatttgtggagagcctctattcacagctgggccaggaggtggtggccatcctggaatccagtcgcttcaagtaccgaacagaaattgcaccggggaagggggacatgcccacactcacagacaagggccgaggccgcttcgccctcatcatctatgagaacatcctcaagtatgtcaacctggatgcctggaaccgggagctgctggacaagtactgtgtggcctacggcgtgggcatcattggcttcttcaaggccaatgagaacagcctgctgagtgcacagctcaaaggcttccctcttttcctgcattcgaacctgggcttgaaagactgcagcatcaaccccaagtccccactgctgtacgtgacacggcccagtgaggtagagaaaggtgtgctgcccggagaggactggacggtgttccagtctaaccactctacctatgagccagtgctgctggccaagacgcgctcctctgagtccatcccacacctgggcgcagatgccggcctgcatgctgccctgcacgctactgtggtccaggacctgggcctccatgacggcattcagcgtgtgctgtttggcaacaacctcaacttttggctgcataagctcgtcttcgtggacgctgtggccttcctcacagggaagcgcctctcactgcctttggaccgatacatcctggtggacattgatgacatttttgtaggcaaggagggcacacgcatgaaggtggaggatgtgaaggccctgtttgatacacagaatgaacttcgtacacatatcccaaacttcaccttcaacctgggctactcagggaaattcttccacacaggtaccgatgctgaggatgctggggacgacctgctgctgtcctatgtgaaagagttctggtggttcccccacatgtggagccatatgcaaccccacctcttccacaaccagtctgtgctggctgagcagatggccctgaacaagaagttcgctgtcgagcacggcattcccacagatatggggtatgcagtggcaccccaccactctggtgtgtaccctgtgcatgtgcagctgtatgaggcctggaagcaagtgtggaacatccgtgtgaccagcacagaggagtacccgcatctgaagcctgcccgttaccgccgtggcttcatccacaatggcatcatggtcctccctcggcagacctgtggtctctttacacacaccatcttctacaacgagtaccctggaggctccagtgagctggacaagatcatcaatgggggcgagctctttcttactgtgctcctcaatcctatcagcgtcttcatgacacacttatccaactatggaaatgaccgcctgggactgtacaccttcaagcacctggtgcgcttcctgcactcctggaccaacctgaggctgcagacgctgccccctgtgcagctggcccagaagtacttccagatcttttctgaggagaaggacccactttggcaggatccctgtgaggacaaacgccacaaagacatctggtctaaggagaagacatgtgatcgcttcccaaagctgctcatcattggcccccagaaaacaggcaccacagccctctacctgttcctgggcatgcaccccgacctcagcagcaactaccccagctccgagacctttgaggagatccagttttttaatggccacaactatcacaaaggcatcgactggtacatggaattcttccctattccctccaacaccacctctgacttctactttgaaaaaagtgccaactactttgattcagaagtggcaccacggcgagcagctgccctattgcccaaggccaaggttctcaccatcctcatcaatccagccgaccgggcttactcctggtaccagcaccagcgggcccatgatgacccggtggccctaaagtacaccttccatgaggtgatcacagctggccctgacgcatcctcaaagctgcgtgccctccagaaccgatgcctggtccccggctggtatgccactcatattgaacgctggctcagcgcctttcatgccaaccagatcctggtcttggatggcaaactgctgcgaacagaacctgccaaagtgatggacacagtgcagaaattcctcggggtgaccagcacggttgactaccataaaaccttggcgtttgacccaaagaaaggattttggtgccagctgctcgaaggaggaaaaaccaagtgtctgggaaaaagcaagggacggaaatatccagagatggacctggattcccgagccttcctaaaggattactaccgggaccacaacattgagctctctaagctgctgtataagatgggccagacactgcccacctggctgcgggaagacctccagaacaccaggtagccttggccaccacagccagccagaacgcttgtgttagcagggatgtcctgcctcacactgagccagactgacctgcctcgaaggatgctggccccagccagccaggagcaacgagcaataccctgctaaggcccaccagagccggaagcccaggcaggtctgcaagcgcctcagagcatccactgctggatgtgtggctgtgggacctctgtgggaccagaggtccattccgttccttcgcagcctccctgcctggggagagcacttcctgttggtggaaggtcatttcctggtaggaggagtcctggagactctctcctgtccctcactgtgttcggccagtcctgccctgttctgtgtcataccacccctgctccagcaggatgtcccctcagtattagctgtcatatttctctgtcctccagacagtaagggagaggagcgcagctgggcctctcgcccaactagagagaaagactgggcatgtccctgagggtttgagccaggccccgccagggtttaggtaggcacccagatgcactcatagattgaatgtgagggtggccatcttgagaggacatacgactcagtatttgggttattagtatcaatctcatctcccctttgggggaaagactctctggtccctattgtatccacctagtgctcatggtctcttgttggccctgggccactgccctgccactgggcccagagacatgggccttggccctgtcctgttcacctggatgtgacctgtggtgtttcctgtggtaaaggctgaggcgagtcaggagtctgccagtgttcatactcccatgtacatatacactgtctcccagccaccgcctcggcccggcaggcaagcagagtcagcagcactgctctctactgctttgcctggcaacctgtggctgagggtccccagagacccccccaacctcccaaatactaag

SEQ ID NO: 2786 - DNA, 2050 bp, Rattus norvegicus
ccaacccccacgcgcgacagctggtgatctaacgtactcacacgcccacccttctcgaagagactgccccggccggaaggcgggagttcggctcctgctcccacatccccagctgtgcccctagccaggaaccccacccccatcttatggcatccccggtggccctattccatcccagsgctctcatccagccccaagctaactttcattgactcgtcacatcagtacccctccccaaacttcttacccgagtactccaggtggccctgccgtaggaggcacccctacaactcctcccgatctcttgaaatcgctgctcgatgacctaagaaccccgttttgccaatactactctaaggtgcagcttcctttctcctcctttgccttcaccctgtacctgcagtcaccatatcccgtcttggtcctcaacccagtccccatggttccagagccaggccctgtcaacagtagcaccccagcctggggtcccgggccaccgcctgctccggggggcagcggctgggtggctgccgcgctgtgcgtggtcatcgtgctgacagcagccgccaattcgctgctgatcgtgctcatttgcacgcagcccgcsstgcgcaacacgtctaacttctttctggtgtcgctcttcacgtcggacttgatggtggggttggtggtgatgcccccagccatgctgaacgcgctgtatgggcgctgggtgttagctcgaggcctctgtctgctttggactgccttcgacgtgatgtgctgcagcgcctccatcctcaacctctgcctcatcagcctggaccgctacctgctcatcctctcgccgctgcgctacaagctgcgcatgacagccccgcgagccctggcgctcatcctgggtgcctggagcctcgcggcgcttgcctccttcctacccctcttgctgggctggcacgaactgggcaaagctcgaacacctgcccctggccagtgccgcctattggccagcctgccttttgtcctcgtggcgtccggcgtcacctttttcctgccttcgggtgccatctgcttcacctactgcaggatccttctggctgcccgcaagcaggcggtgcaagtggcctcgctcaccacgggcacggctggccaggccttggaaaccttgcaggtgcccaggacaccacgcccagggatggagtccgctgacagtaggcgtctggccaccaagcatagcaggaaggccttgaaggccagcctgaccctgggcatcctgctgggaatgttctttgtcacctggctgcccttctttgtggccaacatagctcaggccgtgtgtgactgcatctccccaggcctcttcgatgtcctcacatggctggggtactgtaatagcaccatgaaccctatcatctacccgctctttatgcgggacttcaagagggccctgggcaggttcctgccatgcgtccactgtcccccggagcaccggccagccctgcctccccctccatgtggacctctcacagcggtgccagaccaggcctcagcctgcagcaggtgctssctctgcctctgccgccaaactcagattcagactccgcttcagggggcacctcgggcctgcagctcacagcccagcttctgctgcctggagaggccacmcgggaccccccgccacccaccagggccaccactgtggtcaacttctttgtcacagactctgtggagcctgagatacggccgcatccactcagttcccccgtgaactgaccaggtcaagagctggccattggaggccacattcccggagctctcagcccactctccctgagactaggaggtggtaggtctcctgagagtgtgctgaattgaggtatcctcagctagccccatcttctgctgcaggctccttgacctgaggggtagtcagamacatctctgtggggtactccagtgcaatgttgcttgtgtagtgtggctgggaggggggcggtctcagagccgggccatttggttcaggtcagtaggaaagcaatctgtcctcatccctttctctcatggtggg

SEQ ID NO: 2787 - DNA, 1835 bp, Rattus norvegicus
gctcccgctgggcgccccgagcgggtccggcccggggagcgggggccgcggccgccgagcatggggaaatccaacagcaagttgaagcctgaagttgtggaggagctgaccagaaaaacctacttcactgaaaargaagtacagcagtggtacaagggtttcattaaggactgccccagtgggcagctggacgccgctggcttccagaagatctacaaacagttcttcccatttggagaccccaccaagttcgccacgtttgttttcaacgtcttcgacgagaacaaggatggcaggatcgagttctccgaattcatccargctctatcggtgacctcaagggggaccctggatgagaagttgaggtgggccttcaagctttatgacttggataacgacggstacatcaccagaaacgagatgctggacatagtggatgccatttaccasatggtssggaacaccgtggagctcccagaagaagagaacacaccagagaagagggtggaccggatcttcgccatgatggataagaacgctgatgggaagctaactcttcaggagttccaggaaggctccaaggccgacccctccattgtgcaggcgctgtccctctacgacgggctggtatagtccaggcccagagctgtgatgtgtgggaaccactagcctcttcctgtgccatgaggccaccgcagcctgacaccrcccctgtgcccacccagccttcytcgtctccacaaagccggccgcycyysmkcstscaggccctggctgtctttcccccagccctgcatccacctgccgcctgaagccactggttccatcgtcaacgacctccgcttgtccaaacaacgacaacccaaaacggaaaggctccagccctctgcaaacctgagcgccgggctgcctccctcggcagccgtcccgttcttcctgctgtctggcctgtgtgctttcttttttctttttttatttcaaatggacaatgtaaaagaaaacaaactaccttctgttctaaaagatactgaccattgggagaaggcctctgtgtctcagagaactcagtctctgcctggtcccctgcagtggtggccaggggcagtgaggccactggcaggcaagggtgttagcggcagtgactcacgtgataacagtattgtgcattttgtggggaaactgagggtttttttttatactcatacataatcgataccttttatttattggttgttaacgaggcctgctaccttgtgtgtctgaaactcccaggatgctgggcctccgtttacatgtgcacaccctcacccacctgcccgctacacttgggaggatgswsgmskgcagcggccaagaagccaaaaaatcttttccttttttttttttttttctttctttctcagatactgtgctccgtttttggagaggggaaggtaggcattcctcgayggcyaatgcactsttcccmcagcttctgccctgragcccccacccctctcctctgcaccccttggagcccataacactttttttcaagaacacacttggggtgttttttgttttttggttttttttttttttaatttttgcaactttactctgatgtttgcagcagagaaaagatggagagccttgctctgggagtgggaactgggagmgggtgtcgggcacacagaatagagtatgaagtgggcttctctgggaactgctggcctctgcctccttgatgctaactaaggggctgggtaggtatagcgtgtgaacccctctgctcacctgcctctatctaccctttgcagcagccgcaagcttattccctttagtgagggttaatt

SEQ ID NO: 2788 - DNA, 4590 bp, Rattus norvegicus
ggcacgagcagctgcaggtttgaagctgggtgagagcagctgcagcaggccaggctgggacgtttcgcctggagttagtctctccgtaactttttcctgggacagagggagaggtkkytkttytttkttctcagatgtccctctaaataaaaccttttttattttatttattgttgggtgcccargcagtcaggaagaagcactttcccactggacctccttctcagtccccctcttgattttgccccagggcagcagctacaaacagaaagccagctgtgagtgtcttcttgccaagcccagatctgcgagagatccgaagcaggactttatagctcttctcagtatggtgagttgtagctgatttggaagctggtggaggaggacagtggctctgtacagyttgtggggatctcccctgctactaccaccagccggaamaccatgggcagcgtctgtatgaggctttgggcataccttcagccttttctcccctgctggtcccaagaagcagacaaatcagtggtgattgagaatccaggggcctactgtcctccagaggccaatcgaagccaaggycagtattttgtggctctgtttgattacgaagctcgtactgcagaggacctgagcttccatgccggcgacaagctccaagtcttggacacttctcatgagggctggtggttggccagacmytyggaaaagaagggacccggcttaggtcagcagctgcagggctacattccttccaattacgtggcagaggaccggagtctccaggcagaaccgtggtttttcggagcaatcaaaagagcagatgcagaaaagcaacttctgtattcagaaaaccagacgggcgcctttctaatcagagagagtgagagccagaagggtgacttctccctctcagttttagatgaaggtgttgtgaaacactacaggataagaaggttggatgaaggtggcttcttcctcaccaggagaaaaactttttcaaccttgaatgaatttgtgaactactacaccacaacaagtgatgggctgtgtgtcaagctggagaagccatgcttaaagattcaggtaccgaccccttttgatttgtcatataaaactgtggaccagtgggagatagaccgcaactccatacagcttctcaagcgactgggatctggtcagtttggagaagtttgggaaggtctgtggaataataccactccagtggctgtgaaaacgttaaaaccaggttcaatggatccaaatgacttcctcagggaggcacagataatgaagagcctaagacaccccaagctcatccagctctatgctgtttgcacattagaagatccaatttatattattacagaattgatgagacatggaagtctgcaagaatatctccaaaatgatggtgggtcgaaaatccgtttgactcaacaggtggacatggctgcacaggtagcttctggaatggcctatttggagtcccagaactatatccacagagatctggctgcaagaaatgtccttgttggtgaacataatatctataaagtagcagattttggacttgcaagagtttttaaggtggataatgaagacatctatgaatctaaacacgaaataaagctgccagtgaagtggactgcacccgaagccattcgtactaataaattcagcattaagtctgatgtgtggtcttttggaatcctgctctatgaaatcattacttatggcaaaatgccttacagcgggatgacaggtgctcaagtaattcatatgttgggtcaaaactacagactaccacagccatctaactgtccagagcaattctatagcatcatgatggaatgctggaatgtagagcccaagcaacgaccaacgttcgagaccctgcactggaaacttgaagactactttgaaccagactcttcctattctgatacaaacaacttcataaactaaacaacaaggaaaaagaagaaatataattaagatgtgaaaacgcggaactcaccagtccagaaatatcgtcttctcaaccaactgtgaaatcagcttattttgacatattcaggtggtaggatgaactcaaccatgcattctgtatcaaaaagatcatctgtgtattctattgagtaggaaacgctgcaggacagtataagatgatgtgtcatttttccctcactgcctggtaaaatcaatcacactaaatgaagttatttttcttccttttaagaactcctcacatttctatttattgtttgaaatgccgatcaagagaatcaacagatgacggtgtttactctgttactgttgtgggcattttcctgtttactgattagactggttattcattattcctcaaattgctgaatcccatcaggctgttattatgaaggaatttgattgctttgctgcacagcaggacctgtgctttgagatatttttttccctctcttttaaaatatcttgtaactacaatgatggcaaagcatgctaaatgactcgattgtacttgaagtaattgcacgtatttttcctgtgcataagaaagcgcaaggctgttgagaaaaagaattaaaatcttcctcattttgtaggaggaaatgatggagtttgctctatacctcagtatgtgtcatcagagaatcatctgcattagttttaatctcttaatgtcaggaatcagattgcaaagccgagtaattgttatgtgtgggaatataagggaactaccacactgcctaccaggtctgagaaatagatattaaagtggcttagggaagctaacagagagctggaggattgctgcagctttctaagtaataataaaaagttcctttggcacactggccgattttaaattggctgcaagacaggccaagccatgcttcagctcttgaggctaggaataatgtctaaacatggttatgaaatgtagctttcgtctgttaagactggatgcttttagtctcttcatttttttcctcaccttggtaagaacttccctgttttcttaggcaatgagtgtatcgaatgttctgcctcattggatagttagcaatacttctctaaagtcagctccatatattccatgatcttctaatgtgcagtgctgaatgaatgttccaaaaggaacattcatcctcctataggacagaagagaatatctagatggtcacaaggatcccctgggaattgaaaaacatgtcagttctttcaactaggaactaggaggcaaggcatcagggattaacttttaccagttcagtgatgtcaggaccctagctgcatttctgttgccatggtgaaaatcctgacaaaaagcaacttagaagaggcaaggtttattttagcttacaatcccatgtcattgtatcacagcaggaagtcactgtgacaagatcttgaagctgattacaccacatccacattctaagaggagagagacattcacggatagcttgcttcctgatttgtgctcaggtcaatttctacactcttaaaaagtttgggacagctttgcctaggtaatagcatgacacacaataggctggactttccaggatcaattaacgtaattaagacaatctctacagacatgtccaaaaggccagtataatatagagaatcattttcaactctttgcaactctctttctgggttattctaggtactgacaaattggatcacttaagctagccattagaccactaagactcaaactttcccatctatagcaagcattgtctgtgttcaactggtcacaggtaaccaccagtggtaagtgaggctccttgttacctttatattcaagaagataaaatgggcaacttaaccccttagaccattatcctaagcctaaacacacacacgcacgcacgcacgcacgcacgcacacacacacgcacacgtgcatgcacacacactcacctcattcccattttgggggataagcaggtggcaaacacaatcccgtgaccagtgaacaacaatcagcacagtgaatgtaaatgcaaagtgttgattggcttggaagaaagtctgcactgaagctgcgaatataaacttctccaagacaagtttcttatttgaaaaaaaaaattgagagattgattcctgagttggtgtccaatcacagaactattaaagatgaattaactgttggaattaatctatgtacatgtaagcattcatttatcatctcaaacatgtctgaactgacttgaatctgaatcatgtgtgaagaccacagagaaggaaaagcatttgtaagataaagtcgccattaatattttaatcagttgacagagcatggggtagcttccgttgtttatttcagattgcctggtcaaatgtaaccaaggagaagacattcaacaactaggtggctaaaatgaaatttttaaaaaaggactcgcttttcctgagttcatttcttcaggacagattctacttggggcgtatgtataaaggaggagcactagtctcatttcattgtacaaattcaaatgctttgcacttttatgtggtagctgataataataaatttgtagtaagttctggctttgaaatataaaaaaaaaa

SEQ ID NO: 2789 - DNA, 1931 bp, Rattus norvegicus
aactgctccgttaacccggacgtgctgacgtcccgcccggcaatccgtacctgataccagacacctgtccctctcggtccgcagaaccagggcgctgcagcccgtggtagtctagtaagcgcccgagcgagtggagaccaagcccggcagaggcctcggacccgcgcccggagagtcatggctgcaaagctgctgcttctcctctgcctgttctcgggcttgcatgctcggtccaggagggtggaagaggatgacagtgaagactctccatcaaaccagaagtgggtcttggcacccaaatcacaagacaccgatgtgacactgattctcaacaaattgctgcgagaatatgacaaaaagttgagaccagacattggaataaaaccaactgtgatcgatgtggacatttatgttaacagcattggtcctgtgtcatccataaacatggaataccaaattgatatattttttgctcaaacctggacagacagtcgccttcgattcaacagcacaatgaaaatacttactctgaacagcaacatggtgggtttgatatggataccagacaccatctttcgaaactctaaaacagcagaggctcactggatcaccacacccaaccagctccttagaatctggaatgatgggaaaatcctttacacattaaggcttaccatcaatgcagagtgccagctgcaactgcataacttccccatggatgcgcatgcctgccctttgaccttctctagctatggctaccccaaagaagaaatgatttatcgttggaggaaaaattcagttgaggcagctgatcagaaatcatggcggctctatcagtttgacttcatgggcctcagaaacactacagaaatcgtgacwacatctgcaggtgattatgttgtcatgactatctactttgaactgagtcgaagaatgggatacttcactatccagacgtatatcccctgcatactgactgtggttctgtcctgggtatcattttggatcaaaaaagatgcgacaccagcaagaacaacattaggcatcaccacggtgctaaccatgaccacactcagcaccattgccaggaagtccctgcctcgggtgtcctatgtcactgccatggacctctttgtgactgtgtgcttcttgtttgtctttgccgcactgatggagtatgctactctcaactactattcgagctgtcgaaagccaaccatcaggaagaaaaagacatcgttattacatccagattcaacaagatggattcctgatcgaataagccttcaagcaccctctaattattctctcctggatatgagacccccaccacccgtgatgatcacgttaaacaattccatgtactggcaggagtttgaggacacctgtgtctatgagtgtctggatggcaaagactgccagassttcttctgctgctatgaggagtgcaagtctggctcctggagragaggccgsatccacattgacgtctctgagctggactcctactctcgggtcttcttcccaacgtccttcctgctgttcaacctggtctattgggttggatacctatatctttaagtgctgctctgaaggatgacagaagagtacttgattcatgtttttccttccatcatccccagacaagtagtgaccaaccaaaaagtagcagggaaggacactactccagcttgttgtgttacctttcagcaggatgggaagtactggaaagtattctttataaatatttcactcacacacacacacacacacacacacacatacacacacatacacacacacatacacacacacatacacacatacacacacatacacacacatacacacacacatacagacacacacatacacacatacacacacacatacacacacacacactcatgcactcatgcacacaggcacgc

SEQ ID NO: 2790 - DNA, 4064 bp, Rattus norvegicus
cctcggccgcaggctctgcggagaaagcctttaggagaagactcatagcagagaactattaggccgcaaagctgctgtccacgtggactggagctgacatcgcacgcctgcccgccaggatccctgctgccaagttcgtgctccgagacatggcgactgacaacagcaaggtggctgatgggcagatctctaccgaggtcagcgaggctcctgtggccagtgacaagcccaaaacccttgtagtcaaggtgcagaagaaggctggagacctccctgaccgggacacatggaagggacgcttcgacttcctcatgtcctgtgtgggctacgccatcggcctgggcaatgtatggaggttcccttatctctgcggaaagaacggtggtggggccttcctaattccatatttcctgacgctcatctttgcgggtgttcctctcttccttttggagtgctccctaggccagtacacctccattgggggcctgggcgtatggaagctggctcccatgttcaagggtgtgggcctcgcggcagctgtgctgtccttctggctgaacatttattacattgtcatcatctcctgggccatctactacctgtacaactccttcaccacgactctgccgtggaaacagtgtgacaacccctggaacactgaccgctgcttctccaactatagcctggtcaacaccaccaacatgaccagtgccgtggtggaattctgggagcgcaacatgcaccaaatgacagatgggctagacaagccaggacagatccgctggccgctagccatcacactggccattgcctgggtgcttgtgtatttctgcatctggaagggtgttggatggactggaaaggtggtctacttctcagccacatacccctacatcatgctcatcatcctgttcttccgtggagtgacacttcctggggccaaggaggggatcctcttctacatcacgcccaacttccgaaagctgtctgattctgaggtgtggcttgacgccgccacccagatcttcttctcctacggactgggcctggggtccctgattgctctgggaagctacaactctttccacaacaatgtgtacagggactccatcattgtttgctgcatcaactcctgcaccagcatgtttgccggcttcgtcatcttctccatcgtgggcttcatggctcatgtcaccaagaggtccatagccgatgtggcggcctcaggccctggactggcattcttggcataccccgaggctgtgacacagctacccatctctcccctctgggctatcctcttcttctccatgctgctgatgctgggcattgacagccagttctgtaccgtggagggcttcatcactgccctggtggatgagtaccccaggcttctccgcaatcgccgtgaactcttcattgctgccgtgtgcatcgtgtcctacctgattggcctctctaacatcacccagggtggcatttatgtcttcaaactgttcgattattactctgccagtggcatgagcctgctgttcctggttttctttgagtgtgtctccatttcctggttttatggtgtcaaccggttctatgacaacatccaggagatggttggctccaggccctgcatctggtggaagctgtgctggtcctttttcacacccatcattgtggcgggcgtgtttctcttcagtgctgtgcagatgacaccactcaccatgggaagctacgttttccccaagtggggccagggcgtgggctggctcatggctctgtcctccatggtgctcatccccgggtacatggcttacatgttcctcaccctaaagggctctctgaagcagcgtctccaggtcatgattcagcccagtgaagatatcgtgcgccctgagaatggtcctgagcagccgcaggctggcagctcagccagcaaggaggcctacatctaggggtacagccccctcatcacccctacactggcaccctggactggctgtacccacaccccttgaagactgaagatactctctgtctccaactacctcaaggggcgggtccagacaccatcaccatgcagagaggggagatgggggacagtctgaccctaggtgggccctgagtgggcagccaccccttgggggctttcacagaggccccttagcaggagcaggtggctggcctttgtaactgccactgtagctcctttttatgctgccagagagggtgatggctgaggccacacactcctggcttttagtcttcttcagactgttgtcctgtgccccaactgtagactgttatccagacttttctgtccaccttggctctgaactggtcatggaccagggctacagcattgtgttcatggccgctggcagccggcaggccctgcctcttcctttttaatttctccttcccgaggcagcttcacagacccatccccagactgttcacagaccagtgcggagagggtcctctgtccctgtgaccctgtgatccgggcagctcagtgtcccctgccccacctccccaggtggcattaacagcaaacagcctatccagaagagctctgtgtgctgaggagaaaaagaaaagccacaagcacaattgccttttctggtcaccaacccaggactttccccgagtgggagctgtagtccctctgagctgcccagtttaacacaaacaatggccaaggaaatcaaggtgaaggttctaagtcaggaccaatccagcccaccctggtttccctcttagactgtcactgccactctgttctgctgtccccctgccccccttacctttctggaaaactttcagatgtacacacccactaacggaggagggttacttcagaggttccctccatcctaccctggcactgagcttcccctgctccagtggggagcatcgtatgtcccttctggccttggattctgtgttggtgaagccagtggagacagtttctggaaagttccagcagctccgtctttctcctctgccgagaggatggactcccatgtagcaaagcgtatatgtcttgtcccgtagcttcttagcttggtagctcacaaactgtgtttatgactaatccttaataactatggtgaataactgtgaccgtgggtttcttgaatctcttgtcattctcatccaaaagtgaccagcacaccagttcttgcaataagctatctccctccctcagagcatcaagcacactgtagagaatgcaaacacgtacgcacatagaaatgcacacacatgcatacccatcctcacatgtggcagttagcgtcccgtgtgatattgtgtaggcaatctaccagctcttcccgaggccacttgtagcagggtcgtgtggctgaggcatctrcctgctcagtggagactctgcgaccagcttgcacaggtgcctgtcgccagagtcccaggtgtggaatgcaaggaccctccactgtgtctcgtggccccgtccytcccctacctgtctatgaagccctttaggaygrmsgcargaggtttccttcttgctgctcgatgttctttgatggaaaactgagaacaagtcttttttgagataaatgcagtatatttcatgtttgwaagcacctctgagatgtttggcaagaaatcccctgatttccacccaaacttaaccttatagagcacaacgttaagggtcgtacaattactgtgagaactgtgaatatgtgwaacttttctttttwagtttttgcccagagggaagaagataattgtattatcatatatgctwttttttgcaataaggatttattctcagaacaccaagtaaatttatctctatataaaaagtatatgtaatatatgcctattcagactatatacagagcctgttttaaaaaawtacagtattatttagtaaaattatctgktctatggaccaaatgtaaaatatttatacatgaagatgtrtyttamatgtctaycamatgatatcacamctagagcacgggcgttatstacgtttmtaagaatttagagraaaaatamtmrwggttctatgatawawrrvaaaamraaaa

SEQ ID NO: 2791 - DNA, 2326 bp, Rattus norvegicus
ggcggcagggcggccatgactgcggagcaagcgctgcccctgggcaacgggaaggcggccgaggaggcgcgagggtccgaggcgctgggcggcggcggcgggggcgcggcggggacgcgcgaggcgcgcgacaaggcrgtccacgagcgcggtcactggaacaacaaggtggagttcgtgttgagcgtagcgggagagatcatcggtctgggcaacgtgtggcgcttcccctacctgtgctacaagaacggcggaggggcattcctgattccttacgtggtgtttttcatctgctgtggaatccccgtcttcttcctggaaacggctctggggcagttcacgagcgagggcggcatcacgtgctggaggagagtctgtcctttatttgaaggcatcggctatgcaacacaggtgatcgaggcgcatctcaatgtctactacatcatcatcctggcgtgggccatcttctacttaagcaactgcttcaccaccgagctcccctgggccacctgtgggcatgagtggaacacagagaaatgtgtggagttccagaagctgaacttcagcaactacagtcatgtgtccctgcagaacgcaacctccccggtcatggagttctgggaacgccgggtcttggctatatctgatggcattgaacacatcgggaacctccgatgggagctggcactgtgtctcctggcggcttggaccatctgctacttctgcatctggaagggtacgaagtcaactggaaaggtcgtgtatgtcactgcaaccttcccctacatcatgctgctgatcctcctgatccgaggggtcacgttgccrggtgcctcggaaggcatcaagttctacctgtaccctgacctctcccggctctctgatccacaggtgtgggtggatgctgggacgcagatctttttctcctatgccatctgcctgggctgcctgaccgctctggggagttacaacaactataacaacaactgctacagggactgtattatgctctgctgtctgaacagtggcaccagcttcgtggctgggtttgctatcttctcagtcctgggcttcatggcgtacgagcagggcgtgcctattgctgaggtggcagaatcaggtcctggactggctttcatcgcctaccccaaggctgtcactatgatgcccctgtccccattgtgggccaccctgttcttcatgatgctcatcttcctgggcctggacagtcagtttgtgtgtgtggagagccttgtgacagccgtggttgacatgtaccccaaggtcttccggcggggctaccggcgagaactgctcatcctggccctgtccattgtctcttatttcctaggcctggtgatgctgacagagggaggcatgtacattttccagctttttgactcatacgcmgccagtggcatgtgcttgctcttcgtggccatctttgagtgtgtctgcatcggctgggtgtatggaagtaacaggttctatgacaatattgaggacatgattggataccggccactgtcactcatcaagtggtgctggaaagttgtgacccctgggatctgtgcgggcatcttcatcttctttctggtcaagtacaagccgctcaagtacaacaatgtgtacacatatcctgcttggggctacggcattggctggctcatggctctgtcctccatgctgtgcatcccgctctggatcttcatcaagctgtggaagacagagggcaccctgcccgagaaattacagaagttgacagtccccagcgctgatctgaaaatgaggggcaagcttggggccagcccacggatggtgaccgttaatgactgtgaggccaaggtcaaaggcgacggtaccatctctgccatcacagagaaggagacgcacttctgatccccgccagccacttggatgtgtctccagccttccttccctgcgtgtaaatgaatcctgaaccttgtatttcacctaatgttaggggcttgctcgtctgcacaggatttattaacaagttaactcccagccggccactgtgtgccctgtaccctcacctcaccccagcgatcgtgggcatatccacctcaccaagataattctgtacagtgaccagcagatcctggcccagggtggctcagcctgtgctttctagagtccttgtattatactgtcagcttctgtgctgggggcaggcggagtgagggagcggtgcccatctgcctctggttttcaattgctcccgattttatctctgaacttccctggccaccctcctctgtgccctaggatcagtttgttttattttgaaaaaaaaaaaaaaaaa

SEQ ID NO: 2792 - DNA, 2429 bp, Rattus norvegicus
gccggcgcgggctcggctgagctccacgcggctcaggacagccgtgaccactgaccgggcggcgtggatgctcagcaagcagctctgccaccgcgagccaatcccgatacatcgagtcgggtcgtcggggctgtccgagtccccacagacactccagccgtggaccaggtgcacagccaacactgagccttccctgtctgccctcctgggctcagacccttcaccactgtcactcagccatggctccaggtcttgctcggatcagcttgaggtctcagctgctgcccttggtgccgctgctcctgctactgcggggcgcaggctgcggccacagagtcccctcatggtcctcactgccttcagcagctgacagtgtgcagagggacagggacctccagcagtcacccggggacgctgcagccgctctgggtccaggcgcccaggacatagtcgctgtccacatgctcaggctctatgagaagtacaaccggagaggcgctccaccaggaggaggcaacaccgtccgaagcttccgtgcccggctggatgtgatcgaccagaagcctgtgtatttcttcaacttgacttccatgcaagactcagaaatgatcctcacagccaccttccacttctactcagaacctccacggtggccccgggctcgtgaggtattctgcaagccccgagctaagaatgcatcctgccggctcctgaccccaggtctgcctgctcgcttgcacctaatcttccgcagtctctcgcagaacactgccactcaggggctgctccgcggggccatggccctgacacctccaccacgtggcctctggcaggccaaggacatctcctcaatcatcaaggctgcccgaagggatggagaacttcttctctctgctcagctggattctggagagaaggatctcggagtgccacggcccagttcccacatgccctatatccttgtctatgcaaatgacctggccatctcggagcccaacagtgtagcagtgacgctacagagatacgacccatttccagctggagactttgagcctggagcagcccccaacagctcagcggatccccgcgtgcgcagggcggcacaggtatccaaacccctgcaagacaatgaacttccagggctggacgaaagaccagcgcctgccctgcacgcccagcatttccacaagcacgagttctggtccagtcctttccgggcactgaaaccccgcaccgggcgcaaagaccgcaagaagaaagaccaggatacattcaccccctcctcctcgcaggtgctggactttgatgagaagacgatgcagaaagccaggaggcggcagtgggatgagcctcgggtctgctccaggaggtacctgaaggtggattttgcagacatcgggtggaatgaatggatcatctcacccaaatcctttgatgcctactactgtgctggmrcswgsgagttccccatgcccaagatcgtccgcccgtccaaccatgccaccatccagagcatcgtcagagctgtgggcattgtccctggcatcccggagccatgctgtgtcccagacaagatgaactcccttggagtccttttcctggacgagaatcggaatgtggttctgaaggtgtaccccaatatgtccgtagagacctgtgcctgtcggtaaggtggcttcaagatggaaggcagacctccttcacccctgctgtgcagagtggcattcttggagccaggatttgactcgagcaagtcccaggtgctagayggagcttatagacagccaggctgagaccaagatctgtccaccgagccacagttctcccgttcttccgcgtcgtggtagctctgtaaggacttttttgagttcctggaaggaatctggaattcaccatggtctgaaatttgcccacatttttcaaggcctagaaatagcatgtgtccacagatgtcaaccccaaggcatctgtcctctcagaacctggaaagactatgcaaatctcggggcactccccgccccccacggcagtaaatgcttatttgaaaaccctcaagcggcatactagaaacaggscytaaagcatggcatggatgggtatttctcttacatttcactacacatgcttttatacatgcagtacgcaacatgtactcgagactgatttcttcttttaatatatgtattttgatttcaaagcaaagtggacagagttgacccccatgccccacagacgtaatactgaaagttaggtgwgggctgtttaaacatgcgtatgaaaaataatacagtgatatgctggaatactaaaaaataaccaagattctatatttttgtaaattatactttgtatactgtarawwrwrarwrwwmwrwgtttttatggaaagctaataaattaaaggtacagtgaaaaaaaaaaaaaaaaaa

SEQ ID NO: 2793 - DNA, 1592 bp, Rattus norvegicus
  misc_feature (644)..(644): n is a, c, g, or t
ggggcgtggggcaccaagtgcggtgcgtaccgcggcggtggggatggcggccggggcggagaagcccggccctggcgcggggcgctcgtgggaagaaggggcgccgcacgagtgaagagggagcctcctttacagagcaggccgagcccggctgggcgaggagcgccggtgccgccgcggcagagcggggttagcagtcgggagcaatgggcgactggagcttcctggggcggctgctggagaatgcgcaggagcactctacagtcatcggcaaggtgtggctgaccgtcctgttcatcttccgcattctggtgctgggggcggcagccgaggaggtgtggggtgatgagcagtcggacttcacctgcaacacacagcagccaggctgtgagaacgtctgctacgaccgtgccttccccatctcgcacattcgcttctgggcgctgcaaatcatcttcgtgtccacgcccaccctcatctatctgggccacgtgctgcacatcgtgcgcatggaggagaagaagaaagagcgggaggaggagctgctgaggagagacaaccctcagcacggccgtggtcgggaaccaatgcgtacagggagcccgcgggacccgccactgcgcgatgaccgtggcaaggtgcgnatcgcaggcgcgctgctgcggacctacgtcttcaacatcatcttcaagacgctcttcgaagtggggttcatcgcgggccagtactttctatatggcttccagctgcagccgctttaccgctgcgaccgctggccctgccccaacaccgtggactgcttcatctccaggcccacggagaagaccatctttgttatcttcatgttggctgtggcctgtgcgtcactggtgctcaacatgctagagatttaccacctgggctggaagaagctcaagcagggagttaccaaccacttcaacccagatgcctcagaagtcaggcacaagcccttggaccccctatccgaggccgccaactctggccctcccagcgtctccattgggttgccaccttattacacacaccctgcctgtcccacagtacagggaaaggccacagggtttcctggggccccactgctaccagcagacttcacagtggtgaccctaaacgatgcgcaaggcagaggccacccggtcaagcactgcaatggccaccacctgacgacagagcagaactgggccagcctaggggcagagccgcagactccagccagcaagccctcttcagcagcctccagccctcatggccgcaaggggctcactgacagcagtggcagcagcttagaggagagtgccttggtggtgacaccagagggagagcaggctttggcgaccacagtggagatgcactccccaccgttggtcctcctggacccagaaaggtccagcaagtccagcagcggacgagccagaccaggtgacttggccatctagccacagtctctccagatacctttataaaccttctctttaccccttagaaaccaaaaccaaaccaaaccaaaacaaaacagaaccaaaaagcatttcaaatcaacaggtagaaagagaaaaaaccaaaaaaaaaaa

SEQ ID NO: 2794 - DNA, 3611 bp, Rattus norvegicus
cccgcgggggaagacgcacgggcgggctcggctctcccggggagcggcccgggactgcaccgggaccggcgcctccccgctccggctgccctcggcctcgccccgggcccgggcggatgagccgggggcccggggggacatggaagcgctgacgctgtggcttcttccctggatatgccagtgcgttacggtgcgggccgactccatcatccacatcggtgccatcttcgaggagaacgcagccaaggacgacagggtgttccagttggctgtatcagacttgagcctcaatgatgacatcctgcagagtgagaagatcacctactccatcaaggtcatcgaggccaataatccgttccaggcggtgcaggaagcctgtgacctcatgacccaggggattttggccttggtcacgtccacgggctgtgcatctgccaacgccctgcagtccctcacagacgccatgcacatcccacacctctttgtccagcgcaaccccgggggttcaccacgtactgcctgccacctgaaccctagccccgacggcgaggcctacacactggcttcgagaccgcccgtccgtctcaatgatgtcatgctcaggctggtgacagaactgcgctggcagaagttcgtcatgttctatgacagcgagtatgatatccgtgggctccaaagctttctggatcaggcctcacggctgggtcttgacgtctctttacaaaaggtggacaagaacatcagtcacgtgttcaccagcctcttcaccaccatgaagacggaggagctgaatcgctaccgggacacactgcgccgggccatcctcctgcttagcccacagggggcgcactcgttcatcaacgaggctgtggagaccaacttggcttccaaggacagccactgggtcttcgtgaatgaggaaatcagtgaccccgagatcctggatctggtccacagtgcccttggcaggatgaccgtggtccggcaaatcttcccatctgcaaaggacaaccagaaatgcatgaggaataaccaccgcatctcttccctgctctgtgatccacaggaaggctacctccaaatgctgcagatctccaatctctatctgtacgacagtgttctgatgctggccaacgccttccacaggaagctggaagaccggaagtggcatagtatggcaagccttaactgcatacggaaatctaccaagccatggaatggagggagatccatgctagacaccattaaaaagggacacatcaccggcctcacaggagttatggagtttcgggaagacagctcaaatccctatgtccagtttgaaatccttggcacaacctatagtgagacttttggcaaagacatgcgcaagctggcgacctgggactcagagaagggcctgaatggcagtctgcaggagagacccatgggcagccgcctccaaggactgactctcaaagtggtgactgtcttggaagagccttttgtgatggtagctgagaatatccttggacagcccaagcgttacaaagggttctccatagatgtgctggatgcattggctaaagctctcggattcaaatacgagatataccaggcccctgatggcaggtatggccaccaactccataacacttcctggaacgggatgatcggggagctcattagcaagagagcagacttggccatctctgctattaccatcaccccggagagagagagcgttgtggacttcagcaagcgatacatggactactcagtggggatcctcatcaagaagccggaggagaaaatcagcatcttctcccttttcgccccctttgactttgcggtgtgggcctgcattgctgcagccattcccgtggtgggtgtgctcatattcgtgttgaatcggatacaggctgtaaggtctcagagtgccacccagcctcggccctcagcttctgcgactttgcacagtgccatctggatcgtctatggagcctttgtccagcaaggtggtgagtcttcggtgaactctgtggccatgcgcatcgtgatgggcagctggtggctcttcacgctcattgtatgttcctcctacacagccaaccttgctgctttcctcacagtgtccaggatggacagccccgtaagaacatttcaggacctgtccaagcaactggagatgtcttatggcactgtccgggactctgctgtctatgagtacttcagagccaaggggaccaatcccctggagcaggatagcacttttgctgagctctggcggaccataagcaagaatggaggggctgacaactgtgtgtccaatccttcagaaggtatcaggaaggcaaagaaggggaactacgcctttctgtgggatgtggccgtggttgagtatgcagccctgacagatgacgactgctcagtgactgtcatcggcaacagcatcagcagcaagggctatgggattgccctgcaacwtrgcagcccctacagggacctcttctcccagaggatcctggagctgcaagacacaggggacctggatgtgctcaagcagaagtggtggccacacacaggccgctgcgacctcaccagccattccagtgcacagactgatggtaaatcccttaagctgcacagcttcgctggggtcttctgcattttggccattggcctccttctcgcctgcctcgtggctgctctagagttgtggtggaacagcaaccggtgccaccaggagacccccaaagaggacaaagaagtgaatctggaacaggtgcaccggcgcatcaacagcctcatggatgaagacattgctcacaagcaaatttccccagcatccattgagctttctgccctggagatggggggcctggctccaagccaagctttggagcccwcgagggagtaccagaacacccagctctcagtcagcacctttctgcctgagcagagcagccatggcaccagccggacactgtcgtcagggcccagcagcaacctgccactgccgctgagcagctcagccaccatgccctcaattcagtgcaaacacaggtcgcccaatgggggactgtttcgacagagtccggtgaagacccccatccctatgtctttccagcccgtgcctggaggcgtccttccagaggccctggacacctctcatggcacctccatctgactgtgtcgcctgccctcctgcccgccacccagcccacccgaccagcagagctttttaatacaagaaaatgacaacacagaccacacacacacacacacacacacacacacacacacacagactctttcatttttcttgtacatacgtgtaaataatgacagaatggagtggggtaaaagtgtattttgaatattcccaattttcgaagtcagtaaaaaaaaacaaaacaaaacaaaaactgtatgaatgactttgtaaattttgttctatatgaataaaaaggcaaattacttgtgatctattttatttctgtgagtggggtaggcaggccagtacagaggggattgatctgcaggtgctggtcctgcagggtccaagtggctcccccttcctggttgcatgaccctgtgccaggatgccgggacatcggtttgcaggtccg

SEQ ID NO: 2795 - DNA, 3545 bp, Rattus norvegicus
ccgaagggacatcgaccctgtgaccctttagccaagccctagccccggacttcccgaagagggcaatgagtgcgtggctcctgccagcgggagggtttcccggcgctgggttctgtatccctgcgtggcagtcccggtccagcctctcgcgggtcctgcgctggccagggcctgggctgcccggactcctgctcctgctgctgctcccatctccgtctgccttctccgctgtgttcaaagtgggggtgctgggcccctgggcttgcgaccccatctttgcacgggcccgaccggatctggctgcgcgtctggccaccgaccgcctgaatcgtgaccttgccttagacggcggcccctggttcgaggttacgctgctcccagagccctgcctgactccgggctcgctaggggctgtgtcctccgcgctgactcgagtctctggcttggtgggtccggtgaaccccgcggcctgccggccagccgagctattagcccaggaagctggagtagcgctggtgccctggggctgccctggcacgcgggcggcgggtactacagccccggcggtgacccccgctgcagatgccctgtatgtcctccttaaagcattccgctgggcccgcgtggccctgatcaccgcaccccaggacctgtgggtggaggcgggacgcgctctgtccacagcactcagggcccggggtttgccagttgccctagtgacctccatggtgccttcagacctgtctggagcccgagaggccctcagaaggatccgagacgggcctagagttagagtggttatcatggtgatgcactcggtactgctgggcggcgaggagcagcgctacctactggaagctgcagaagagctgggtctgactgatggctccctggtcttcctgccctttgacacccttcactacgcgttgtctccaggcccggaggctctggctgcatttgtcaacagctccaagctccgcagggctcacgatgcggtgctcacgctgacacgccgctgtcctcctggaggcagcgtgcaagacagcttgcgcagggcccaagaacaccaggagctgccccttgacctcgacctgaagcaggtctctccgctgtttggcaccatctatgatgctgtcttcctgttggctgggggcgtgacgagagcaagagcagcagtgggtggcggctgggtgtcaggtgcatctgtggcccgccaaatgcgggaagctcaagtctttggcttttgcgggatcctgggaagaaccgaagagccctcctttgtgctgctggacacagatgcggcaggagaacggctgttcacaacacacctgctggatcctgtcttaggctccctgcgttccgctgggacccccgtgcacttccctagaggtgcacctgctccgggtcccgatccttcctgctggttcgatccagatgtgatctgcaacggaggggtggagccaggcctggtctttgttggcttcctcctggtgatagtggtgggactgactggagccttcctggctcattacttgaggcacaggctgctacacatgcaaatggtctccggccccaataagatcatcctgaccttggaagatgttactttcctccacccacaagggggcagctctcgaaaggtggcccagggaagtagatccagtctggctacccggagtacatcagacattcgcagtgtccccagccagccccaagagagcaccaacattggcctctatgagggcgactgggtttggctgaagaaatttccaggagaacaccacatggccatccggccggcgaccaagatggccttctccaagctgcgggagctccgccatgagaatgtggctctctacctgggactcttcctggcgggtacagcagacagccctgccacccctggggagggaatcttggctgtggtctccgagcactgtgctcggggctccctccatgacctcctggcccagagagacataaagctggactggatgttcaagtcttccctcctgctggacctcataaagggaatgagatatctccaccatcgtggtgtggcccacgggaggcttaagtcacggaattgcgtggtggacgggaggttcgtgctcaaggtgacagatcatggccacgggcgacttctggaagcgcagagggttttacccgaacctcccagtgcagaggatcagctatggacagccccagagctgcttcgggacccagctctagagagacggggaactctagctggtgacgtctttagcctgggcatcatcatgcaggaggtcgtgtgccgcagcacaccttatgccatgctggagctaacgcccgaggaagtgatacagagggtgcggagccctcccccactgtgccggcccttggtgtcaatggaccaggcacctatggaatgcatccagctgatggctcaatgctgggcagagcatccagagcttcggccttccatggacctcacctttgacctgttcaagggcatcaacaagggccggaagacgaacatcattgactccatgcttcggatgctggagcagtactctagtaacctggaggacttgatccgagaacgcacagaggagttagagcaggagaagcagaagacagacaggctgctcacacagatgctccctccatctgtggctgaggccctgaaaatggggacatctgtggagcctgaatactttgaagaggtgacactctatttcagtgacattgtgggctttaccaccatttcagccatgagtgagcccattgaggtggtcgacctgcttaatgacctctatacactctttgatgccatcatcggttcccacgatgtctataaggtggaaacaattggagatgcatacatggtggcctccgggctgccacagaggaacgggcagcggcatgctgcagagattgccaacatgtcactggacatcctcagtgcagtcggctccttccgcatgcgccatatgccggaggtaccagtgcgcatccgcattggtctgcactcgggcccgtgcgtggccggtgtggtgggcctcaccatgcctcggtactgcctgtttggggacacggtcaacactgcctcacgaatggagtccactggactgccttatcgcatccatgtaaacatgagcactgttcggattcttcgggctctggaccaaggcttccagatggaatgccgaggccgcacagagctgaagggcaagggtgttgaggacacgtactggcttgtgggcagagtcggcttcaacaagcccattcccaaaccacctgacctgcaaccaggggccagcaaccatggcatcagcctgcaggagattcccccagagagacgcaagaagctagagaaagccaggccaggccagtttactgggaagtgaagctctactggggacaggattattctgcaaggcccttcctgaagttgctgtgatatgggggactaaggcccaaggcttctgtccaattctgcctccaaggattctgagccaggagtctgctgcaaaccagctctgtgaccctggaaagttctg

SEQ ID NO: 2796 - DNA, 2989 bp, Rattus norvegicus
cgggccctccgctctccctgctccgccctccgcagccctccacagtcaccccggagaccagccctgttaagctctcggctctgaagctgactgatttccatggcagccgcgaagaaagcagttctggggccattggtgggagcagtggaccagggtaccagctcgacacgttttttggttttcaattcaaaaacagctgaacttcttagtcatcatcaagtagaaataaaacaggaattcccaagagaaggatgggtagaacaagatccgaaggaaatcctgcagtctgtttatgaatgtatagagaaaacatgtgagaaacttggacagctcaatattgatatttccaacatcaaagctattggtgtcagcaaccagagggaaaccacagtagtctgggacaagctaactggagagccgctctacaatgctgtggtgtggcttgacctaagaacccaatctactgttgagaaacttagtaaaagaattccgggaaataataattttgtcaagtccaagacaggccttccacttagcacttacttcagtgcagtgaaacttcgttggctcctcgacaatgtgaaaaaggtccaagaggctgtcgaagaaaatagagctctttttgggaccattgattcatggcttatttggagtttgacagggggaatcaatggcggtgttcactgtacagatgtaacaaatgcaagcaggacgatgctttttaacattcattctttggaatgggataaagagctctgcgaattttttggaattccaatggaaattcttcccaatgttcggagttcttctgagatctatggcctaatgaaagctggggccttggaaggtgtgccaatatctgggtgtttgggggaccagtctgctgctttggtgggacaaatgtgcttccaggatggacaggccaaaaacacgtatggaacagggtgcttcttactgtgtaacacgggccataagtgtgtattttctgaacatggccttttgacaactgtggcttataaacttggcagagacaaacctgtgtattatgcattagaaggttctgtagctatagctggtgctgtaatccgctggttaagagacaaccttggaattattaagtcctctgaagaaattgaaaaacttgctaaagaagtaggtacttcttatggctgctactttgttccagcattttcagcgttatatgcaccttattgggagcctagtgcaagagggatcatctgtggactcactcagttcaccaataaatgtcatatcgcttttgctgcattagaagctgtttgttttcaaacccgagagattttggatgccatgaaccgtgactgtggaatcccactcagccatttgcaggtagatggaggaatgaccagcaataaaattcttatgcagctacaagcagacattctgtatattccagtagtgaagccctccatgcccgagacaactgctctaggagctgccatggcagctggggctgcagagggggttggtgtctggagtcttgaacctgaggatttgtcagctgtcacaatggagcggttcgaacctcagatcaatgctgaagaaagtgaaatccgttactccacctggaagaaagctgtgatgaagtccattggttgggttacaactcaatctcctgaaagtggtatcccataaataataccacctcataggaatcccaagatgcaagccctttaacgtgatatgaaaatctgactattctgtctcataatctaatgatactattcatagactctgatttttgcccataaagcactcgctgcatgatcctccaagcagacctatgccttgaaacaaagaaaatgcagcagaaagatccctccagaaacatttaatattttttttgatattgacagttaagattgggtcagtgacctttgggactgacccctgcctccactctcatgatgccctatactattccccttaaggtctaggatgaatttgtatcctgtccattgaaatgtgtcatccagtatattccagatgctgctggcctaaacttgtctgaggaaggggttgttactcacctcttcaaaatgagtggattcctgcttgtttgcttttaacagctcagatgtcttttctacatattagaagaccacaacaccactggatatttcaatggaagcggtctaaagcattattggataataacttgctattcttgttgcttagacattttctgacagtgtttgcccaaattgaatttttcaggtgttttacactgtctcactaattgtcatggcttcatggctttctgtctggatcttacagggaagaagaaactttctttttctgctttttttttcattcctcctttttatatttttactctgtatgtataacatacatacctatatattttatatgctgagggtagcccatttttaaattaagagcacattatattcagtaagttccgaattatctcagctgggaggaaagtaactgtgggatgttacagtaaaaaatcttccccccacatgattctaaaccccaaaaaaatttttccttggaattatgttttccaaaattgagcccccattgggggagtaatcccaaccccaaactaagtaggaaaaaatgtgtggataaaacccataaaatcccccccattttattacccaataaaaagatggtcttaatttctgggatgaaaaaaaaataatctccactttatttcataactggcccaaaaaaaaactatcattgcaaatgcctcccagtgaaaccaataacttctcaaatatttagaattattggttataactcactaacctagtttcctaacatcaatttaaaatttgatttatagtaaagaaataagaaaatgatgcttctaattattttgttttgtccttttggaatggaaaatattgatatattaatagaaaaagttttatttggaattaatggtagattatatttcttattctgattgtgcccg

SEQ ID NO: 2797 - DNA, 2099 bp, Rattus norvegicus
ctctggtctcatctctgccacgccactgctcagaggcacagagtgagcaacagtttggymsckctgagtccatcyactgsarmywctsctcswgkcwcagcggctttagctctgcagaaatgaagcatccagcctacactctccttctctctctcatcatgtctatgtgtgctgggagcaaaggccttgctgagcagctaactaaggaaaacctgaccgtgtccctcctgcctcctaacttccacaaagagaacacagtcaccaatgactggattccagaaggagaggaagatgacgactacctggacctggagaagctgctcagtgaagatgacgactacatctatgttgtcgatgcagtttccccaacagactcagaatcaagtgctggcaacatcctgcagcttttccaaggcaaaagccggatccagcgccttaacatcctcaatgcaaagtttgccttcaacctttaccgagtcctgaaggaccaggctacctcttctgataacattttcatagcacccgttggcatttccactgccatggggatgatctccttaggtttgaggggagagacccatgaggaagtacactcagttctacacttcaaagactttgtcaatgctagcagcaagtacgaggtgacaaccattcacaacctctttcgaaagctgacccatcgcctattcagaaggaattttgggtacacacttcagtcagttaatgacctttatattcagaagcagtttcccatacgggaggacttcaaagctgccatgagagagttttactttgctgaggcccaggaggctgacttctcagatcctgccttcatatcaaaggcaaacagccacattctgaagctcaccaagggcctcataaaagaagctttggagaatacagactctgctactcagatgatgattctgaactgcatctacttcaaaggagcttggatgaataaattcccagtagaaatgacgcataaccacaacttccggctgaatgagagagaagtagtaaaagtctccatgatgcaaactaaagggaacttccttgcggcaaatgaccaggagctagactgtgacattctgcagctggagtatgtagggggcatcagcatgctaattgtaattccacggaagctgtcgggaatgaagactcttgaagcacagcttacaccccaggtagtggagagatggcaaaaaagcatgacaaacagaacccgagaggtacttctgcccaagtttaagcttgagaagaattacaacctggtggaggtcctcaagtccatgggaatcacaaagctcttcaacaagaatggcaatatgtcaggcatctcagaccagaggatcatcattgatctgttcaagcaccagagtaccatcacagtgaatgaagagggtacccaagctgcagctgtaactacagtggggtttatgccgctgtctacccaagtcagattcactgttgaccgtcccttcctgttcctagtgtatgagcaccgaaccagctgtctgctgttcatgggaagagtggccaaccctgccaagtcttmaygrkgctggtctgggcacctgatgtagtttggggacactctgtaatcctgttttcattctaagaggacagagatattttgatattgataatctatgtagtttgagataataatctaacagtaaacagtgtcataagtgcacagatgttaatgcaactaatggtcgtgccagctattccctagaggtcctagacacagactgcctcagcgccaacgcctctgtcactgagaatgggcagagtggagctgacactttctcctcagttagccgtaccagtcaaggtgtctcctcagccaggcccctccatatggatggtactgaggaactctcacccttccagggaggatgtccaaggagcaccattcttgcctagtggaaaagaaacctcaacatgtctgagacatttggacttaattcaaggctgaaccttttaaattcatgtaaatatcatctgttctgctttgtgtcaatagggctaccatagcctattctagagacaaataaacaaccatatttactaagcaaaaaaaaaaaaaaaaa

SEQ ID NO: 2798 - DNA, 1172 bp, Rattus norvegicus
cacgaggccccgcggcctgggaaaaggcagcatattgaggcgcggggctctcagcatcaggccccgggatgctaatgagggcgagcgcgttcccacagcccggacattgtgccgcgcggcccacctgctcctcggggagcgaccattgtgcccgcgccaattcacaggcaatttagcgtgcgctaatgggccggcgcctttgtgcggccggcgccgccattggccgytgagtgtgggaacggccgcggcgcccggaccccaggcgccgggccgctgcccgcgcctatataaggctggcgtkagggggttcgggccgcgccagcccgggacgcctggctctgctcgctccgctccgctcgccaatcgcctccagagctccaggcatggccccaagtaccgtggcggtggagatgctcagtcccaaggagaaaaaycgactgcggaagccggtggtggagaagatgcgtcgggaccgcatcaacagcagcattgagcagctgaaactgctgctggagcaggagttcgcgcggcaccagcccaactccaaactggagaaggccgacatcctggagatggccgtcagctacctgaagcacagcaaagccttcgccgcggccgccggccccaagagcctgcaccaggactacagcgagggttactcgtggtgcctgcargaggcggtgcagttcctgaccctgcatgcagccagcgacacgcagatgaagctgctttaccacttccagcggcccccagctcccgccgcgcctgtcaaggagaccccgacgcccggcgctgcgccccagccggcgcgctcctccactaaggccgccgcctccgtctccasctcgcgccaatctgcctgcggcctctggcggccctggtgacccarcggccgacgggtgcctggagctgaccagaggrmcagctcgttcctctgdtsytctcgatgtgggaagacattccccagccgcgtttcagccccaggttggccgcaaccttcttccgaaggctccctccccaggctggctggccagcaaggggggtcattcttagagaatgtgcgtgcagagttgtcatttggggataatcagggtccaccctctgccgcctgtccgaccccatggggttkktttgtgtttgcatttcarcaagtgacttctgcgaagttcccg

SEQ ID NO: 2799 - DNA, 3518 bp, Rattus norvegicus
gctactacctagcttagtgaccttgaacgtgtgccattatgtttctgagtctatttataaaatggggaagagttggcatgaatttggaaagatttctcaggctccacccggttcgaaattcggcaatttctcaactagggtgcatccatcctgcgagaggttagggaggccaccgctgagaaaccagcatcagtgtagagcagaacctgttgaccaaacctggcaaagccatgccctttcggaaggggctttgaaggccagatcgcccgtagtcagcagtgaaactggggttctaactgtcattcctggggctagagaccctgctaggcgagacttatcaagcgcaccttaccaaggcagaggcacgggcccagcccacctctcttctgggtgtgtcccagaattgcttgcctcagccctgaactgccctggctgcccagagtggcagagaatgacaccgtaggtgtccgggactgactgggaaagcgacaaaggcggagcagggcttggggtaggggtgggcaggaaggagagggcgctgttggcaccaggagcagctggaggggaggagatcctgctctggggaagccctgcgggcgcggctttacaacaccccctcctcctggtcggttatttcggaccccgggacccgatccggagtccggcttggggagcctagtgggtctggaagctgctatatttagccggtgcagcgggcgagaggaaaactatttatagatcaaacaatccgcgctccctgcgtcaatggaaccccgcgtgcgtcacgcgcgcagacattccaggccccccctcttcgccccgccccctcgggctccccgtccccgcgcctcctcctggccgcctcccgccggaaccgcgccgccccccgcgcccttgtatggccaaagctcgccgggccgtgtgcgtcagtggcgcccccgcccctctccatgcgtcacggagcgcttaagaggtgggtcgggttcgccaggggagccccagtgcaggaggctgcgaaagttggggtagtgtgcgagaaggattgcagagcgcacgcggaaccagactgcgactgggtcctgggtcgctggtcccggccacggggagcgggagccggccggagatgccctgtatccaagctcaatatggaacaccagcaaccagcccaggaccgcgtgaccacctgacaggtgaccccctggcccttgagttcagcaagcccaccatggacctggccagccccgagacggcgcccaccgcacctgccaccctgcccagtttcagcaccttcatggacggcggatacaccggagagtttgacaccttcctataccagctgccggggacagcccagccgtgctcctcggcctcctccacatcttcttcctcgtcctcggccacctctcccgcgtcggcttcctttaagtttgaggactttcaggtgtatggctgctaccctggcaccctgagcggcccattagacgagaccctgtcctccagtggctctgattactatggaagcccctgctcagccccgtcaccacctacacccaacttccagccatcccagctctccccttgggatggttcatttggccacttctcccccagccagacttatgaaggccttcgggtatggactgagcagttgcccaaggcttccgggcctccgccacctccaaccttcttctccttcagtcctcccaccggtcccagccccagcctggcccagagttccctgaagttgttcccagcaccagccacccaccagctaggggagggggagagctattccgtgccagccgctttcccgggcttggcacccacctctccgaactgtgacacttccggcattctggacgcacccgtaacctccaccaaggcccgcagtgggtcttcagggggcagtgagggccgctgtgctgtctgtggagacaacgcttcgtgccagcattatggggtccgcacctgtgagggctgcaaaggcttcttcaagcgcacagtacagaaaagtgccaagtacatctgcctggcaaacaaggactgccctgtggacaagaggcggcggaaccgctgccagttctgtcgcttccagaagtgcctggctgtgggcatggtgaaggaagttgtccggacagacagcctaaaggggcggcggggccggctaccttcaaaacccaagcagcccccagatgcctcccctaccaatctcctcacgtccctcattcgagcacatttggactccgggcctaacactgccaagttggactattccaagttccaggaactggtgctgccccgctttggaaaggaagatgccggtgacgtgcagcaattttatgacttgctctctggctccctggacgtcatccggaagtgggcggaaaagatcccgggcttcattgagctttccccaggagaccaagacctgttgctagagtccgcctttctggagctctttatcctccgcctggcctaccgatctaagcccggtgaggggaagctcatcttctgctcaggcctggtgctacaccggctgcagtgtgcccgcggctttggtgactggatagacaacattctagccttctcacggtccctgcacagcttgggtgttgatgttcctgcctttgcctgcctgtctgctctggtcctcatcactgatcgacatggcctccaggaccctcggcgggtggaggagctgcagaaccgcattgctagctgtctgaaggaacacatggccgccgtggcaggagacccacagccggccagctgcctgtcacgtctgctgggcaaactgcctgagctccggactctgtgcacccaaggcctacagcgcatcttttgcctcaagctggaggacttggtgccccctccacctatcgtggacaagatctttatggacaccttgtctttctgaccctgccccgaacacgcgtgcacactcacgtgcatgttcttcttgtcacccacgtgcctttaagcccatagcccacggacccccagaccaccccaccccccagcctgttttttgagctaagactgatgtatctcctcattccagaagatggacagagagagagagagagctcaagacctgggggggagggtgtgtattcacgggggtgaccccactatttctcttatccctcccagctcagacctgsccttccgcgtgtttytgtaagataamccaytyttaacacataccactctgctstatataagctgacgctgctgtaaatacagaaaggaagaggtcggggtgggggtttgagaggaagggtgggccccccaaccccgccagctgggcaagcctctcgagcctccwacttgagatctcttccgctctccttccatgtgtacatagctgtcactcaagaaggtgattgacagattctgatttatatttgtgtatttttttcctggatttataggatgtgactttttctgattaatatatttaatatattaaataaaaactagacatgtwrmwrraamwraaaaaaaaaaaaaaaaaa

SEQ ID NO: 2800 - DNA, 2240 bp, Rattus norvegicus
gaattcgggcagaccctcggtctccaaagctacatagacacttggattcaagagggcacgagaaaagggggtcttggtgatcctcccagtacaccccagaaagccaggacacccctggcagcaccactccttcagggtcagccttagtgccctgtccaagagcactgctgtgaccacagggctgcaggtaccaggacaaaaggcctagttgctctcagagagccagtactgtcctaggcccagagctgattcgactctgaaactggggcaaggaagggtcaggatggacagtggggatggaagggggagctccccaaatgtccagggcagmmgmwcwgcaagtcyccatggwgmkrkysrcmytgttcctttccgtgctgatagcccagggagaaggcagccggaggagggccacccaggcccacagcaccacccagcctgctctgctgaggctgtcagatcacctcctggctaactacaagaagggagtgcggcctgtgcgggactggaggaagcccaccctggtctccattgatgtcatcatgtatgccatcctcaacgtggatgagaagaaccaggttctgaccacctacatatggtaccggcagttctggaccgacgagtttctacagtggactcctgaggacttcgacaatgtcaccaaattgtccatccccaccgacagcatctgggtccctgacatcctcatcaatgagtttgtggacgtggggaagtctccaagcattccttatgtgtatgtgcaccatcaaggtgaagtccagaactacaagcccctacagctggtgaccgcctgtagccttgacatctataacttcccgttcgatgtgcagaactgctctctgaccttcaccagctggctgcataccatccaggacatcaacatttccctgtggcgaacaccagaagaagtgaggtcggacaagagcatcttcataaatcagggcgagtgggagctgctgggggtgttcaccaaatttcaggagttcagtatagaaaccagtaacagctatgcggaaatgaagttctacgtggtcatccgccggcggcctttattctacgcagtcagcctcttgctgcccagtatcttcctcatggtcgtggacattgtgggcttttgtctgcccccggacagtggtgagagagtgtctttcaagatcacgctccttctgggatactcagtctttctcatcatcgtgtcagacacactgcctgcaacggccatcggcactcccctcattggtgtctactttgtagtgtgcatggctctgctggtgataagcctcgctgagaccatcttcattgtgcagctggtgcataagcaggatttacagcgccctgtacctgactggctgaggcacctggtcctagacagaatagcctggctgctctgcctaggggagcagcccatggcccataggcccccagccaccttccaagccaacaagamtgatgactkctcagccatgggaaaccactgcagccatgtcggaagccctcakgacttggagaagacctcgaggagcagagatagccctcttycaccaccaagggaggcctcgctggctgtgcgtggcctcttgcaagagctgtmctccatccgccactccctggagaagcgggatgagatgcgggaggtggcaagggactggttgcgggtgggatatgtgctggacaggctgctgtttcgcatctacctgctggmcgtgctggcttacarcatcaccctggkcacgctctggtccatttggcattattcctgagtgggtacagcctggcagggaggggatgtgagtyctgcatcctgtttccaacaccaattcatctgagcaaccccagtccccttgtcccctaaacttagcactgaagacccggtcagaccccccgayytcsctatcatggctttaaagcatgwtatcctagatcaagaggaaccaagactcctytaacttattaagacatcaagccctggttcctttyccagtacttctgtgattatggcccttgggatggctcattyccacagtttytttttcctttttgatcagaggaaagcaaattctcttgcctaggtgcctgagacgtctgtgcctgttttatccaggccccagtggcttcttcttcagctcacttgtgggtacttccctagcgctcagcctcatcaaccaacggggggaggggataataaaatgctatgatwtccymmraawwmaaaaaaaaaa

SEQ ID NO: 2801 - DNA, 4878 bp, Rattus norvegicus
ctgtcactaggcctgagcgcacagcccggcggagagagcagatccttgctcagtatccagccctatcgcggccaaggcggaggacgaagagtccaggctcttattctggacttgttccccaattccagggcgcttctcgatcctgcagcagcctcttagcagctccagcagtgcggagccattaactcggtgctggaataaaaaaaattcccgcgcgccggcgcagcctttttctaagtgacccggagcttttggctgcgagctctgcaagaactttcaaatcaaagtgcttgtgaattttaagcatccggagcaggccaacgaagctctgcgcgtctaaccgtctaaccgtctaaccagaacaagagttctctgcgctgcagtgtgcggtgtcatgcagccagaagtccctttggggtcaggcaagctgaagccctgctcagacatgggggacrtccagcgggcagcgarrtytcggrgctctcwgtcygcacacatgctgttgctrctcctcgcttccataacaatgctgctrtgtgygcggggcgcacacgggcgccccacggaggaagaygaggagctggtsctgccctcgctggagcgcgcccsgggccacgattccaccacackcctycgtctggacgcctttggycagcagctrcatctgaagttgcagccagacagcggtttcttagcgcctggcttcaccctccagacggtggggcgcagtcctgggtccgaggcacagcatctggaccccactggggacctggcccactgcttctactctggcacggtgaacggtgaccccagctccgccgccgccctcagcctctgtgaaggtgtgcgcggtgccttctacctacaaggcgaggagttcttcattcagccagcgcctgcggtggccaccgagcgcctggtccccgccgaaccgaaggaggagtcaatcgcacctccgcggttccacatcctgaggcgaaggcggcggggcagcggcggcgcaaagtgcggtgtcatggacgaagagaccctgccaaccagcaactcgggtcgcgaaagccagaacaccccggaccagtggcctctgcggaaccccactcctcagggcgcgggaaagccaacaggaccaggaagcatargraagaagcgatttgtgtccagcccccgttatgtggaaamywtgctcrwggctgaccagtccatggctgacttccacggcagcggtctaaagcattaccttctaaccctgttctcggtggcagccagattttacaagcaccccagcattaggaattcaattagtctggtggtggtgaagatcttggtcatatatgaggagcagaagggaccggaagttacttccaatgccgctctcacccttaggaatttctgtagctggcagaaacagcacaacagccccagtgaccgggatccagagcactatgacacagcgattctgttcaccagacaggatttatgtggctcccacacctgtgacactctcgggatggctgatgttggaactgtatgtgaccccagcaggagctgttcggtcatcgaagatgatggtttacaggctgccttcaccacagcccatgaattgggccatgtgtttaacatgccacacgatgacgccaagcactgcgccagyttwaatggcgtgagtggggattcccatctgatggcctcgatgctctccagcttggaccacagccagccctggtctccttgcagtgcctacatggtcacatcattcctggacaacggccatggggaatgtttgatggacaagccgcagaacccaatcaagctcccatctgatcttcccggtaccttgtacgatgccaaccgccagtgtcagtttaccttcggggaggaatccacgcactgccctgatgcagccagcacatgcagtaccctgtggtgcactggcacctccggtggcttactggtgtgcmaaacaaawcacttcccttgggcagatggcaccagctgcggagaagggaaatggtgtgtcagcggcaagtgtgtgaacaagaccgacatgaagcactttgctactcctgttcatgggagctggggaccgtggggaccatggggagactgctcaagaacctgtggtggaggagttcaatatacaatgagagaatgtgacaacccggtcccaaagaacggggggaagtactgcgaaggcaaacgagtccgctacaggtyctgtaacattgaggactgtccagacaataacggaaaaacattcagagaggagcaatgcgaggcgcacaatgagttttccaaagcttcctttgggaatgaacccacggtggaatggacacccaagtatgctggcgtctcgccaaaggacaggtgcaagcttacctgcgaagccaaaggcattggctacttctttgttttacagcccaaggtggtagatggcactccctgtagtccagactctacttctgtctgtgtgcaaggacagtgtgtgaaagctggctgtgatcgcatcatagactccaaaaagaagttcgataagtgtggcgtttgtggaggaaatggctccacgtgcaagaaaatatcaggaacggtcactagtacaagacctgggtatcatgacattgtcacaattcctgctggagccaccaacattgaagtgaaacatcgtaatccaaggggatccagaaacaatggcagctttctggctattagagctgcagatggtacctatattctgaatggaaacttcactctgtccactctagagcaagacctcacctacaaaggtactgtcttaagatacagtggttcctcagcagcattggaaagaatccgcagctttagtccactcaaagaacccctgaccatccaggttcttatggtgggccatgctctccgacccaaaatcaagtacacctattttatgaagaagaagacggagcccttcaacgctattcccacattttcggagtgggtgattgaagagtggggggagtgctccaagacatgtggttccggttggcagaggagagtggtagagtgcagagacattaatggacaccctgcttctgaatgtgccaaagaagtgaagccagccagtaccagaccttgtgcagaccttccttgcccacgttggcaggtgggggattggtcaccatgttctaaaacttgtgggaagggttataagaagagaaccttgaaatgtststcccatgatggcggtgtgttatcaaatgagagctgtgatcctttgaagaarccaaagcattacattgacttttgcayactgacacagtgcagttaagaggttttgaggacaaggtagcgtgggagggctgatacactgaaagcaagagtgctggagggatcctgtgaatcaaaccagtaaacagtgaggtgtggcaatgaggtgtgtataggggatacattagcaaaagaggtagatccgtacactatcctgccagttaacttctgatagggtagttaatgaggaatagtagcatctgaaagatcatacatagcactatgaagccccaaagtactattagtattccttttgttacatccactgcacaaataattttcagagtctggcagaagcatggctaccctgttgcatggtactaattaatactttgtatcacaggggttgggaaaggaaagcagmasrakggtaagattggatttcaaacatggcttacttttttatcactggaggcagggagaagggtacaaacaagatcattattcaaagtttctggctgccgtggtttcagggaaggttgattcctatcaagagtgaaaagttctgattgctcaacatgagagagagaaagcctcgtctctgtgaaataactcttgatttcttcttagaccatctccgttttttaaccataattcctgttgaggtagtaacaattcacctacttataaaatgtacattgggtgggaaaaagtgaagtataagagttacacataaaaactcaaggaataagcaacatggctcctgctttgctttctcctaaggttagcctgcctgggatctgtggacgttaaagataatccttgactcacaaaaggcagtaaaaccatacatgtcatgcaagagtaagaatgggctatagrgatcagggtcccatgagatgggggwcacggaggtcactcatctcacatgggagactgctgywggatakcaggtccactcctggcagctggyccaacagtcgtatcctggtgaatgtctgktcagctcttktactgasagagaatatgactgtttccatatgtatatagtraaatacattactatgatttatatgtactttataagtattggktygtttgttccttctaagaaggrctatagtttrtaataaatgcctataacatatttatttttawacatttatttctaatgataaaaccttttaagttatatcgcttttgttaaagtgcatataaagrtagrgtatttatacaatatatgttaactrgaaataataaaagaacacttttgaawrwrwwwrmmwawwwtytgaagtgggcttaactcctgggcaagaaatytaatgrgacacaagcattggatttcaggacagctttaaaatytggktgaatgaactgtatttcctgtttatagacatactaataaaaaagaagttgatgatgtctttagtgataagattgttactaacgtggttggcaaattactgtaaagagtcagatagtaagcgtttatggcattgtaggctatatttcctgccacaaccctgtgacagtgaatgctttgtaggaatgrgagcasccataaatgacatgtacmccatagctgtgctttaataaaaccttatttrcaaaaamaaaaaaaaaaaaaaaaaaaaaaaa

SEQ ID NO: 2802 - DNA, 3072 bp, Rattus norvegicus
  misc_feature (97)..(105): n is a, c, g, or t
  misc_feature (658)..(675): n is a, c, g, or t
tcgcctgcttcgggaccgctcgtcgtcagtacttcacctgctgctttgctgggaaagggagaacagagggtcagttccaggaagacagacactatgnnnnnnnnntctctgagcagtgccttcaggactgtgaccaatgaccccgggattatcacgtggagaattgagaaaatggagctggtgctggtgcccctgagtgctcatggcaacttctatgagggagactgctacatcatcctctcgacccggagagtgggcagccttctctcccaaaacatccacttttggatcgggaaggactcctcccaagatgagcagagctgtgcagccatctataccacacagctggatgactacctgggaggcagccccgtgcagcaccgtgaggtccagtaccatgagtctgacaccttccgtggctacttcaagcggggcatcatctataaaaaggggggtgtggcctctgggatgaagcatgtggagaccttctcctatgatgtgaagaggctgttacatgtgaaggggaaaagaaacatcagagccactgaggtggaaatgagctgggacagttttaaccaaggtgatgtcttcttgctggacctcgggatggtcatcatccagtggaatggcccggagagcaacagtggggaacgcctcnnnnnnnnnnnnnnnnnnaaggctatgcttctagcaaaggacattcgggacagggagggagggggccgagctgaaatcggggtgattgagggagacaaagaggcagccagcccagaactgatgacggttctccagaatacccttggccgacgctccattatcaagcccgcagttcctagtgaggtcaccgatcagcagcagaagtcaaccatcatgttgtatcatgtctccgacacaactgggcagctgtcggtcacagaagtggcaacaaggcccctggtccaggagctactgaaccatgatgactgctatatcctggaccaaagtggcaccaagatctacgtatggaaaggcaaaggagccaccaaggtggagaaacaggcggccatgtccaaagccctggatttcatcaagatgaagggttatcccagcagcaccaacgtagagaccgtcaacgatggcgcagagtcggccatgttcaaacagttgttccagaaatggtcggtgaaggaccagaccactggcttggggaaaacattcagcattggtaaaattgctaaaatcttccaggacaagttcgacgtgactctgctacacactaagccagaagtggctgctcaggaaagaatggtggacgacggcaacggcaaggttgaggtctggagaattgagaacctggagctggtccctgtggaataccagtggcatggcttcttctacgggggagactgctatctggttctctacacgtatgatgtgaacgggaaaccctgttacatcttgtatatctggcagggacgccacgcttcccaggatgagctggcagcctcggcctaccaggcggtggaggtggatcagcagtttggtggagccccggtgcaagtccgggttagcatggggaaagagccacgccacttcatggccatcttcaaagggaagctggttatctatgagagagggacttccaggaagggaaatgtggagcctgaccctccagtaagactcttccagatccacgggaacgacaaatccaataccaaagcagtggaagtctcggcctccgcttcctccctcaactctaatgatgtctttctgctttggactcaggcggagcactacctgtggtatccgaaggggtcaagtggggacgaacgggcgatggctaaggagctggcagagcttctctgtgatggtgacgcagacactgtagctgagggccaggagccacctgagttctgggaccttctgggaggaaaagccccctacgctaacgacaaaaggctgcagcaggaaaccctggacatccaggtccggctttttgaatgttctaataagaccggccggttccttgttactgaggtcacggacttcacccaggatgacctgagcccaggtgatgtgatgctcctggacacctgggaccaggtgttcctgtggataggagcggaggccaatgccacagagaaggagggggccctctcgactgctcaggagtacctggtaacacaccccagtggccgagaccccgacacaccgatcctgatcatcaaacagggctttgagccccccactttcacaggctggttcctggcatgggaccctcacatttggagtgaaggaaaatcatatgagcagttaaagaacgagctgggagatgccactgctatcgtgcgaatcaccacggacatgaagaacgcaaccctctccctgaattctagtgaaagtggsccaaagtactaccctgtggaggttctgctgaaaagtcaggaccaggagctgcctgaggatgtggaccccaccaaaaaggagaattacctctcggaacgagattttgtctctgtgtttggcatcaccagagggcarttygkcwckmkgcctggctggaaacagctccagctgaagaaagaagcaggccttttctagaacaaggcgtgaccacaggagagggctaatgcagtgccaasatcagcaaaggttcatctacgactgagcccgacacacgctgccctagatacgacagatctcagggtcgtgtattctgtcttttgcattcatccttgcatttctaggttgctatacactagatgccaactatttgccttttagctttggtggtcctttagcgaawgyctcagcagagagagwgaaggcataaaggtagagagaactagaaactaagctcaaaatatttaatgcatcaggacccacatttgctttgaactataccctgcaatccccaaagtggtggagtcagcacacgcttcctgcaggccggactccaaatgcccaggtctaccatgtgccacaccatgttcatgtgccacaccatgttcagcctttcaaataaagaggccatgtgccawrwwaaaaaaaaaaaaaaaaaaaaaaaaaaaaaaaaaaaaaaaaaaaaaaaaa

SEQ ID NO: 2803 - DNA, 1535 bp, Rattus norvegicus
cttgcwcwgkggtagatgtstctctgtacgctgttcctttcctcttcccctcccgcaggsyttgcggccaccatggcgyaykagrggcagcagagcctgcggcagckttggcctttgcagcggcggcagcrgcaccaggctctgcagcggcaacccccaccggcttaagccatggcgctcttcacgaaacccagcagcagcgttgctgtaacggacaaagataccttcgagttaagcacattcctcgataccagcaaatccctacaacatgaccgagatgagcttcctgaacagcgaagtgttggcgggggacttaatgtcccccttcgaccaktcgggtttkggggctgaagaaagcctaggtctyttagatgactatctggaggtggccmmscmcwwcaaacctcatgggttctccarcgacaaggcgggctcctcagaatggctkgctatggatgggttggtmartgcctcagacaccggcaaggaggatgccttttccgggacagattggatgttggagaaaatggacctgaaagagtttgacttcgatgctctgtttcgaatggatgacctggaaaccatgccagatgagcttttggccacgttggatgacacatgtgatctttttgcccctctagtccaagagactaataaggagccccctcagacagtgaacccaattggccatctcccagaaagtgtaataaaagtcgaccaggctgccccctttacattcttgcagcctcttccytgttccccagggtttctgtcttccactccagatcattcctttagtttagagctgggaagtgaggttgatatctctgaaggagataggaagcctgactytgstgcttatattactctaacccytcagtgtgtaaaggaggaagacactccctctgatagtgacagtggcatytgtatgagcchtgagwcvtacvtgggcthtccccaacacagcccttccacytycagggccccaccagacagtctgccttctccaggtgttcmtcgtggttctcgacccaaacyttatgacccmmctggagttagtktgacagctaaagtgaagactgaaaagttggataagaagctgaaaaagatgkrgcaaaacaagmcagcakctabtaggtwcckccaraaraaragggytgagcaggaagccctcmmtggcgagtgtaaagagctagaaaaraagaacgaggmtytgaaaragaaggcagattctytcgccaaagagattcagtatytaaaagacytsmtavamraggkccgwaaggcaagggggaagamragagttccttaatagggtagtcaggtgctttgtgcttkwwyatagtcytgtgaygskgtgyytgctstaataaattattttrwagtgaaarwaaaaaaaaaaaaaaaaaaaaaaaaacctttgcggccgcaagcttattccctttagtgagggttaattttagcttggcactggccgtcgttttacaacgtcgtgactgggaaaaccctggcgttacccaacttaatcgccttgc

SEQ ID NO: 2804 - DNA, 1240 bp, Rattus norvegicus
tcgcggcggcggcgggtgtcgtctcggcggcggcggaggcagtagcactatgtcggaggagcagttcggaggggacggggcggcggcggcggcaacggcggcggtaggcggctcggcgggcgagcaggagggagccatggtggcggcggcgcagggggcagcggcggcggcgggaagcgggagcggcggcggctctgcggccggaggcaccgaaggaggcagcaccgaggcagagggagcgaagatcgacgccagtaagaatgaggaggatgaaggccattcaaactcctccccacgacacactgaagcagcgacggcacagcgggaagaatggaaaatgtttataggaggccttagctgggacaccacaaagaaagacctgaaggactacttttccaaatttggggacgttgtagactgcactctgaagttagatcctatcacagggcgatcaaggggttttggctttgtgctatttaaagagtcggagagtgtagataaggtcatggatcagaaagaacataaattgaatgggmamgwsrttgatcctaaaagggccaaagccatgaaaacaaaagagcccgtcaaaaaaatttttgywsgwggcctttctccagacacacctgaagaaaaaataagagagtactttggkggttttggtgaggttgaatccatagagctgcctatggacaacaagaccaataagaggcgtgggttctgtttcattacctttaaggaagaggaaccagtgaagaagataatggagaagaaataccacaatgttggtcttagtaaatgtgaaataaaagtagccatgtcgaaggagcagtatcagcagcagsagcagtggggatctagaggagggtttgcaggaagagctcgcggaaraggcggtggccccagtcaaaactggraccagggatatagtaactattggaaccaaggctatggcagctatggatataacagccaagggtacggtggttatggaggatatgactacactggttacaacagctactatggatatggtgactatagcaatcagcagagtggttatgggaaagtatccagacgaggtggtcatcaaaatagctacaaaccatactaaattattccatttgcaacttatccccaacaggtggtgaagcagtattttccaatttgaagattcatttgaaggtggctcctgccacctgctaatagcagttcaaactaaattttttctatcaagttcccg

SEQ ID NO: 2805 - DNA, 3460 bp, Rattus norvegicus
ccagacaggtagtagttaaccctgaaagtcaggacagtaagtggcccgcccgctgagccgccgctgagcgcatgggcctcgccgggccgggagccaggccccgggccgcgcctccacagccgccgcgcgctggagagattgattcccttgggagctgtaagtactgaggtattagggtgcagcgctcattgttcactgatgcagagtcccaaaatgaatgtccaggagcagggtttccccttggacctcggagcaagtttcaccgaagatgccccccggcccccagtgcctggagaagagggagaactggtatccactgattcgaggcctgtcaaccacagtttctgctctgggaaaggtaccagcattaaaagtgagacctcaacagccaccccaagacgttcagatctggatctgggatatgagcctgagggcagtgcctcccccaccccaccatacttgaggtgggctgagtcactgcattccttactggatgaccaagatgggatcagcctgttcaggactttcctgaagcaggagggctgtgctgacctgctggacttctggtttgcctgcagtggcttcagaaagcttgagccttgtgactcaaatgaggaaaagaggctgaagctggcaagagccatctaccgaaagtacatcctggatagcaatggcattgtgtccagacaaaccaagccagccactaagagcttcataaaggactgcgtcatgaagcagcagatcgatcctgccatgtttgaccaggcacagacagaaatccagtccaccatggaggagaacacctacccttccttccttaagtctgacatttatttggagtacacaaggacaggctcagaaagtccaaaggtctgcagtgaccagagctcagggtccgggacagggaagggcatgtctggatacttgcccactttgaatgaagatgaagaatggaaatgtgaccaagatgcagatgaggatgatggccgmgactctgtcccccccagcaggctcacccagaagctgctattggagactgctgccccgagggccccctcaagtagacggtacaacgaaggcagagagctcaggtatggatcttggagggagcctgtcaacccctactatgtcaactctggctatgccctggccccagccaccagtgccaatgacagtgagcagcagagcctgtccagtgatgctgacactctatccctcacggacagtagcgtggatggaatccccccatacaggatccgtaagcagcaccgaagggagatgcaggagagtgtccaagtcaatgggcgggtacctctacctcacattcctcgcacttaccgaatgccaaaggagatccgggtagagccacagaaatttgctgaagagcttattcaccgtctagaggctgtccagcgtactcgagaggctgaagaaaagttggaggaacggctgaagcgtgtacgcatggaggaagaaggggaagatggggaaatgccttctggccccatggcaagtcacaagctgccttctgtcccagcttggcaccatttcccacctcgctatgtggatatgggctgctccggactgcgggatgcccatgaggagaatcctgagagcatcctggatgagcatgtgcaaagggtcatgaggacacctggctgccagtcacctggcccaggccaccgctctcctgacagcgggcatgtggccaagactgcagtgctagggggtacagcatctgggcatgggaagcatgctcctaagttagggttgaagctggattcagctggcctgcaccaccataggcacgtccaccaccacgttcaccataattcagctagacccaaggagcaaatggaggctgaagctgcccgcagggtccagagcagcttctcatggggcccagaaacacatggtcatgccaagccccgaagctattcagagagcacaggcaccaaccccagtgctggggacttggcctttggtggtaaagctagtgcaccctccaaaagaaacaccaagaaggctgaatctgggaagaatgccagtgctgaggtacccagtaccacagaggatgcagagaagaaccagaagatcatgcagtggatcattgagggggagaaggagatcagtagacaccggaaggcaggccatgggtcttctgggatgaggaagcagcaggcccatgaaagctccaggcccttgtccattgaacgtcctggggccgtgcacccctgggtcagtgctcagcttcggaactctgtccagccttctcatctcttcatccaagatcccacaatgccacccaatccagcccctaatcctctgacccagctggaagaggcccgcaggcgtttggaggaagaagaaaagagagcaaacaaactgccctccaagcagaggacaaaatcacaaagaaaggcaggtggcgggagtgcaccaccatgtgacagtatcgktgtggcctactatttctgtggtgaaccaataccctaccggaccctggtgaggggccgtgctgtcaccctgggccagttcaaggagctgctaaccaagaaggggagctacagatactactwtaagaaagtgagtgacgagtttgactgtggtgtggtatttgaggaartacgggaagatgaggccatcctgcctgtctttgaagaaaagatcatcggcaaggtggaaaaggtggactgagccctgggcagcacacccagagctaccatcactactgtgcagtggcatccgccaggtgggcagccttgtcctcaggagcttggtgtagggaacaacacaagattgtcacgagctcttccaggggatgaggctgggggcctcagatgtctgctaatttctatccctctsrckmkgggaaagtgggggtgggagggtcatcctactgagtggttccatgggtttctctgttttgctgttcaaagggaaagcsgcacstacccccacastacccctgaagcaataccaggagccatstcatgaccctcagcagctcttgyttctaaatacagtctgacstagggatrsywygmsstgggcttgtatcmtagtgtcctcttctctctctgkgacstatccastgcacstcattgggytcaggtccaggagcaggggatcctgtgggggcctctstatattgtacatgtcastgagtgcsttcaacatagctgtstcttgcctgccactgtgtgaatctggcggctgaatatctcaggcctctttgcctgtctccagccaccagcttggttcagcagaggggggggktctggtccctyccaagtgtccatgtaaatatgtacatttctcaggccaggsccagcaggggataccctgagcccgtttttcatgcgatgacttgttacaattattcttttcaaaggtacttggataataatgaaataaaatgtttttgamcctcmmwwrraaaaaaaaaaaaaaaaaaaaa

SEQ ID NO: 2806 - DNA, 4061 bp, Rattus norvegicus
gaattcagacttcagagacaccccagataggtcccactctaatcatagatgcttcctgcagggagactaacatactggcctgaggatgtagctccacggtagagcgcttgcctgactcgtgcaaggtccttcgacccttcaagggcacacatatgtaagtgcatgtgtgagtgtgcacaggtacccacccccacaatcccataaataacctcgtgtctctcccctttggtcctgttagtcaatgggaggttcctcttcccctcccttccctttcccttgtgtccctggttcctagcactgccacaggccctctgcctctgttcttcgtgttcaggtgttaccctactagtctccactcttctgagaagtgtgggcactacttaggtggcgctgctaacacagtgaatcttactctcattttcacagtgaggaatggaggcacaaggaggtcctgtggcaaataagggcgaagcctgaatagtggaggcaaactattctgctccttcccagttgagcaccatgcagtctttcccagcctccagaacttgaccttttctgcccagakkkwktyyykwktwyttcgagtagcaacaggaagatttattcygacctctgatgcaaagtaaagtagcaaggccaaagttggtattattcagagtgtgggcaaggtcctggggctgtgrccacaccgtctggtctcacgccagtcacgcccatcttcaacccacgtccaagtatcttgaccccttcagggctgtctcagtgccaccatcacaccgtagtgggttttgccagtcgccctagagaaaagaggaggggcctcggacaacatccagacgatctcaagaggcagcggtttaccatctaaccctgaacccagagatcctgggctcttgctgcactctggcggcagaagccgggagcccggagcccggagcccgggggaatcgcaccttgtatgttccgctagggcaagggcaagcagagmkysacsgsaaryckrgagmsgmrgsgaggcrgcgarayrmrctggsgcaaaggccgggatgcaggagagctgaagaaaggaggacaaaggggacagcttagggcagaggacggtcgtgagcaccggcgaggatccccgcagccgctggacgcacggagccccttcgctggccggtagcttacgctcgcgccggccgccccctcctccctctcgaccgcccctcctccgtcccgcccccgcgcggagtccccagcgctgcagaggccgccgcctgcactgccactccatgagccgccgctctcccggacacgcttgcagaggggagcagggagccggccccggcccttctttccttgtgactccgcagccaccgccggagtcggttccctcacaccaacgttcccattgggaccttcacggcccggtgacctctgtcctgctctacctgcagcactgctcccctgcagcccctctgccgcgggaacttgggcaggaccgacgggactggcacacggggctggctcgggcgctgcggcgatgcccgcgggctctctcccctccacttgctcgccctgtgcctgggctcgggccccgacctgcgccgtgagatgactttccgcgacatcctgagcgtcactttcgaaggaccccggtcgagcagtagcactgggggctccggcgcgggcggcggagctggcacggttggccccgagggtggggcggtgggcggcgtgccgggcgctacaggcggcggcgctgtggtgggaaccggcagcggcgaggacaaccagagctccacgggagaaccgggagccgcggcgagcggcgaagtaaatggctcggcggccgtcggggggctagtggtgagtgctcagggcgtgggagtgggtgtcttcctggcggccttcatcctcaccgctgtggcgggcaacctgctggtcatcctttcggtggcctgcaaccgccacctacagacggtcaccaactatttcatcgtgaacctggcggtggctgacctgcttttgagtgcagctgtgttgcccttctcagccactatggaggttctaggcttctgggccttcggccgaaccttctgcgacgtgtgggccgcggtggacgtgctgtgctgcactgcctccatccttagcctctgcaccatctctgtggaccggtacgtgggtgtgcgccactcgctcaagtacccagccattatgacagagcgcaaggccgctgccattctggctctgctttgggcggtggccctggtggtatctgtgggaccgctactaggttggaaggagccagtgcccccggatgagcgtttctgcggcatcaccgaggaggtgggctatgcaatcttctcttccgtgtgctccttctacctacccatggcagtgatcgtggtcatgtactgccgcgtgtacgtggtcgcacgcagcactacgcgcagcctcgaggcaggcatcaagagggagcccggcaaggcctccgaggtggttctgaggatccactgtcgcggcgcagcgaccagcgccaaaggatatcccggaacacagagtagcaagggccacaccttgcgcagctcgctttccgtgaggctgctcaagttttcccgcgagaaaaaggctgccaagacgttggccatcgtcgtgggtgtcttcgtcctgtgctggttccccttcttcttcgtcctgcctctgggctctctgttcccgcagctgaaaccgtcagagggtgtcttcaaggtcatcttctggctgggctacttcaatagctgtgtgaacccgctcatctacccctgctccagtcgcgagttcaagcgcgccttcctccgcctcctgcgctgccagtgtcgccgccgccgccgccgcctctgggcagtctacggccaccactggcgagcctcgaccggcgacgcgcgttccgactgcgcccccagccctcgcatcgctccccccggggcccctctagccctcactgcacacccgggtgcgggctcggcagacacgccggagacgcaggattcggtctccagcagtcgaaagccagcctccgccctccgggagtggagactgctcgggccgctacagagacccacgacccagctgcgtgcgaaggtgtccagcctgtcccataagattcgctctggggcccggcgcgcggagactgcgtgtgccctgcgctccgaggtagaagcagtgtccctaaatgttccccaagatggggcagaagctgtcatctgccaggcttatgagccgggcgactacagcaacctccgagagactgacatttaaggaccgaaactcaggctggggaaggtgctggggaaagtgcgggggccaggggtggggtgctttatgggatactgcttcggatccaagactgcccagggtggctgctccatctcacccagagcaacmsgagstggacctgggggtcggagcacttcgaargtgatgggttatggtgccgcctgctggacatakttgtccagagctcttcctgaaagggaaaggctacaggattcgcccttctcatccagtctaagaaactacttagtcaactcctagtgtctaagcagaargcttcagstatggcttctccccttgggaggaagaggaagaggtacaaattcttgttttgctgctcccagggaaaagatccgtggacagtttctactccttactgccacctggaggaagtcaatggacctaccatakgacctgccatccggcaagttttggtggcgtattggatgcccgccgaacaaatctgttgctcttccgcyctgggcccactgccctcttccccacactcctaactgtatgttcccctcaccataccccccgccccgggccttactgtttacactgtgtacatagttcattgtgcctgtctgtgcccatcacttctcactgggattccaggctgcmaaaggggagagccttatttatcattttgaaacctatttattggtaagagtacttatattttgttcagactgtgmaaamwrwmmawmwwwrrmwwrwaawgcawmwarrrmmdmmwwmwtcyswwawmvwdarrmmaaaaa

SEQ ID NO: 2807 - DNA, 1780 bp, Rattus norvegicus
tgtgctgggtgtgccccagagctggctttgactgtacgctgtcaggctctccctggacctcacggaacagcattgccagccacacggcttccaacaaatcacctcttttcatgctgtttggcacagatcgaatctacaggttatacaatggtcgatggagcaatgatcctttctgtgctaatgatgatggctctcccttccccgagtatggaagatgaggagcccaaggtcaacccgaagctttacatgtgtgtgtgtgagggcctctcctgcgggaacgaggaccactgtgagggccagcagtgtttttcctccctgagcgtcaatgatggcttccgcgtctaccagaagggctgctttcaggtctatgagcaggggaagatgacgtgtaagaccccgccgtcgcctggccaggctgtggagtgctgccaaggggactggtgcaacaggaacgtcacggcccggctgcccactaaagggaaatccttccctggatcgcagaacttccacctggaagttggccttatcatcctctccgtggtgtttgcggtatgccttttcgcttgcatccttggcgttgctctcaggaagtttaaaaggcgcaatcaagagcgcctgaaccccagagacgtggagtacggtactatcgaagggctcatcaccaccaacgtcggagatagcactctagcggaattactagatcactcatgtacatcaggaagtggctccggtcttccttttctggtacagagaactgtggctcgacagataaccctgttggagtgtgtcgggaagggccggtatggagaagtgtggaggggcagctggcaaggcgaaaatgttgctgtgaagatcttctcctcccgtgatgagaagtcgtggttcagggagacagaattgtacaacacggtkatgctgaggcatgagartatyttaggtttcattgcttcagacatgacctstrgacactccagtacccagctgtgrctcattacacaytrccacgaaatgggatcgttgtatgactacsttcagctcaccactctggacacggttagctgccttcggatcgtgttgtccatagccagcggccttgcacacttgcacatagagatatttgggacccaggggaagtctgccrtcgcccaccgagatctaaagagcaaaaayatcytcgtgaagaagaacgkacagtgctgcatagcagatttgggymwrsmarwmawrmawwmccagagcacgaatcagcttgatgtgggaaacaacccccgtgtggggaccaagcgctacatggcccctgaagtgcttgatgaaaccatccaagtggattgctttgattcttataagagggtcgatatttgggcctttggcctcgttctgtgggaagtggccaggaggatggtgagcaatggtatagtggaagattacaagccaccattctatgatgttgttcccaatgacccaagttttgaagatatgaggaaagttgtctgtgtggatcaacagaggccaaacatacctaacagatggttctcagacccgacattaacttctctggcgaagctgatgaaagaatgctggtaccagaacccatccgccagactcacagctctacgtatcaaaaagactttgaccaaaattgataactccctagacaaattaaaaactgactgttgacattgtcaccggtgtcaagaaggagagtcaatgctgtcattgtccagctgggacctaatgctggcctgactggttgtcagaacagaatccatctgtccccctc

SEQ ID NO: 2808 - DNA, 2222 bp, Rattus norvegicus
gcggccgcgtcgacgtgccatcaccagtgagtgcgggaatccgccgtttgggctgagacgatggcagctgcgccagcagccctagcgctggatccccagccccaagaggagcaaaaggatgcatccgaatcaagtgagctcagtaggcttcgtgccgaactggccggtgcactggcagaaatggaaaccatgaaggctgtagctgaggtgagcgagagcaccaaggcagaggcggtggctgcagtgcagagacagtgccaagaggaggtggcttccctgcaggccatcctgaaagactccatcagcagctacgagacccagatcgcagccctgaaacaggagcggcagcagcagcaacaggactctgaggagaaggagcgagagctgggccacctcaaacagctgctggcccgggcccaccctttggactccttggagaagcaaatggaaaaggctcacgaagactcagaaaagcttcgggagatcgtgttgcccatggagcaggagattgcagagctgaaggtgaagctgctgagggcggaagagctgatccaagagatccagagacgaccaaggcagcctgcctccctgcatggctccacagagttgcttccactatcaaggaacccctcaccaccactggaaccctcggaggaaccaagtggagacgcaggcccagctgctgaggccttcgcccacaactgtgatgacagtgcctccatctcttccttctccctcggtggggccgccggtagtgtctccctacgaggtccccaaggcctcagccccgagcaggaagagacagcttctctggtgtctactggcactctggtccccgagggcatctacctaccccctccggggtaccagcttgttccagacagccagtgggagcaactgcaggtagaggggcggcagctgcagaaggagctggaaagtgtccgccgtgagcgggatgaactgcaggaaggactgagccggagcaatgaggactgtgccaagcagatgcaggtgctcctggcccaggtccagaactcagagcagctgctccgaactctgcagggaaccgtgagccaggcccaggagcgggtgcagcggcagatggcagaactggccacttctcacaagtgcctgagccaagaggttaaaagactgaatgaagaaaatcgaggactccgggctgagcagctgccatcctccgccctccagggctcagagcagcaggaggaccaggacgaggccctgccaagctccatacaggagctacaccagctggtgcggcacacccggcagcaggctcgggccaggcagcaggcacaggagcatgaggctgagcgcctgcgcattgaaattgtgaagctgcgggaggcactagacgaggagacagcagccaaggccagtctggagggacagctgagggtgcagcgagaagagacagatgtgctggaggcctccctgtgcagcctgagaatagagacagagcgggtccaacaagagcatcacaaggcccagctcacagatctcctctccgaacagagagccaaggcactacggctgcaggctgagctggagaccagtgaacaggtgcagagggacttcgtacggctatcccaggccctacaggtgcgcctggagcagatccgccaagcagacactctggagcaagtacgtagcattctggacgaggcacccctcagggacattaaggacattaaggacwsgkgaggggmcaggmsasmggycwscmksctskbbhmsctgccmywttcyctascagaactgtgaggtgtkgactgcaggtctcagaatggagtccgtcagctgcaaacctggacagtggtgtcccgggccactacttccacccagggtggctggccctgccctcagggatgatacctggaagagggtcctagcctcctcccagaaccaaagctttcaggctgccatgctccctcatggatccagttctcccaccccgtcacctcgggccagcagccagtcccactctctgcgtacccagcttatggctagaagctgttggattcagtggctcctcacatagaggccctgggacacacagctgctttctggactgtatgacactaaggtttttgtccataggtacccgaaataggccccaagacataaggaagcaaggccagacttttctgtcatttattttcaataaataagcagtcagctaaaaaaaaaaaaaaaaaaaa

SEQ ID NO: 2809 - DNA, 15457 bp, Rattus norvegicus
aggagccagcgggtagtgctgaacaagactcctgttccggagcggagtaacctgcctgtgcccgctgcgacgcgcgcccacctcccggggaaggaacggcgaggcccggggccgtctccgcgatggagcgcggggccgcagcggcggcgtggatgctgttgctggcgatcgctgcctgcctggagccagtcagtagccaagaatgcggcagtgggaattttcgctgtgacaatggatactgtatccctgcgtcctggaggtgtgatgggaccagagactgtttggatgacacagatgaaattggctgtcctcccaggtcctgcgaatcaggccttttcctgtgtcctgctgaggggacctgcatccctagctcctgggtgtgtgacgaggataaggattgttcggacggtgcagacgaacagcaaaattgtgctgggaccacgtgctcggctcagcagatgacgtgctccaacggtcagtgtattccgagcgaatacaggtgcgaccatgtcagcgactgccccgacggctctgacgagagaaactgccattatccaacatgtgatcaacttacttgtgccaatggagcctgctataacacgagtcagaggtgtgaccaaaaagttgactgcagggattcctcggacgaagctaactgcactaccctgtgttcgcaaaaagaatttgaatgtggcagtggagagtgtatccttcgcgcctacgtctgtgaccatgacaatgactgcgaagataacagcgatgagcgcaattgcaactatgacacctgcggaggtcaccagttcacttgctccaatggccagtgcatcaaccagaactgggtttgtgatggagatgacgactgccaagattctggtgatgaagatggatgtgaaagtaaccagagtcatcataggtgttacccaagagaatgggcgtgtcctgggtctggacgatgcatctcaattgataaagtttgcgatggagttcctgactgtccagaaggagacgatgagaacaacgtcacaagcggaagaacctgtggtatgggtgtctgctctgtcttaaactgtgagtaccagtgccatcagacgccatttggaggagaatgcttctgccccccaggtcatattatcaacagcaatgacagccgtacttgcattgatttcgacgactgccagatatggggaatttgtgaccagaagtgtgaaaaccgacagggccgtcatcagtgcctctgtgaagaagggtatatcctggagcgagggcagcattgcaaatccagtgactccttcagtgcagcctctgttatcttctccaatggtcgggatttgctagttggagatcttcatggaagaaacttccggattctagcagagtctaagaaccgaggaatggttatgggagtggattttcactatcagaaacacagagttttttggacagaccccatgcaggaaaaggtgttttccactgacatcaatggcttaaatacccaagaaattcttaatgtttctgttgacactccagagaatctggctgtggattggattaataataaactttatctggtagagacaaaggtcaaccgcattgacgtggtcaacttggagggaaatcagcgtgttactctcataactgaaaacttagggcatcctagaggaattgcccttgatccaactgtgggctatttgtttttctcagattggggaagcctctctgggcaacccaaggtggagagagccttcatggatggtagcaatcggaaagacctggtaacaaccaaagtggggtggcctgctgggatcactctggatctggtgtccaagcgagtttactgggtggattctcgttatgactacattgaaactgtaacatatgacggaattcaaaggaagacggtagctcgtggaggctcccttgttccgcatccctttggaataagcttatttgaggaacacgtgttctttactgattggacaaagatggctgtgatgaaagccagcaagttcacagaaaccaaccctcaagtgtaccaccagtcttccctgaggcctcacggagtgacggtttaccatgccctcaggcaacccaatgccaccaatccgtgcgggagcaacaatgggggctgtgcgcaggtctgtgtcctcagtcacaggacggataatggtggcctgggctaccggtgcaagtgtgaattcggctttgaactggatgatgatgagcaccgctgtgttgccgttaagaacttcctgctcttctcatcgaaaacggctgtgcgtggaatcccattcaccctctccacccaggaagatgtcatggttcctgtcacagggagtccatccttcttcgttggaattgattttgatgcccaacacagtactgtcttctattcagatttgtcaaaagacataatttataaacaaaaaattgatggcacaggaaaagaggttatcacagcaaaccggttggaaagtgttgagtgtttgacttttgactggatctcaaggaatctttactggacagatggaggactaaagagtgtcactgtcctgaggctggctgataagtcccgacgacagataatcagcaacttaaacaaccctcgttccattgtggtgcatccgaccgctgggtatatgttcctgagtgattggttccgtcctgcaaaaattatgagagcatggagcgatggttctcacctaatgcccatagtcaatactagtctggggtggcccaatggcttggccatcgattggagtgcttcacgattgtactgggtagatgccttttttgataagattgaacacagcacccttgatggtttagatagaaaaaggctgggccatgtagaccagatgactcatccatttggactcaccgtttttaaagataatgtgttcataacagactggagactgggtgctattattcgagtgaggaaatcagatggtggtgatatgacagttattcgaagaggcatcagcagcgtaatgcacgtgaaagcctacgatgctgacctccagactgggtctaactactgcagtcagaccacccacgccaacggtgactgcagccacttctgcttcccggtcccgaacttccagcgggtgtgcggctgtccctatggaatgaagcttcagagggatcaaatgacttgtgagggagacccagcccgagagccacccacacagcagtgtggctccctctcctttccctgcaacaatggcaagtgtgtgcccagtttcttccgctgtgatggagtggacgattgccatgacaacagtgatgagcatcagtgcggggtgtttaataatacttgctcaccttcggctttcgcctgcgtccgcggtggacagtgcatccctggccagtggcactgtgacagacagaatgactgtttagacggcagtgatgagcaaaactgccccacacatgccacgtcgtccacttgcccgtccacctccttcacctgcgacaatcacgtgtgcatcccaaaagactgggtctgtgacacagacaatgattgctcggatggctcggatgaaaagaactgccaagcttcagggacctgccagcctacacagtttcggtgccctgaccaccgatgcatcagcccgctgtatgtctgtgatggggacaaggactgcgcggatgggtctgatgaggcgggctgtgtgttaaactgtacgagtgcccagttcaaatgtgccgatgggagttcttgcattaacagcaggtaccgctgcgatggggtttacgactgcagggacaactctgacgaggcaggctgccccaccaggcctcccggcatgtgccacccggatgagttccagtgccaaggagacggtacatgcatccctaacacctgggagtgtgacgggcatccagactgtatccacgggtccgacgagcacactggctgtgttcctaagacctgctcgccgactcatttcctctgtgacaatggaaactgcatctacaaagcgtggatctgtgatggggacaatgattgtagggatatgagtgatgagaaggactgtcctacccagccttttcactgtcctagcacgcagtggcagtgcccgggctacagcacctgtatcaatctgagtgccctgtgtgacggcgtctttgactgtccgaatgggactgacgagtccccactttgcaatcaagacagctgctcccattttaatggtggctgtactcatcagtgcatgcaagggcccttcggagccacatgcctatgcccattaggataccaacttgccaatgataccaagacctgtgaagatatcaatgagtgcgatattccaggcttctgcagccagcactgcgtcaacatgagaggttccttccggtgcgcttgtgatccagaatatacgctggaaagtgatgggcggacttgcaaagtcacaggatctgaaaatccgttgttagttgtagcaagtcgtgacaaaatcattgtggacaacatcactgcccacacgcacaatctctactcgttggtccaggatgtttcttttgtggttgctcttgattttgattcagtcactggtcgtgtcttctggagtgacttactgcagggtaaaacctggagtgtctttcaaaacggaacagacaagagagtggtccatgacagtggcctctctgtgacagaaatgattgcagtagattggattggtcgcaacctttactggacggactatgctcttgaaacaatcgaagtttctaaaattgatggaagtcacagaacagtactgatcagcaaaaatgtcacaaaaccgaggggactcgcgttagatcccagaatgggtgacaatgtaatgttttggtctgactggggccatcaccctcgcattgagcgagccagcatggatggcaccatgcgcacagtcattgtccaggaaaagatctactggccctgtggcttaagcatcgactaccccaaccgcctcatctacttcatggatgcctatcttgactacattgaattctgtgattacgacggacataaccgaaggcaggtcattgctagcgatttggttctccaccatccgcacgccctcactctgttcgaagactttgtgtactggactgaccgtggtactcggcaggttatgcaggccaacaagtggcatggggggaaccagtcagttgtaatgtacagcgttcaccaaccgcttggaataactgccattcatccttcaaggcaaccaccttcccggaatccatgtgcctctgcctcttgcagccatctttgcctgctttctgcacaggcgcctagacattattcttgtgcttgcccttcaggatggaacctctccgatgattctgtcaactgtgtgagaggtgaccaacctttcttgatgtccgtaagagacaatataatttttggaatctcccttgatcctgaggtgaagagcaatgatgccatggtccccatatcagggatacagcatggttatgatgttgaatttgatgactctgagcaattcatctactgggttgagaatccgggtgaaattcacagagtgaagactgatggcagcaacaggacagtgtttgctcctctgtccctgctggggtcttctttaggcctggccttggactgggtatcaaggaacatttattataccactcctgcaagtcggtccattgaggtgttgacgctcaagggagatacgaggtatggaaaaaccctgattgccaatgacggcacccccctcggagttggtttccccgttggcatagctgttgatcctgcacgtgggaaactatattggtcagaccacgggacggacagtggggttcctgccaagatcgcaagtgctaatatggatggaacatctttaaaaattctcttcactgggaacctgcagcatctggaggttgtcaccctggacattcaggagcagaagctgtactgggcagtcaccagcagaggcgtgattgagagaggaaatgtggacggtacagagaggatgatcctggtgcaccatctggcccacccatggggccttgtggtctatggctccttcctttactactctgatgaacagtatgaggtcattgagagagttgacaagtcctctgggaataacaaagtcgtcctcagagataacgttccgtacctgaggggtcttcgggtttaccaccgccgcaatgccgctgactcttccaatggctgtagcaacaaccccaacgcttgccagcagatctgcctgcccgtgccaggtggaatgttctcctgcgcctgtgccagtggctttaagctcagccctgacggtcgctcctgttctccatataactcgttcatggtcgtttccatgctgcccgcagttagaggctttagcttggagttgtctgatcactcggaggccatggtgcccgtagctggccaaggacgaaatgttctgcatgcggacgtggatgttgccaacggctttatttactggtgtgattttagcagctctgtaagatcctctaatggaattcgtagaatcaaacccgacgggtctaattttaccaacgtcgttacctatggcattggggcaaatggaatccggggtgttgcactggactgggcagcaggaaatctttattttaccaatgcctttgtgtacgaaaccctgatagaagtgttacggatcaataccacgtaccgccgtgtactcctcaaagtctcagtggatatgccccggcatattattgttgaccccaagcatagatatctcttctgggccgactatgggcagaagccaaagatcgaacgctcttttcttgactgtaccaatcgaactgtccttgtttccgaaggcattgtcacccctcggggcttggccatggaccatgacactggctatatttattgggttgatgactccttagatttaattgccaggatccatcttgatggaggagaatctcaggtggttcgctatggcagccgttacccaactccctatggcatcactgtgtttggagagtctatcatttgggtggatagaaacttgaaaaaagtcttccaagccagcaagcaaccagggaatacagatccacccgtagtgataagagataagatcaacctgctccgtgacgtgaccatctttgacgagcacgcccagcccctctcaccagcagagcttaacaataacccttgtctgcaaagcaatggtgggtgttcccacttttgctttgccttacctgagttgcctactcccagatgtggatgtgcttttgggactctgggaaatgatggcaagagctgtgctacctcccaagaagatttcctcatctattccttaaataattccctgagaagtttacactttgaccctagagaccatagcctacctttccaagtgataagtgtggcgggaactgccattgcactggattatgaccgtagaaacaatagaatcttcttcacacaaaagctaaactctctccgtggccagatttcctatgtcagcctgtattcagggagcagctctccaactgtcctgctgtcaaatataggggtgactgatggcattgcctttgattggataaatagaagaatttattacagtgacttttcaaatcagacaataaattccatggctgaagatggatccaatcgtgctgtgattgcccgtgtttccaaacccagagctattgtattagatccttgccgagggtacatgtattggactgactggggtaccaacgccaaaatcgagagagccacactgggaggaaacttccgggtccccattgtgaacaccagcttggtttggcccaatggactcgctttggaccttgagactgaccttctgtactgggcagatgctagcttgcagaaaatagaacgcagtactctcacgggcacgaaccgagaagtcgttgtcagcactgcctttcattcctttggcttgactgtctatggccagtacatttactggacagacttgtacaccagaaaaatctaccgggctaacaagtacgacgggtcagacctggtagcaatgaccacacgtttgcccacccagcctagtggtatttccacagtggtcaaaacccagcggcagcagtgtagcaatccttgtgaccagttcaacggaggatgcagccatatctgtgctccaggtccaaatggagctgagtgtcagtgtcctcacgaaggcaactggtatctggccaacgataacaagtactgcgttgtggacacggggacccgctgtaatcaactccagttcacctgcctcaatgggcattgtattaatcaggattggaaatgtgacaatgacaacgactgtggtgatggcagtgatgagcttcctacagtctgtgcctttcacacctgccgatcaacagccttcacttgtggcaacgggcgatgtgtgccataccactatcgctgtgattactacaatgactgcggggacaacagcgacgaggcaggttgcctgttcagaaactgcaacagcaccacagagttcacgtgcagcaatgggcggtgcataccgctcagttatgtctgcaatggcataaacaattgccatgacaatgacacctcggatgagaaaaactgccctccccacacttgcccgccggatttcacaaaatgccagaccacgaatatttgtgttccccgagctttcttgtgtgatggagacaatgactgtggagacgggagtgacgagaaccccatttactgcgcctcacacacatgccgcagcaacgagttccagtgcctctcccctcagcggtgtattccaagctattggttctgtgacggtgaagccgactgtgcagatggctcggatgaacctgacacttgtgggcattctgtgaacacctgcagggccagtcagttccagtgtgataatggcaggtgcatctcaggcaattgggtctgtgatggtgataacgactgtggggacatgagtgacgaggaccagcggcatcactgtgagcttcagaactgttccagcactcagtttacctgtgtcaacagcagacctcccaacaggaggtgcatcccacagtactgggtctgtgacggtgatgcggactgctcggacgccctggacgagctgcagaattgcaccatgagaacctgctctgcaggggagttcagctgtgcaaatggacgatgtgtcaggcagtcattcaggtgtgatcggcgcaatgactgtggagactacagtgatgagaggggctgctcgtacccaccctgccatgcaaatcaatttacgtgtcagaacgggcggtgtatccctaggttctttgtttgtgatgaggacaatgactgtggagatggttctgatgagcaggagcacctgtgtcacaccccagaacccacatgcccccttcatcaattccggtgtgacaacgggcactgcatcgagatggggcgagtctgtaaccatgtggacgactgctcagacaacagcgatgagaaaggctgtggcattaacgagtgcctagattcttcaatcagtcgctgtgaccacaactgtacagataccataactagtttctactgttcctgtctccctggctacaagctcatgtctgacaaacgctcttgcgtggatattgacgaatgcaaggagtcaccccagctctgtagccagaagtgtgagaatgtggtaggctcctatatttgcaagtgtgcccctggctacatccgtgagccagatgggaagagctgccggcagaatagtaacatcgagccctatctcatctttagcaaccgttactatataagaaacttaactacagatggctcatcttactccctgattttgcaaggattgggcaatgttgtggccctggactttgatagagtagaaaagaggctgtattggattgatgcagagaagcaaatcattgagaggatgtttttgaataagacaaaccgggagaccatcataaaccacaggttaagacgtgctgaaagtctggctgtagactgggtcagcagaaaactctattggttggatgccatcttggactgcctgtttgtctctgaccttgaaggtcgacaccgcaaaatgatagcccagcactgtgtggatgctaacaataccttctgctttgaacatcccaggggaattgtccttcatcctcaaagagggcatgtctactgggcagattggggtgttcacgcatacattggaaggattggcatggatggaaccaataagtctgtgatcatctctaccaagatagaatggcccaatgccatcaccattgactacaccaacgatctcttgtactgggcagatgctcacctgggttatatcgagttctctgatttggaaggtcaccaccgacacacggtgtacgatggatcactgcctcacccctttgctcttacgatttttgaagacactgttttttggacagattggaatacacggacggttgaaaagggaaacaaatatgatgggtcaggtcgagtggtgctggtgaacacaacgcacaaacccttcgacatccacgtgtaccatccataccggcagccgattatgagcaatccctgtggtaccaacaacggtggctgttctcatctgtgcctcatcaaagcgggggggagaggattcacctgcgcgtgtcccgatgacttccagaccgttcagcttcgagacagaacactctgcatgcccatgtgctccagcacgcagttcctgtgtggcaacaatgaaaagtgtatccccatatggtggaaatgtgatggccagaaagactgctctgatggttctgatgaaccagacctgtgcccacaccgcttctgccgtctggggcagttccagtgccgggatggcaactgcacgagcccccaggctctgtgcaatgctcgccaggattgtgctgatggctctgatgaagaccgtgttctctgtgagcatcaccggtgtgagtccaacgagtggcagtgcgccaacaagcgttgcatcccacagtcctggcagtgtgactcagtgaacgactgcctggataactcagatgaggacacttcgcactgcgccagcaggacctgcaggcccggccagttcaagtgtaacaatggtcgctgtatcccgcagagctggaagtgtgacgtagacaatgattgtggagactactccgatgagcccatcgacgagtgcacgaccgctgcttacaactgtgacaaccacacagaattcagctgcaagactaactaccgttgcatcccgcagtgggcggtgtgcaatggttttgatgactgcagggacaacagtgatgaacaaggctgtgaatcggtgccatgccatccttctggggatttccggtgtgcgaatcaccactgcatccctctccgctggaagtgtgacggcactgacgactgtggagataactcggatgaggaaaactgcgttcctcgggagtgctcagagagcgagtttcgatgtgctgatcagcaatgcatcccctctcgatgggtctgtgaccaagaaaatgactgtggagacaactcggatgaacgggactgtgagatgaagacctgccatcctgaacattttcagtgtacgagtggacactgtgtgcccaaggcgttggcatgcgatgggagggcagactgtctggatgcgtctgatgaatctgcttgtcctactcgctttcccaacggcacctactgcccagccgccatgttcgaatgtaaaaaccacgtgtgcatccagtcgttttggatatgtgatggggaaaatgactgtgtcgacggttccgatgaggagatccacctgtgcttcaacattccgtgtgaatcaccacagcgattccggtgtgacaacagccgctgtgtttatggccatcagctgtgcaatggtgtggatgactgcggagatggaagtgacgagaaagaagagcactgtagaaaaccaacccacaaaccgtgcacagacactgaatataagtgtagcaatgggaactgcatttcgcagcactacgtgtgtgataatgtgaatgactgcggagacctttctgatgaaactggttgcaatctaggagataacagaacgtgtgctgaaaacatatgtgaacagaactgtacccagctgagcagcggaggctttatctgctcctgcagacccgggttcaaacctagtacttcggacaaaaattcctgtcaagacatcaatgaatgtgaggagtttggcatctgcccccagagctgtcgaaacagcaaaggaagttatgaatgtttctgtgtcgatggcttcaagtctatgagtacccattatggagaacggtgtgcagctgatggaagccctcctctcttgctcctgcctgagaatgtccgaatccggaagtacaatacctcctctgagaagttctcagagtatctggaagaggaggagcatatccaaactattgactatgactgggatcccgagcacataggcctcagtgttgtctattacactgtgctggcacagggctctcaattcggtgctatcaaacgtgcctacattcccaactttgaatctggtagtaacaatcccatacgtgaagttgacctgggcttgaaatatttaatgcagccagatggattagccgtggactgggtcggaaggcatatttactggtcagatgctaagagccaacggattgaggtggctaccctcgatggaaggtaccggaagtggctgatcaccacccaactggatcagccagctgccattgctgtgaatcctaagctagggcttatgttctggactgaccagggaaaacagcccaaaatcgagtctgcctggatgaacggggaacatcgcagcgttctggtttctgagaaccttggctggccaaacggtctttccatagattacctgaatgatgaccgggtctactggagcgactccaaagaagatgtcattgaagccataaaatatgatgggactgacaggagacttatcataaatgaagcgatgaagcccttcagtctggacatcttcgaagacaagctatactgggtagctaaggaaaagggagaagtgtggagacaaaataaattcgggaaagagaacaaagagaaagtgctggtggtgaacccgtggctcactcaagttcgaatcttccatcaactgagatacaatcagtcagtgtccaacccttgcaagcaggtctgtagtcacctctgcctgctgagaccaggaggctacagctgtgcctgtccccaaggctccgacttcgtaactggcagcactgtccagtgtgatgcagccagtgaacttcccgtcaccatgcctcccccatgcaggtgcatgcacggaggaaattgctattttgatgagaatgaactccccaaatgcaagtgttccagtggctatagcggagaatactgtgaggttgggctctcgagaggcatccctccagggacgacaatggctgttctgttgaccttcgtgatagtcatcattgttggagctctggtgcttgttggactctttcactacaggaaaactggctccctcttacccactctgcccaagctgccaagcctaagcagccttgccaaaccctctgaaaatggaaatggggtgacgttcaggtcgggggctgatgtgaacatggacatcggtgtgtctcctttcggccctgagacmaykakkgacagatccatggcgatgaatgaacactttgtcatggaggtgggcaagcagcctgtgatatttgaaaacccaatgtatgcagccaaggacaacacttccaaagtggccctggcagttcaggggccatcaacaggcgcacaggtgactgtaccagaaaatgtggaaaaccagaattatggaaggcccatagatccttctgmgryagwkscagagccaaagccagcctcccctggagctgatgaaattcmksgyrmmraatggaacatcttcaaacgaaaacccaaacagacaacgaactttgagaacccaatctacgcagagatggacagtgaggtaaaggatgctgtgsmtgtggccccccctcsgtctccttctctccctgccaaagcttcaaaaagaaatttgactccaggctacactgccacagaagacacctttaaagacactgcraatctcgttaaagaagattccgacgtatagcctcgccagctctctagggaacatttagacactcacttttgcacatatattttttacagacaaatgaaaaagaagttaacattcaatactttataaaaaaaatatatttttctctgtttgcctataawwraarrwrwrwmgtgtgtcttttttactgatgccacttcatatttttacaattatcacgggcactgtgtatatcttggactgatgttgtctggaggtgatgctgtgaacattactggacttgtgtaaactttggaaggattatcacacctctgcccctgctaacacgaaggtgcccgttgagtgggtcgctgagctgaasaatacacgatctggtgaggaaaggaattggcctagggctttggatctgtctagagaggagataacactcatatttcctttgaaacaatacaggaattctttatgctcatttgagggcccatttttacacattggcacttaattaatagtcaacgttcaacatcacgtgtcaacctgattagtgagtgtgcagataggggccagtgttggcttcatgcgctgtagatggctcagacaacacagacggtacacagggtgactcagctggacccttctgcgctcctccgccttctgaggccagctatgttttgattgtgcttcgtccctagttgccaagtcaacatttgcacytgccgtgtcacgtcccatactgagtttctgtctcatggaacgagctcttgcttgacagaccttaaatcaacttaagcccttgcctgtcatctcaggtgtcccctaccttcgtgactggaatyccgtagttgactgtatgtactaaagccrgacccgtgtctccacagagcagggcgccgaacagacaccagtcgatcgaagcctcagctgggtgtctgactctgggtgcmcaatgttattgtactgactatttatttcctcagtkgacsacgaatagaaagggaaaacattcttcmtgagcctttctcaggcctttgcctaaatccgtgcatttgtgtccgracgtacwgtacgtyccagctcttmttttgagtggktggtgtatcctctgtcacaggaagtatggcacgagcatgmgttttccacagcgagtagcattcstggttmtstgtgttcaccwtgcacatgtgttaatgaatgaatggsagsgtgggagaatgratgaatgaaatatahdastgattattttattytcgagtcctcsaaatatttygttgctygtattttgagtacccattgtaattactttgattagaaattaaaaagytactggraacgcygctgctggaaatttctaataaatgtgtattttatcrwaaaaaaaaaaaaaaaaa

SEQ ID NO: 2810 - DNA, 1736 bp, Rattus norvegicus
cttctgcagacttgtggctgctgggcggtgctctctcagctgcccaaatgtcaaacagttgttggttttcagcttgggagatgcaattagccaatgtcggttcccagcgtcttggcgagtgtgctggggtgcatgtgccgcctcggggagtcctggtccgtgtttccctcagtgacaaacagcatttcggttgtggggtttcatccgtgcagactttagcttttgtttctaattcctgaagctcgtggcattttgacactgatatctgagcccagggttgtctgtcggtctctgtgtgttttgcatgatcttggattggcaccctactgtacccaaacattaaaaagcctgtctttccgttgaagaggacaggggttaaaatgaacgaagacccgaaggtcaatttaagcgggctgcctcgggactgtatagaagctggtactccggagaacatctcagccgctgtcccctcccagggctctgttgtggagtcagaacccgagctcgttgtcaacccctgggacattgtcttgtgcagctcaggaaccctcatctgctgtgaaaatgccgtcgtggtccttatcatcttccacagccccagcctgcgagcacccatgttcctgctgataggcagcctggctcttgcagacctgctggctggtctgggactcatcatcaattttgtttttgcctacctgcttcagtcagaagccaccaagctggtcacaattggactcattgtcgcctctttctctgcctctgtctgcagtttgctggctatcactgtggaccgctacctctcgctgtattacgccctgacgtaccactccgagaggaccgtcacctttacctatgtcatgctagtgatgctctggggaacttccacctgcctggggctgctgcctgtcatgggctggaactgcctgagggacgagtccacctgcagcgtggtcagacccctcactaagaacaacgccgccattctctccatctccttcctcttcatgttcgcactgatgctccaactctacatccagatttgtaagattgtgatgaggcacgcccatcagatagccctgcagcaccacttcctggctacgtcgcactacgtgactacccggaaagggatctccaccctggctctcatcctggggacctttgccgcctgctggatgccttttaccctctattccttgatcgccgattacacctacccctccatctacacctacgccaccctcctgcccgccacgtacaattccatcatcaaccctgtcatatatgctttcagaaaccaagagatccagaaagccctctgcctcatctgctgtgggtgcatccctaacacgctgtcccagagagcacgctctcccagcgatgtgtagcagcgttctccccacaggacgctggctctactaagcgccccactgcccagggcagccggtgacttcctccccttaaattctttgcactggatctcacaggcagaagcaacgayatcttttagactagtgttggcagtggaaatcatgttaccagtgttttaaaaaactcaacytctcggcttagcattctgttgtttggtttgggagttaggagttgtttgtttgtttgtttgtttggagggtgtagtggcacctcatgtggccgtaaaattatacacaagtctcaggatttttaacctagacttgaaaataaatcagttttaamggmaactggaaaaaaaaaaaaaaaaa

SEQ ID NO: 2811 - DNA, 779 bp, Rattus norvegicus
cggagtywygwgratyacgrkrgtgggtaagacctgagttcctccagctcctacctactttcagctgactagaagggcaaggatggtagatgctttctgtgccacctggaagctgacagacagccagaattttgatgartacatgaaggctctgggcgtgggctttgccactaggcaagtgggaaatgtgaccaaaccaacggtgattatcagtcaggaaggcggcaaagtggtgatccggacacaatgcacattcaagaacacagagatcagtttccagctgggagaagagtttgaggaaacrwgcatagatgacaggaactgtaagtctgtgattcggttggatggagacaagytcattcatgtgcagaagtgggatgscaaagaaacaaattgtgtcagagaaattaaggatggcaaaatggttgtkrctmwswcctwwgggkmtgtcrttkctgttcgctgttmtkwmaaggcatagaagaaatgccgggtcttktgaaaamttggtttcstgaagttccagagttabccagytastgaagcaytggtcactarttwtaagtttgtstttggtgtggaggcagaaaattataatttaagrtgtgytagyccaactcgtgggattttgatatgcaaatttactgttttcagtttttttaaataaytttacaatatttttttktkataaagatggggatstaccttataatttcstktggtgtgcaaaccaaattggamtaaraawtrtwcacwctgwwaaaaaaaaaaaaaaaaaa

SEQ ID NO: 2812 - DNA, 752 bp, Rattus norvegicus
caaaagctggagctccaccgcggtggcggccgctctagaactagtggatcccccsrgmwscasgrwwksrgcagcsakcctccagacggtgcgattgttccagagtcaataccatgagccacaakkccsaagcyttyttgcccgccaatgccgggcttcctccaagytwtgagacaatcaaagaggagtacggggtgaytgagytgggggaacccaacaastcagctgycgygaggaccvccgtgatcaacatgcccagagaggkywytgwssctgmccatgtggtytggtccctgtymaatacgctcttyttcaatgcctgctgcmtgggcttcattgcctatscmtactctgtgaagtccagggacaggaagatggtggscratgtgattggagcccaggsytamgsctccaytgccaagtgcytgwacatcagctccctgatmttcagtgtcctcatggtcattathtgcatcatcattttctytaccamcthtgyggtagtctttcagtcgctttcacaaagaacgccacattytggattytagctgccctgtgtcccacggtccacatytggccctccccctgcctgakgytgagggcttgaccctttaccctatgtgtatgcaaatgttaccttygwawatctgtccmcagtggagtcaataaagtacmcttggtggcaamwhwraaaaaaaaaaaaaaaaaaaaaaaaactcgagggggggcccggtacccaattcgccctgata

SEQ ID NO: 2813 - DNA, 2772 bp, Rattus norvegicus
ccacgcgtccgcggaggtcgaggccgtccggtcgctgagttgtcctgaagctcgggttaagagggcctgtaagagctgttggtagtcatcccaagtaggctggtggttagcagtggaattttaaagtagagacatcattaaggagtcagaagatcaacatgggagaccttgaaaagggggctgcaacccatggggccggatgctttgccaagatcaaggtgtttctgatggcattaacatgtgcatatgtatccaaatcgctatcaggaactttcatgagttccatgctcacacaaatagagagacaattcggtatccccacagctatagttggattcatcaatgggagctttgagataggaaatcttttgttgattatatttgtgagttattttggaatgaaactgcacagacctatcgtgattggtgttggatgtgcagttatgggcctgggttgcttcataatatcactacctcatttcctcatgggccgatatgaatatgaaacaacgattttacctacaagcaacttgtcctcaaacagcttcttgtgtatggagaaccaaacccagaccttaaatccagcgcaagacccagcagagtgtgtgaaagaagtgaaatcactaatgtggatatatgtactggtaggaaatattatacgtggaattggtgaaactcccatcatgcccttgggtgtttcctacatagaaaactttgccaaatctgaaaactctcctttatacattggaattttagaaacaggaaagatgattggcccaatatttgggcttttgttgggatccttctgtgcaagcatttatgtagacacagggtctgtgaatacagatgacctgaccataactcccacagatatacgctgggttggtgcttggtggatcggctttttggtctgtgcaggagtgaatatcctgattagcattccctttttcttttttcccaaaacactcccaaaggaaggattacaggaaaatgtggatggaactgaaaatgccaaagaggagagcacagagaaaaggccaaggaagaaaaaccgaggaatcactaaagatttctttccgttcctgaagagccctgtcctgcaacccgatttacatgctgttcacccttataaggtgctccaggtcaatgcatttaacatttactttagcttcctgcctaagtaccttgaaaaccaatatggaaaatccactgcagaggtcatcttcctcatgggtgtttataacttacctgcaatatgcattggatatttaattgctggcttcatgatgaagaaattcaagatcactgtcaagacagctgcattcctccgattctgcctatccttgtctgaatatagttttggtttctgtaacttcctaattacctgtgataatgtcccagttgctggtttgactaactcttatgaaagagatcagaaacctctatacttggaaaataatgttcttgctgactgcaacacaaggtgcagctgcttgacgaaaacatgggatccagtgtgtggagacaatggcctagcatacatgtcagcctgcctcgcaggctgcgagaagtctgttggaactggaaccaacatggtgtttcacaattgcagctgcattcagtcaccaggaaactcgtccgcagtcctggggctgtgtaataaaggccccgagtgcaccaacaagctgcagtaccttttaatactatcaggatttctcagtatcctctactcattcgcagccatacctggatacatggtttttctgaggtgtatcaagtctgaagagaagtcacttgggattggaatacatgcattttgcataagagtatttgctggcattccagcacctatttactttggagctttgatagacagaacctgtttacactggggaactcagaaatgtggtgcgccagggcgcaggatgtatgatataaatagcttcaggcgcatttaccttgggatgtctgcagctctaagaggatcaagctatctccctgcatttgttattgtaatacttacaaggaagttctctcttcctgggaaaatcaactcttcagaaatggaaattgcagagatgaagctcacagagaaggaaagccagtgcacagatgtgcacagaaatcctaagttcaagaatgatggagaactgaaaacgaagctgtaatgacttttctactgccttgtgtaaggccatgaacagaatgctagaattcaaaacacttcacttttgaatcatgagataaacaacaggaatgcttaactttaagaacctcaacaattagttttacactcatgataaaagtagcattttcatgaggctggtgtaggacttaagtttttcccaggatagatttctatagagacccccacattgaacattaaagcttccttcattgtatcaaggaaagtatgtatttctaagatatcttcaagtagctttaaagcctagtccttaaacactatttcattctgttgaacttatgtttcgatgtggggggatttagagagacaaatatgcattgtggctgtgctcagaaaaaaaaaaaaaaaacctattctttctatgcacaagctgtctgcatacgtttatatctagaagttattaacccttattttttattttagtcatgatgcttccgagattagacttctctctcatgtgccatctcctggttttagttccatttttctttacttatgtcacacatttgatcatttatcttacagtactgacaaacctgatcacattattaaaaaattcacattgc

SEQ ID NO: 2814 - DNA, 2783 bp, Rattus norvegicus
tgaaactagagcatggcctcatggtgttcagattataacgaatgtttgtttacctgtaagacagtcaagtgtggctctacctaggtgagtttctgcagccgacaaatgagtgaagacacatcccgaatgtgggcagcttcattctactgaccgtaccacagaacagaatagagcaagagcaagtcaggagtaagactgtttaaagagtagacatctggaaacaatcagaagaacaatatgggagaaacagagaaaagggttgcaacccatgaggtcagatgcttttccaagatcaagatgtttctgttggcattaacatgggcatatgtatccmaatcactatcaggaatttatatgaataccatgcttacacaaatagagagacaatttgatatccccayatctatagttggattcattaatgggagctttgagattggaaatyttttgttgattatattcgtgagttattttggaacaaaactgcacagacctatcatgattggtgttggatgtgtgattatgggcctggggtgtttcttaatgtcattacctcatttcctcatgggcagatacgaatatgaaacaacgatttcacctacaagcaacttgtcctcaaacagcttcttgtgtatggagaacagatcccagaccttaaagccaacgcaagacccagcagagtgtataaaagaaatgaaatcattaatgtggatatatgtactggtaggaaacattatacgtggaattggtgaaactcccatcatgcccttgggtatttcctacattgaagactttgccaaatcggaaaactctcctttatacattgggattttagaaacaggaaaggtctttggcccaatagttggacttttgttgggatccttctgtgcaagcatttatgtagacacagggtctgtgaatacagatgacctgaccataactcccactgatacccgctgggttggtgcttggtggatcggctttttgatctgtgcgggagtgaatatcctgtctagcatcccttttttcttctttcccaaaacgctcccaaaggaagggttgcaggatgatgtggatggaactaacaatgacaaggaggagaaacacagagaaaaagccaaagaggaaaaccgaggaatcactaaagatttcttgccattcatgaagagcctctcctgcaatccgatttacatgcttctcatccttacaagtgtgctccagataaatgcatttattaatatgtttaccttcttgcccaaatacctggaacagcaatatgggaaatccactgcagaggtggtccttctcataggtgtttataacttacctccaatatgcattggatatttacttattggctttattatgaagaagttcaagattactgtcaagaaagctgcatacatggcgttctgcctctccctgtttgagtaccttctgtatttcttgcactttatgataacctgcgataacttcccagttgccggcttaactgcctcttatgaaggagttcaccaccctctgtatgtggagaacaaggtccttgctgactgcaacagagggtgtagctgctcaacgaactcctgggatccagtgtgtggagacaatggcctagcatacatgtccgcctgcctcgcaggctgtaagaagtctgttggaacaggaaccaacatggtgtttcaaaattgcagctgcatccggtcatcaggaaattcatctgcagtcctggggttatgtaaaaaaggccctgagtgtgctaataaactacagtactttttaatcatgtcagtaattggcagtttcatctactcgatcacagccatacctgggtatatggttcttctgaggtgtatcaagcctgaararaagtcgcttgggattggattacatgcattttgcacaagagtattcgctggcattccggcacccatttactttggcgctttgatagacagaacctgtttacattggggaaccctgaaatgtggtgagcccggggcatgcaggatgtacaatataaataacttcaggcgcatttacctagtgttgcctgcagctcttagaggatcaagctatctccctgcactcttcattctgatacttatgaggaaattccagttccctggggaaatcgactcttcagaaactgaacttgcagagatgaagatcacagtgaagaaaagtgagtgcacagatgtgcatggaagtcctcaggtcgagaatgacggagaactgaaaacgaggctgtaatgagttttctactgccctgtgcaagatcatgaacagaatgcatacttcatgtcctttgcgtcacgagaagcactagagcaactctttgatgctctcagatgcactctggcattcaggtgyatcaagttgtgtgtcgtttcatgctgctacttggggtattttaggagtatttttctaaaatatatcagggctggatacagtgtaagatattctccaaaggccactgtctcatcctcaggaggtctctaatgttcagtgttcatattattcatgtgtcctcagagcacatggctactaactttcaaaatcaacttagggtaaaacctttaaggaggggacagttaaatatctcagtggagaggtgtgctttctaccaagcctgacaaggtgggtttgatctctgggaccaacatagtaggccagaaccaactttttccagttgatcttctccctttactcctgtactgtggtgaatatgtcstaccacaaacaaacaaataaaaaatttrgaaagtaaaaaaaaaaaaaaaaaa

SEQ ID NO: 2815 - DNA, 5545 bp, Rattus norvegicus
cgaaactgtgagagagagcggcggcacagcgggcgcacagctccggctcctgctccggctccggtaccgctcttgctctcccgggccctgcgccgaccccgccgccggccctgccgggggcctcgagcgccccctcctcgcctcacgctgaagttcctggccgtgctgctggccgcgggcatgctggcgttcctcggtgccgtcatctgcatcatcgccagcgtgcccctggcggccagccccgcgcgcgcgctgcccggcggcaccgacaacgcctcggccgcctcggccgccggtgccccgggtccgcagcgcagcctgagcgccctgcagggcgcaggcggctcggccgggccctcggtgttgcccggggagccggcggccagcgtcttcccgccgccgcccgggccgctgctcagtcgcttcctctgcacaccgctggccgccgcttgcccgtcgggggctgagcagggggacgcggctggcgagcgcgcggagctgttgctgctgcagagcaccgcggagcagctgcgccagacggcgctgcagcaggaggcgcgcatccgcgccgaccgggacaccattcgcgagctcaccggcaagctgggccgctgcgagagcggcctgccgcgcggcctccaggacgccgggccccgccgcgacactatggccgacggcgcctgggactcacccgcgctgctcgtggagctggagaacgcggtgcgcgcgctgcgagaccgcatcgagcgcatcgagcaggagctcccagcccgtgggaacctctcctcctccgcgccagcccctgctgtgcccaccgccctgcattccaagatggacgagctagaaggccagctgctggccaaggtgctggcactggagaaggaacgtgctgccctcagtcatggcagccaccagcaacgacaggaagtggagaaggagctggatgccctgcagggtcgcgtggctgagctggagcacgggtcctcggcctacagtcccccagatgccttcaaggtcagcatccccatccgcaacaactacatgtatgcccgtgtgcgcaaggcagtgccagaactctacgccttcactgcctgcatgtggctgcgctccaggtcgggtggctctggccagggcacccccttctcctactcggtgcccgggcaggccaatgagatcgtgttgctggaggccggccttgagccaatggaactgctgatcaacgataaggtggcccagctgcctctgagcctgaaagacagcaactggcaccatatctgcatcgcctggactacaagggatgggctgtggtctgcataccaggacggagaactgcggggttctggtgagaacctggcagcctggcaccccatcaaaccacatggcatccttatcctgggccaagaacaggataccttgggaggccgatttgatgccacgcaggccttcgtcggtgacattgcacagttcaacctgtgggaccacgctctgacacctgcccaggtgctgggcattgccaactgcaccgggccactcatggggaatgtcctcccctgggaagacaagctggtagaggcctttggaggtgcgaagaaggccgcctttgatgtgtgcaagagaagggctaaggcatgaggggccacctcattcagggcccctcccttgcctgtcagtttggggacttagaaggggcacttccctcctcagcctgtccacatgctggccttccctcctaccccacccctggccatacctcccacttctctcacggccccccacttcccagaatgccctgccctggatggatgtcccctcagccacctggataggggctagtatctcacaccaattggtccaatgtaggggttaggcagtccgtcctcctggcaacatattggcttggtctctcccctctcatacactgtcccgctgatcacataggatctcactaattccaaggacatcccctgaggatcgtgggtagaagtggcctttgaccctcacatcccttgtgcttcaggcctacatcaggctgtagaaaggatgccagagatgtatgagaccagatgctcttcctctgtcttaatcagttccgacaggggctgcagggtcatctcgccaactgcccctgcctcctcctccctcctctcacagtttctctgtgtgttgtggtttgaatgttggttggatgtcagttcaagccccacctcagctcccttcccagcccctaccctaacagctagggaccaagaccccggaggccaaagggctgtaatcaacccctgtacccactggtaactttgcccacagcatggttgtccatcccctccatgcctgacacaggacctgctgggtcactctagcctatcctgagagcatccaaaacagaagcacactatgactgaggagacacttccctgcagagccagttgcttagccaccatatcatctctttctgcgtggccttgggaaggatggaggatgctgggacggagaatagagcactgagtgagagagagaaccacttggttcctatgacttgctgtgtggctttcggtaaaaacctaccctctctgggcctcactttctcctagttcctaccaactttcctaagagcacagaagattgttagagcagagagaggccatccattgtaagctcttgctggtagaagatgggaaagagcagagagagcgcaattaacttgaccaggatcaaaaagcacaacatggcagttcggcctctgagtccctccaaagtgctcctccctgtgaatcacactgcctgtccttgaggcctttgagcccagctcaaacctgtgcagggaggcacttgagaggacacatgcttttcaacagggcaccagaatctctttaagggacaacccaacacattgacagcctcaggaggtgagggaaagagcccagacaggcagcggaggatgcaggcccctgttggtcctctccccaagtataggagcagtagcaggtcagctgaacagtgggtactggtgcctctgccccccgacccctgacacacttttgtccttctctgtgctctccatgccactcggcccgagacatgacgctggagagggctgcgccatgcctgggaatcgtgtcaaagacttgcctctggcctgtagatctgtgtttccattttgagagcaactacagagctcggcacctccatccccatccctcggaggtagctgcagaggcttcacccagacctgctgagatcccggttgcccagtaacaaccaatgacatcagccccagtcttgggtcaagtgtctgtcggtgaggacaccgcttgttgctgagtgacagctggattcagaacttagacctgggggactctgagcctcaccgggctcttgctattgttctagaagasrcswkkgctatttattgatttagaggaggccttgggaakacagagtcttakgaaggatgcagcagaaactgcctcgtcatttgagcccaccagacacaccatctctgtccttcctgctttgtctcagtggtgatgagaaaggacacctcagtcacattcccatgccaggtcatcctggttaaacttccacctccccacccccacccccacccaggaggaaaaaaatggagacacggactcatggctatgggtatggatgactggggaaggggcggcctctctatttccaaagtccccmccyrctgtcrcctactktgctatrkawktkrcmtgagcwcgtggwgtgscrctsagtswyctgccgctcctgagcacatccaacaagacaagccctgagctgcccctgggtctgacgaagatagaactaggccggctagatagtcttagacactgaacccgcagagtgctgtatccgcaccatctgcgttacctcacagcacagttacaagacaagactgttcttagccctgtgatgcagaagaatgagactcggggaggtaaagtaacttgcctggtgtcagttggccagctggggacagcacgatttccatttggaggcagattacatgcctaaaggacggagtcatctccttcagagttcagaaggagcagaggtggggtgtggggctcgaggctggggaaggggtctctcatctatcccagcctcagcctcagggctactgcagtcttcagggcaagagaggagtatctccagagtgaactcggaaaggcagggtgaaagtgattcttcctcagcccctgttctgggcaaggcctaggtcaggttctctaagctgttttctgccagattccccacctgtgaggcatggagtggcctctcccatgtcccaagggattatcttaacagttacacatgaccggggaccacagactaaggtgtgaggatctgggaggtggggttgggggttggcaactcaaccatcggcttgtagatgaggaagctgaggcctagcttggcactcccctgactgtcctcttctccaggacccagaaggccactcccctacccccagactgggttttacctactagtcccagcacctttgacgtgagaaaactggagaagggtctcctcccagataagggactagtgtcctcctcgcccccaactccagctgcctgccaccccggaattcccttcctcatactctgtcaagcaatccgactcctccccatcagcacagccatcagagacgtagcttgttgggggctcaatccgggacacgatctcagccaagtcagtgaagccagagctcgggaaggcaagtatatctgcacggcgactttcattaaggtctgtagactccggtctgtgagcattttctcaatgacttcaccacgggtccagcctccaaacacagccttcccatactggtaacccacatcatagatctggtcaaacttcccgaagtccatggtcttgaagcagtcaatggatggacgaaggtactcgcaataggaactagacttgacaacttccagctgccgcacacaggacacatacgccaggcgggactggatctcagccatgtctggaacctttaccttgtctgcccaggggtttagccgtttccacaggcaaccaccagccagacaggctgtccccataggtgctgagatccgtctcatcctggcttcccacgtcgatggcaatgaccgttttggcccccatgctgcgggcgatatccgctggcaggttgttgatgtagccaccatccatgagcaggtgcccatccttcgggtcgcacagcggggcaggtagcccgagagcgtcatgctggcacgcacatagcgccacagggagccatctttgtggacacgcatggcggatgcagtgatgtctgtggtcacattgaagtaaggcagccacaggtcctcgatctgcttgtcctggaagacacggtggatacttcggttaaaggccgagccagtaaacatggaggtgacaggatatgtgaggtccaatacaggctccagtacagaagtcatgctcttggcccactcccgggctcgctgtttggtacgactggcgctgcgttcctcggcatacagggccccaatgaaggaag

SEQ ID NO: 2816 - DNA, 929 bp, Rattus norvegicus
cctaaaccagctccagcactccagactccagccacactccaacagagcaccatggtctcagccacccgctcgcttctctgtgcagcgctgcctgtgctggccaccagccgccaagccacaggggcgcccgtcgccaatgagctgcgctgtcagtgcctgcagacagtggcagggattcacttcaagaacatccagagtttgaaggtgatgccgccaggaccccactgcacccaaaccgaagtcatagccacactcaagaatggtcgcgaggcttgccttgaccctgaagcccccatggttcagaagattgtccaaaagatgctaaagggtgtccccaagtaatggagaaagaagatagattgcaccgatggcgtctgtctggtgaacgctggcttctgacaacactagttttacacattttacgatttctattgagggtcctatttattttatgtatttatttattccaccaagtgtgtggtttttattttacattaatatttaacgatgtggatgcgtttcatcgatggtcgttcaattccaattgtgcagtttaaagatggtaggcgttaaatatctcgttaaattaatatttattgggagaccattargtgtcaaccactgtgctagaaggtgttgagcgggaagaagggcggagagatgagagtctgggatcgtgttttgtgttagggtgaggaatgtgtgagaggctatgttgtatgttttgaaagaatgttatttattgaaagttgtctttcatattttatggtcaacattgatgtgttgaagcttcccttggacattttatgtctagtttgtagggcacaatgccttttatattctttaaccaatgctccttctcgtctcaggacagagaagttcmaaggactgttacaaatgaaataaaaataaaagttttattaaaaaat

SEQ ID NO: 2817 - DNA, 3167 bp, Rattus norvegicus
gaattcatgagatggaaacataggtcaaagctgtttggagaaattggaactacagttttatctagccacatctctgagaagtctgaagaaagcagcaggtgaaagtcattgtcaagtgattttgttcttctgtaaggaaacctcgttcagtaaggccgtttacttcagtgaaacagcaggaccagtaatcaaggtggcccggacaggacacgtgcgaattggacaatgactcagctatacacytacatcagattactgggagcctgtctgttcatcatttctcatgttcaagggcagaatctagatagtatgctccatggtactggtatgaaatcagacgtggaccagaagaagccggaaaatggagtgacgttagcaccagaggacaccttacctttcttaaaatgctattgctcaggacactgcccagatgacgctattaataacacatgcataactaatggccattgctttgccattatagaagaagatgatcagggagaaaccacgttaacttctgggtgtatgaagtatgaaggctctgattttcaatgcaaggattcaccaaaagcccagctacgcaggacaatagaatgttgtcggaccaatttgtgcaaccaatatttgcagcctacactgccccctgtcgttataggcccattctttgatggcagcgtccgatggctggctgtgctcatctctatggctgtctgtattgtcgccatgatcgtcttctccagctgcttctgttacaaacattactgtaagagtatctcaagcagaggtcgttacaaccgtgacttggaacaggatgaagcatttattccagtaggagaatcactgaaagacctgattgaccagtcacaaagctctggtagtggatctggattacctttattggttcagcgaactattgccaaacagattcagatggttcggcaggttggtaarggccggtatggagaagtatggatgggtaaatggcgtggtgaaaaagtggctgtcaaagtattttttaccactgaagaagctagctggtttagagaaacagaaatctaccagacggtgttaatgcgtcatgaaaatatacttggttttatagctgcagacattaaaggcaccggttcctggactcagctgtatttgattactgattaccatgagaatgggtctctctatgacttcctgaaatgtgccaccctggacaccagagccctactcaagttagcttattctgctgcctgtggtctgtgccacctccacacagaaatttatggcacgcaaggcaagcctgcaattgctcatcgagacctgaagagcaaaaacatccttattaagaaaaatggtagttgctgtattgctgacctgggcctagctgttaaattcaacagtgacacaaatgaagttgacatacccttgaacaccagggtgggcaccaggcggtacatggctccagaagtgctggacgagagcctgagtaaaaaccatttccagccctacatcatggctgacatctacagctttggtttgatcatttgggagatggcccgtcgctgtattacaggaggaatcgtggaggaatatcaattaccatattacaacatggtgcctagtgacccatcttatgaagacatgcgtgaggtcgtgtgtgtgaaacgcttgcggccaatcgtctctaaccgctggaacagtgatgaatgtcttcgagccgttttgaagctgatgtcagaatgctgggcccataatccagcatccagactcacagctttgagaatcaagaagacgctcgcaaagatggttgaatcccaggaygtaaagatttgacaaacagttttgagaaagaatttagactgcaagaaattcacccgaggaagggtggagttagcatggactaggatgtcggcttggtttccagactctctcctctacatcttcacaggctgctaacagtaaactttcaggactctgcagaatgcagggttggagcttcagacataggacttcagacatgctgttctttgcgtatggacagctttgttttaaatgtgggcttttgatgcctttttggtttttatgaattgcatcaagactccaatcmygakragaagtctctggtcaaactctggttactcactatcctgtccataaagtggtgctttctgtgaaagccttaaggaaattagtgagctcagcagagatggagaaaggcatatttgccctctacagagaaaatatctgtctgtgttctgtctctgtaaacagcctggactatgatctctttgggatgctgcctggttgatgatggtgcatcatgcctctgatatgcataccagacttcctctgctgccatgggcttacaagacaagaatgtgaakgttgcacaggacggtatttgtggccagtggtttaaatatgcaatatctaatcgacattcgccaatctcataaaarccatctaccttgtaactgaagtaacttctctaccaactttatttttagcataatagttgtaaaggccaaactatgtataaagtgtccatagactcgaactgttttcctccagtcaccattttgttttccttttggtaattatttttgttatataattcctcctatccagaattggcgctcactgtcttgaaccatactttgaaagaaatgcctcttcctggagtctgccttactgcatctgatcaccatgtgcatacctctgatcaaattctggagtctttgttctcggtacctcttaaaaagggaaattgtgtawmawrwrwarwrwrmwtttattttcaaaatcttcatagcctttattctagccatttttacctacatactcattctgtacaaaacagctcactcggtctcacggctgatcctcagtggaaatgatttaaagtagagctgtgtacgaatttcagaattcatgtatttaaaaacttcacactaacactttactaagatattgtctcatatcttttatgargatgtcagctgattttcaatgactataaatgtatcttagctatctaaatcttttgaaatttggttttataatttctggtccctaacttgtgaagacaaaraggcagaagtacccagtctaccacatttacactgwacattattaaataaaaaaatgtatattttaaaaaaaaaaaaaaaaaaaaa

SEQ ID NO: 2818 - DNA, 1321 bp, Rattus norvegicus
tgtgtccagggagctgccccaggacagaaacctcccaagacagcagtcaccatcaaaaacacaggtgaagctgtgagctctttgcttttctatccggaccacagctggatttgacctcctgtactgtgtcaayktcaggtymctgtggatggcgtccgaggtcttgttggagctccagccctctaaccgaagcctgcaggcccctgccaacattacctcctgcgagagtgccctagaagactgggacctgctgtatcgggtgctgccagggttcgtcatcactatctgcttctttggcctcttggggaaccttttagtcttgtccttcttccttttgccttggcgacagtggtggtggcagcaacgacagaggcagcagcgcttaaccatagcggaaatctacctggctaacttggcggcttccgatctggtgtttgtcctgggcctgcccttctgggcagagaacatcgggaaccgtttcaactggcccttcggaactgacctctgccgggtggtcagcggggtcatcaaggccaacctgtttgtcagcatcttcctggtggtggctatcagtcaggaccgctacaggctcctggtataccccatgaccagctgggggtaccggcggcgacggcaagcccaagctacgtgcctgctcatctgggtagccgggggtctcttgagcatccccacattccttctacgctctgttaaagtcgtccccgatctgaacgtctctgcctgcatcctgcttttcccccacgaggcttggcactttgcaaggatggtggagttgaacgttttgggtttcctcctccccgtgactgctatcatcttcttcaactatcacatcctggcctccctgagaggacagaaggaggccagcaggactaggtgtgggggtcccaagggcagcaagacgacggggctgatcctcacactggtagcctccttcctggtctgctggtgcccttaccacttcttcgctttcctggatttcctggtccaggtaagagtgatccaggactgctcctggaaggagatcacagacctgggcctgcagctcgccaacttctttgcctttgtcaacagctgcttgaacccactgatttatgtcttcgcaggccggctccttaagaccagggttctggggactttataaatgatgcaaccgagaagcctcatgcccatgtggcccaacaggaagggactcttccaattatcctgctggaattsaaacagcakkgagccaagaagcctggcttcttgaccaaccatctctggtatcataaagaccatctggtcagctgacccacagccc

SEQ ID NO: 2819 - DNA, 581 bp, Rattus norvegicus
ttgaagtccatgatggtgtgctccccagtgctccttggtattgtcatcttgtctgttttttcaggcctcagcagggctgatcgagccatgcccaagctggctgaccggaagctgtgtgcagatgaggagtgtagccatcctatytccrtgrctgtggcccttcaggactacgtggcccctgattgccgcttcttgactatatacmggggccaagtggtatatgtcttctccaagttgaaaggccgtggacggcttttctggrgaggcagtgtgcagggagattactatggagacctggcagcccacstgggctatttccccagtagcattgtccgggaggacctgactctgaaacctggcaaagtcgatatgaagacagatgaatgggatttctactgtcaatgagctcaacccaccgatgttatccctgcagttacccttccggtttgggcaaatacagcggccaactgcaaagtgttttgtccctttggtttttggggtgggcatgtacaaagaatgtttcacgggttcctgaacctagccaattaaagccctgaatgttgtaaaaaaaaaaaaaaaaa

SEQ ID NO: 2820 - DNA, 1198 bp, Rattus norvegicus
ggagcaagaaaggcaggtacagctgggcacagggatcgtgcagctggtggctggggcacaggccccagcgctggctccgggactaacacctttccggagccaacgctaatctcaactcagtcgagcaagagagcagacgcagctgccggctgctggatcccaggctggggcccgcttggtcccacacccctccaggggctgcggtgcagcagggcctggggcaggtgctctgcagatggaagcagacgccttgagccctgtggagctgggcctcctgctgctgcccttcgtggtcatgctcctggctgccctatgcgtgcgctgccgtgagttgccagcctcctatgacagtgcttccacagagagtttgtacccaaggagcatcctcatcaaaccacctcaaataaccgtcccccgaacacctgctacttcctaccctcttgtcacttccttcccacccctgaggcagccagacctgctccccattccgagatccccacagcccctcgggggctcccatcggatgccatcttcccggcagaattcagatgatgccaacagtgtggcgagctacgagaaccaggagccagcccgtaagaacgtggatgaagatgaggatgaagatgactatcctgagggctacctagtggtgctgcctgacagtagtcctgctgccgtccctgttgtctcctctgctccggtgcccagcaaccctgaccttggagacagtgccttctctatggagtcatgtgaagattacgtgaatgtccctgagagcgaggagagtgcagaggcatctctggatgggagccgggagtatgtgaatgtgtcccaggacgcacagccagtgatcagggctgagctggcctctgtgacctcccaggaggtggaagatgaagaagaggaggatgtggatggagaggaagctcctgactatgagaacctgcaggaacttaactgaaagcctgctgcagctatcagtcctggaactggacttgctgggggtgtcgctaagggagtcccawttgacctctgccttgcctacagcctgagaatctcccctaacttattgtgactttggagctcagtctgtgtccccagtattctgcaccttctgatgaagcctgagaatgaatctagttccagccggactatgtcatagaataaaggccacgtggcccaaaawmwaaaaaaaaaa

SEQ ID NO: 2821 - DNA, 3356 bp, Rattus norvegicus
ctgaccaccatggaaacgaggagaaataaagccagctagcaggatctctcctcgctggactgagagctttagcctgctgctgccggagagagttccagtcaaaagaaggaatcctagctgcaggctcctgcctccttttatattttagaaagagagggagagataccattgcttgcatgtgtgcatatctatagtatataattgtgwatattttattacacatacatatgcacctatttatactggggcaagaagacagccatgtgattatctcaaccaaggaactgtgcaagcgggggcaccggaggagggctatccctgcatcttctaaggcaagaataatgcctctatctgcaagtactggacaagcatgggatctgaatcacagacttaacgctaaatgaattgctccatatcctgcgaccatctatacatacaccatcttcaaagagtccatcgatacccgatcgctgaggagacagcaggcatctcttctccacgatgcatgcaagttttggaaaatacatgtgtggcactcacaagtatttccatgaagcaaagtcctgcagtcttgtggcattcatcatttaacaaatgcgaacactcccttcatcagtcagctyctactkracttaactggcggtgactggaatcctcaagggcctgctacatttctgwagacaaaagctaagatgaaggacgcaccactccaaatccacgtgctacttggcctggctatcaccgcactcgtacaagccggagataaaaaagtggattgcccccagttatgtacatgtgagatcaggccttggttcactcccagatccatctatatggaagcatcgacagtggactgtaatgatttagggcttttaaacttcccggccagattgcctgcagacacacagattttgctcctgcagactaacaatattgcaagaattgaacattccacagactttccagtaaaccttactggcctggacttatctcagaacaatttatcttcggtcactaatattaatgtacaaaagatgtcccagcttctttctgtatacctagaggaaaacaagctaacggagctgcctgaaaagtgtctgtatggactgagtaacttgcaggagctttacgtcaatcacaacttgctgtctgccatctctcccggagccttcgttggcctacataaccttcttcgacttcatctcaactcaaacagactgcagatgatcaacagtaagtggtttgaggctcttcctaatcttgagattctgatgctcggggacaaccccatcctcagaatcaaggacatgaactttcagcctcttctcaagctccgcagcctggttatcgctggcataaacctcacagaagtaccagatgatgccttggttggactggaaaacctggaaagcatctctttttatgataataggcttaataaggtaccccaggttgctcttcaaaaggctgtcaacctcaagtttttggatctaaataaaaaccctattaacagaatacgaaggggtgattttagcaatatgctacacttgaaggagttggggataaacaatatgcctgaacttgtctccattgacagtctcgctgtggataacttgccagatttgagaaaaatagaagctactaacaaccccaggttgtcttacattcaccctaatgcatttttcagactcccaaagctagaatctctcatgctgaacagcaatgccctcagtgccctctaccatggtaccatagagtctttgccaaacctcaaggaaatcagcatacacagcaatcccatccggtgtgactgtgtaatccgctggattaacatgaacaaaaccaacattcggtttatggaaccagattctctgttctgtgtggacccacctgaattccaaggccagaatgttcgacaagtgcatttcagggatatgatggaaatctgcctccctcttatagctcctgagagctttccttccatcctggatgtagaagctgacagctatgtgtcgcttcactgcagagccactgcagaaccccagcctgaaatctactggatcacaccttctggtaaaagactattgccaaacactctgagagagaagttctatgttcattctgaaggcacactagacataagaggcataaccccaaaggaaggtgggttgtacacctgcatagctactaacctagtcggtgctgacttgaagtctattatgatcaaagtgggaggttttgttcctcaggataacaacgggtcattgaatattaaaataagagatatccgggccaattctgttctggtgtcttggaaagcaaactctaaaattctcaaatccagtgttaagtggacagcctttgttaagactgaagactcccaggctgcccaaagtgctcgaataccatctgatgtcaaggtatacaatcttactcatctgaaaccywckastgagtacaaaatttgtattgatattcccaccatctatcagaaaagcagaaaacaatgtgtgaatgtgaccacgaaaagtctggagcatgacggaaaagaaaatggaaagagtcacacagtatttgtggcctgcgttggaggtcttctggggatcattggtgtaatgtgtcttttcggctgtgtctcacaagaagggaactgtgagaatgaacacagctatactgtgaaccactgtcacaagccaaccttggcattcagtgagctttaccctcctctaatcaacctctgggagtccagcaaagaaaaaccggcatcgttggaagtaaaagcaactgctataggtgtgccgacaagtatgtcctaaaacagccaaccaaacctccttcaaagaaaagctggagatggcggcagtgcttaaaaatcaacaacaaaaaataggcagaggaatgtcactttctcaaaggaagactcagcatcgccaatgctgctcctgaccaagggaaagagaggtgaaagttcggcattttaattgactggcttcaaagggtactgtggcaaccaaataaaacaactccattttytagacctttcatgtaacttttctgtcaggactgcagttaatgtgaacatttctgtattttttttaagtatagaagagtagttgaactgagcaatacctcctcctgtgttgtattacacatwttagccacgagtttttgcagtgaccagataaacttgaattgacacgtggtgtaacggaaaggacaggttctgtagactagacacagtgagtgtgtggacctcttttwtaaggaaaaaatacattttggattmcmatcaawwrmwwwwrwmwwrwttctgtttctaaataaagaataatttctgggaaaaaaaaaaaaaaaaa

SEQ ID NO: 2822 - DNA, 5638 bp, Rattus norvegicus
cggcacgassccagcccctcaagagacttttcaaaaaaacccaataaatatgtgagtctgggtcaccatgccaactagttgtctcagtcacatttaacaccctagtactatcctcagaccagcacccacaggactttcgcttgacaaataccttttctagttccaagcaggtcacctgcatctggggatagctttctctggaacctgaggtcaagggaaaaactctctgaccccaagtaggccccgcatgcgattgaatgctctaagcaggtctgctcactgggtaacgttcgcgcgccaggaggccgagtggcgggtgccggaggtcttccaagcccggaggaaacctgacggcggcgcgcaggcgagctgcacccctcctccctccaggatgctgcccctcgctgctcgtcagcctgccaaatgcattccagagctgtgcacaagacacacttctccaggcagtcctagaaacccgagcccggagcgggagagggcgggagggagcgcggcggccgctgaggtcacattcgcgccgcctctccgccctcggccgcccggctgttccctctagcgcacacttcccagggcctctgtcctggccggtgtaaatgtctttgaaacagacagcgatctcctcccctttccaagggatccgccgccagggccttaaaacaaaacgaatgaatgaagcgccccggcgagctccactggtctaaatcgggccactgaccggctcattcctgctccaaactcgccctgctccacagcccccagctcttccgatttccccctgctccccctgggtctccgccgacccccggggccgtctcggcctcccacctccctccgcccgtgggtacccctctgtagacctgggagagggtggcggtaactgggaggggggttgaaatagcttttagaaacccgatctgttgtttgcgaaacacaatcgcttttttttttttaaagcgacagggtgtctagacggccacgtgacgaggccggagccgggcgcgccactgcgcagtggaaccagccgagcggagggacgggtgggggggcgggaaggaggcggcggcggctgggggcgggggagggaggggtagaggggggagggaagggggcggaggcgggaggccttgcgggaggcggcgagccctgggcacattcgctcgctgctcggcgcacagaggatcttgtccccgagcagcgccagcagagccagccgggcgcctcgctcggtccgctcgccgcgccggagagctgcctgagacgcagccagccagccggcgccacgccgccgagcgctcggccccggagtccctgagtgcggcgcggcgagcccccagcggcggcagaaggactcgagcgccaggagagggcggacgggggacgaggaggctcccgggcgcgacgaagagagtctcggaggaagaggctgcgagaggacacccgggcctcctgccgccactgtcgggtcggggccagcagcttatgcgagcagccccagcgaccaccctcggccaggagaaggggcaccggcagcccccacgctagctagcctgccgcctgtgccctcgggggcgagagcttgcgacccgccggagcccgccgccgcgccgccctcccccgcgctgacagccccccggggcgcagccgccgccgcagcatcttctgtccctgcttccccagcgcggaggaagtccccgccgaggacctgggcccccgggagcgcaggaggaaagaccagagactctaaaacacccagatacgcaagattgaagcagcctaaccagacctttctgtggattaaaagaaatacgattttttttttgacagaagaaaaggaaaggaagaccggcrrgsttmwgcaaggaaaaaaaggggatgtaactcgtggatacggtttttccccccacccttccaacatcttgttctactttgtaaacattttctctttttaaaccccggctccatccggtgccctccagacctccgaggtgcgagaaggtggtgtgttttttcactgggggctttgcatatttggttttsggswykwkgagagaccctccagacatctcacgaggggtgaagtctactcggccccctccctcaagtcttcgcgtgcacagaattcgaggagatccggttactaaggatatagaagaaaaaaataaatcgtgtgcctgccttttytttttttaaktgcstgcttctccccacccccaaattaagttgcttagcaagggggaaagaggctttttcctcccttcagtagctcagcctaacgtctttcgttttttgcccctgaggatcttccatgtaggaagccgaggctggcgagcccgacactcgggarccactgtaggggggcctttttggggaraggcgtcgaccggggctgcctcggccgcccccagrgaagcggcggccgcgttcctcaggggcacgccggggcccgagagccgcgcagggcgcgggccgcgccgggtggggcagccgaagcgcaggcccccgatccccggcgggcgcccctgggcccccgcgcgcgccccggcctccgggagactggcgcatgccacggagcgcccctcgggccgccgccgcttctrcccgggcccctgctgttgttgctgtcgcctgcgcctgctgccccaactcggcgcccgacttcttcatggtgtgcggaggtcatgttcgctccttagccggcaaacgacttttctcctcgcctcctcgccccgcatgttcaggaccaaacgatctgcgctcgtccggcgtctctggaggagccgtgcgcccggcggcgaggacgaggaggagggcgtggggggtggcggcggcggaggcgrmctgcggggagaaggggcgacggacggccgggcttatggggctggtggcggcggtgcgggcagggctggctgctgcctgggtaaggcagtccgaggtgccaaaggtcaccaccatccccatcccccatcctcgggygccggggcggccgggggcgccgaggcggatctgaaggcgctcacgcactcggtgctcaagaaactcaaggagcggcagctggagctgctgcttcaggccgtggagtcccgcggcggtacgcgcaccgcgtgcctcctgctgcccggccgcctggactgcaggctgggcccgggggcgcccgccagcgcgcagcccgcgcagccgccctcgtcctactcgctccccctcctgctgtgcaaagtgttcaggtggccggatctcaggcattcctcggaagtcaagaggctgtgttgctgtgaatcttacgggaagatcaaccccgagctggtgtgctgcaacccccatcaccttagtcgactctgtgaactagagtctccccctcctccttactccagatacccgatggattttctcaaaccaactgcagactgtccagacgctgtaccttcctccgatgaaaccgggggaacgaattatctggcccctggggggctttcagattcccaacttcttctggagcctggggatcggtcacactggtgcgtggtggcatactgggaggagaagactcgagtggggaggctctactgtgtccaagagccctccctggatatcttctatgatctacctcaggggaatggcttttgcctcggacagctcaattcggacaacaagagtcagctggtacagaaagtgaggagcaagatcggctgtggcatccagctgacaagggaagtggatggcgtgtgggtttacaaccgcagcagttaccccatcttcatcaagtccgccacactggacaacccggactccaggacgctgttggtgcacaaagtgttccctggtttctccatcaaggcttttgactatgaaaargcctacagcctgcagcggcccaatgaccacgagttcatgcagcagccatggacgggcttcaccgtgcagattagcttcgtgaagggctggggccagtgctacacccgccagttcatcagcagttgcccgtgctggctggaggtcatcttcaacagccggtagtctcccggtgtggggagaagaggacaggacggaggggtgagccgagcaggccaccgttcaaactacttgctgctaatctttcatgcaaaactctttcggtcggttttgttgtttgccattcattgttggttctgttttgttttgttttccttttttttttttcttccttcttctttttcctcctttcttgtcactcttgtgtcctgtgtgtctcgttctttgagaaaatatgatgcggatttttggttgtgtgtttttttttttcgtttgtttgtttgttgttgttgtttgtgttttgaggtggtggtgggtgcggttggcaggacaccccgatacaaaaacgggaagcaagagtcagcactgccaagcgtggtgtgcgaaagtgggtaccaccttcccctttggatcagcatttcagttgtcagtgtgtgtgtgtgaggggggtgtacgtgaatgacagatgggggaatggcgtgctttttttgtgttctttatggatgtccccagctgagaggcttgcagttccaagctgtgtgtctctcactgtgtgtctctctcatgagcctttcggacatgctcggtggggcagaggctgtacctgggcagactggcagcaggtgtcccagcaggtgccgagctctgctccgctgaagctcccccgcccccgcccccttccccacaggacacgggcctatccacaggcttctgagaagccagcctgctagaaggctgaaccagaaccaattgttttcatccctgtcttactgcctcctgtcacccgctgccattgtcgaaggctgtcttttttggccatctgctcctggatctctcttgagatgggcttcccaagggctgccgggacagccccagtcacagtattgctaccccagtaccttctcaggcccttccaccggtcccagccgtggttttttcatcaggtttctcccagatctggaaagtcagctcagcaccccatcccccagcctgtgtgctgagctctgtagaccagcgaggggcatcagggagggacctgctcagtgcccacccacccccccttcccgctgagaagggtgtagccccgtcataacaaaggtaccatcgtaggctggctcccagcccttctctcggctcatacactcgtatgatactctgacactgttcttggctcaatgagcatgctcacactttaatataagctatttttctaactacaaaggtttaaatgaacaagagaggcgttctcatcggaaatttagcatcgtagtgctttgagagaggaaaggactccttaaaagagaaaaaaaaaagctgagatttattaaagaaaaaaatgtattttatgttatatataaatatattattacttgtaaatataaagacgttttataagcatcattatttatgtattgtgcaatgtgtataaacgagaataaagaaaagatgcactttgctttaawawaaacgcaaataacatgccaaattaaaaaaaaaaaagataaacacaagattggtgtttttttctatgggtgttatcacctagctgaatgtttttctaaaggagtttatgttccattaaacaatttttaaaatgtataaaaaaaaaaaaaaa

SEQ ID NO: 2823 - DNA, 808 bp, Rattus norvegicus
  misc_feature (679)..(679): n is a, c, g, or t
gacaaaaggggccttagcggccttagcgggacaggccgtagcgggagggaacgaagcatcgagccggcccgtgagcgagatgcagcaccgaagtttcttccttctagcccttgttgccctcttggctgtcacgaccgcggtggccaaaaagaaagacaaggtgaagaagggcagcgagtgttcggagtggacctgggggccctgcaccccmagcagcaaggactgcggcatgggtttccgcgagggtacctkyggggcccrgacccagsgcatccattgcaaggtgccctgmaactggaagaaggagtttggagccgactgcaaatacaagtttgagagctggsrsgmgkgtgatgggagcactggcaccaaagcccgccaagggaccctgaagaaggctcggtacaatgcccagtgccaggagassatsmgcswgrycaagccywscacmtymawgaybwvktyawwgkyywmagccaagaaaggaaaaggaaaggactgagtcaggaggccagagagtttytggcctgggacytgaacggagccctcctytcccacaggcccaagatgtaacccaccagtgcctkdtgtyttcstgtcagstktgtcaatcamaccsttttamtcstgccccctyttgvtacacstagtacccaaagtggggagggacaagggattntggraagtgagcctcccmataacccyttttgtttcccccaccvtgatacctgkthtcgvgaaatgaataaaatgaactcacttttttccmawaaaarmmwmwdwwwwaawawaaaaaaaaaaaaaaaaa

SEQ ID NO: 2824 - DNA, 1557 bp, Rattus norvegicus
ctctctggcactaaggacccctggagaagatggggaggaaaaagattcagatccagcgaatcactgatgaacggaaccgccaggtgacattcaccaagcggaagtttgggctgatgaagaaggcctacgaactgagtgtgctgtgcgactgtgagatcgcgctcatcatcttcaaccactccaacaagctgtttcagtacgccagcaccgacatggacaaggtgctgctcaagtacacggagtacaacgagccgcatgagagccgcaccaatgctgacatcattgagaccctgaggaagaagggtttcaacggctgtgacagcccagagccggatggggaggactcactggagcagagccccctgctggaggacaagtaccggcgggccagtgaggaactggatgggctcttcaggcgctatgggtcatctgttccggcccccaattttgccatgcctgtcacagtgcccgtgtccaatcagagctccatgcagttcagcaatccaagtagctctctggtcactccttccctggtgacatcatcccttacggacccacggctcctgtccccccagcagccagcactacagagaaacagtgtttctccgggcctgccccagcggcctgctagtgcaggagccatgctgggtagagacctcaacagtgctaatggagcctgccccaaccccgttgggaatggctacgtcagtgcccgggcttcccccggcctcctccctgtggccaatggcaacggcctaaacaaggtcatccctgccaagtctccacccccacccacccacaacacccagcttggagcccccagccgcaagcctgatctgcgggtcatcacttcccagggaggcaaagggttaatgcatcatttgaacaatgcccagcgccttggggtctcccagtctacccactcgctcaccaccccagtggtttccgtggcaacaccaagtttactcagccagggcctccccttctcctccatgcccactgcctacaacacagattaccagctgcccagtgcagagctttcctccttaccagccttcagctcacctgcagggctggcactaggcaacgtcaccgcctggcagcagccccagcagccccagcagccacaaccaccacaaccgccacagtcacagccacagccaccacagccacagccacagcagccacctcagcaacagccccacttggtccctgtttctctcagcaacctcatccctggcagccccttgccccatgtgggtgctgctctcactgtcactacccacccccacatcagcatcaagtcagaaccagtgtccccaagtcgtgaacgcagccctgcacctcctccaccagctgtgttcccagctgcccgccctgagcctggcgaaggtctcagcagcccagctggaggatcctatgagaccggggaccgggatgatggacggggggactttgggcccacactaggcctgctgcgcccagccccagagcctgaggctgagggctcagctgtgaagaggatgcggctggatacttggacattaaagtgatggt

SEQ ID NO: 2825 - DNA, 2099 bp, Rattus norvegicus
gcacccggttctcccgagtccttgccgaagtgtactgcgcgctcagagcagcccgacagtttccagccaaacttcagcaactcctcccttgccgcaccatgccgaagacgatcagtgttcgtgtaaccaccatggatgcagagctggagtttgccattcagcccaacaccactggcaagcagctgtttgaccaggtggtgaaaactattggtttgagagaagtttggttctttggtctgcagtaccaggacacaaaagctttctctacttggctgaaactcaataagaaggtgactgcacaggatgtccggaaggaaagtccgttgctcttcaagttccgggccaagttctatccagaggatgtgtctgaagaactgattcaggatatcacccagcgcctgttctttctgcaagtgaaggagggcattctcaatgatgacatttattgtccacctgaaaccgctgtgctcttggcgtcctatgccgtccagtctaagtatggtgacttcaacaaggaagtgcacaagtctggctacctggctggagataagttgcttccccaaagagtcttggagcagcacaaactcaacaaggaccagtgggaagagcggatccaggtatggcatgaggaacaccggggcatgctcagggaggatgctgtcctggaatatctcaagattgctcaggacctggagatgtatggtgtgaactatttcagcatcaagaacaagaaaggctcagagctgtggctgggtgtggatgccttgggtctcaacatctatgagcagaatgacagattgactcctaagattggcttcccttggagtgaaatcaggaacatctctttcaatgataagaaatttgtcatcaagcctattgacaaaaaggccccggactttgtgttctatgctcctcggcttcggattaacaaaaggatcttggccctgtgcatggggaatcatgagctgtacatgcgtcggcgwaagcctgacaccattgaggtgcagcagatgaaggcccaggctcgagaagagaagcaccagaagcagatggagcgtgctctactgraaaawraraaraaraarcgtgagctggctgaaaaagagaaggagaagattgaacgggagaaggaagagctgatggagaagctgaagcagattgaggagcagaccaagaaggctcagcaagaactggaagaacagacccgcagggccctagaacwygagsaggaacggaagcgtgcccagagtgaggctgaaaagctggccaaggagcgtcaagaagctgaagaagccaaggaggccctgctgcaggcttctcgggaccagaagaagactcaggaacagctggcttcagaaatggcagagctgacagcacggrtctcccagttggaaatggctcgaaagaagaaggagaktgmggcygaggaatgscascaaaaggcccagatggtccaggaagacttggagaagactcgcgctgagctgaagacagccatgagtacccctcatgtggcagagcctgctgagaatgaacatgatgagcaggatgagaatggagccgaggccagtgctgagctgcgggctgatgctatggccaaggaccgcagtgaggaagaacgtaccactgaggcagagaagaatgagcgtgtgcagaagcatcttaaggcccttacttcagagctggccaatgcccgagatgagtccaagaagactaccaatgacatgatccatgctgagaacatgcgactgggacgagacaaatacaagaccctgcgccagatccggcagggcaataccaaacagcgcattgatgaatttgagtccatgtagtgggcgcgcagccgttagggacccctcctccttcttccttgtcccccacactcctatagttttgcctaactaacaccctgctggagccactaactagaaaagccttggagccataccaaacattcagtatgaccatgggaccaaatttagtttccctattcatatccttgggcaaacaaatggcccacctgtgtagccaatggaacctcctcttccttctttgtcacactcattcaacatagctctctagaatagaccatttccccc

SEQ ID NO: 2826 - DNA, 2068 bp, Rattus norvegicus
ggagcsagcagggccacccatccagacaccttgcagcagagccttctagaagtaagcctcacccagccytcataccgatgccctcctgtgcayrctgctgcagctgcggtcccaagatgccagctctccagctgctgtttctggcctgcctggtrtggggaatgggggccaggacagcacagttccgaaaggccaacgatcggagtggtcgatgccagtacaccttcactgtggccagccccagtgaatctagctgcccaagggaggaccaggccatgtcagccatccaggaccttcagagagatagcagcatccagcatgcagacctagagtccaccaaggcccgggtcagatccctggagagtctcctccaccagatgacctcaggcggagttactgggacccaggaggtccaggaggggctacaaggccagctgggtgccctgaggagagagcgggaccagctggagacscaaaccagggatctggaggtagcctataacaatctcctgagagacaaatcagctttggaggaagagaagaggcagctggaacaagagaataaagatttggccaggaggctagaaggcagcagccaggaggtagcaaggctgaggagaggccagtgtccctcaacccaccacccctctcaggacatgttgccaggctccagggaagtctctcagtggaatttggacacgttggctttccaggaactgaagtcagaactaacagaggttcctgcttcccaaatcttgaagaatcaatctggtcatcccaggagcaaagagggagacaaaggatgtggagtgctaatgtgggtaggagagccagtcaccctgaggacagctgagacaatcactggaaagtatggagtatggatgagagaccccaagcccactcacccctacacccaggagaccacttggaggattgacacggttggcacaggcatccgccaggtgtttgagtacagtcagataagccagttcgagcagggctatccttcaaaggtccatgtgctcccccaggcactggaaagcacaggtgctgtggtgtaykcrgggagcctstatttccagggtgctgagtccagaactgtgctcaggtatgaactgaacacagaaacagtgaaggcagagaaggaaattcctggagctggctaccatggacagttcccatacgcatggggtggctacacagacatcgacttagctgtggatgagagcggcctctgggtcatctatagcacagaggaaaccagaggagccatagtcctctccaaattgaacccagagaacctggaacttgagagtacctgggagaccaacatccgtaagcagtctgtggctaatgcctttgttatctgtggcatcttgtacacggtgagcagctactcttcagtccatgcaaccatcaactttgcctatgacactaacactgggatcagcaagaccctgaccatcccattcaagaatcgctacaaatacagcagcatggtcgactacaaccccctggagaggaaactctttgcctgggacaacttcaacatggtcacctatgatatcaagctctcagagatgtgaggagcctctatccctaccagagaaggcagaaaaagggggaagttccaggctcccaggtgaagcagctgcargaggaggcagccagatgctgggggcttctgcttctcaagatttgtttgtccargtcaatacctcggggcttgtacagttgcatatattctgctctcttctgtcagctttcaaaaggggtgttcatcttttaaaaatcatatagtgtacartccaagaaaaactagaaktgttgtttcctcatgaaacattgctttttgccaagctgtatggttactacmagaccttgagaggcagcaacagttctacccaagaggagggagataacggggagggggtgaccaccactcctgtggttagaactgctcctgcagtatttactccagtttctaaggctacagatatagcatgtacattaaaccctttgccctgtgaaataaagttatcttacacgacgttaaaaaaaaaaaaaa

SEQ ID NO: 2827 - DNA, 1233 bp, Rattus norvegicus
gcgctggagctctcggcagaacccagcgtcaggcaggcgaccgcagggcgaccgcagggggccacccgaggtggcaggggcaatggccggggtcgcgtgcttggggaaaactgcagacgccgatgaatggtgcgacagtggcctgggctctctaggtcccgacgcagcagctcccggaggaccaggtctggtcgcagagcttagcccagagctgtcttgggcgcccttagtctttggctacgtcactgaggatsrsgasrcagccctgcacttggccgtgatacatcagcacgagcccttcctggatttcctcctgggcttctctgccggcactgagtacctggacttgcagaacgacctaggccaaacagccctgcacctagcagccatccttggagaggcatctacagtagagaaactctatgcagctggcgcaggagtgttggtgactgagagagggggccacacagcactgcacttggcctgccgtgtgagggcacacacgtgtgcatatgtactgcttcagcmccgtcmcagccacccaagagatgcctcagatasctasmtcactcagagccaggaccacaccccagacaycagccatgcccctgttgccacggacccccaacccaacccagggaacgaagrggagctgcgtgatgaagattggaggytgcagytagaagctgaaaactatgatggccacaccccaytccatgwagctgtcatccmcaaagatgcaragatggtccaactgytcagggatgctggagccracctcaataaaccggagcctacgtgtggccggacccctmtgcacctggcagtagaaggccaggcagccggcgtgctggcgcttctcctcaaagctggcgctgaccccaccgcasgcatgtatgggggccgcaccccacttggcagtgccctgytccggcccaacccygtchtygcccgcctcctccgtgcacatggggctcctgagcccgaggayraggatgataagcttagcccttgcagcaacagcagcagtgacagcgacagtgacaacaragatgaaggcgatgaatatgatgacatcgtggttcacagtygcaggagccaaaaccagccacctycttycccagcagccaaacctyttcctgatgaccccaaccctgcctgacttaagatctaatattaatatagtttccaawttaataaaatttyagacctgvmammmmrraaaaaaaaaaa

SEQ ID NO: 2828 - DNA, 1465 bp, Rattus norvegicus
cctgtaacagccctagcaggcagaacatgagcgtcttcctgcgaaagcaatgcctctgcctaggcttcctgctcctccatctcttaaatcaagtctctgcaactctgcgctgcccgtctcggtgcccgagccagtgccccagtatatcaccgacctgcgcccccggggtgcgctcggtgctagacggctgctcctgctgtccggtgtgcgcccgccagcgcggggagagttgctctgagatgagaccctgcgaccagagcagcggtctctactgcgaccgcagcgcggaccccaacaacgagactggcatttgcatggttccagagggagacaactgtgtgttcgatggggtcatttaccgcaatggagagaagtttgagccgaactgtcaataccactgcacctgcagagatgggcaaattggctgtgtgccccgctgccagctggatgtgcttctgccaggtcctgactgcccagctccaaaaaaagtcgcagtgcccggggagtgttgcgaaaagtggacctgtggctcagaggagaaggggacactgggaggcctggcccttccagcctacagaccggaagctaccgtaggagtcgaactctctgactccagcatcaactgcattgagcagactacagagtggagcgcgtgttccaagagctgtggaatgggcttgtccacccgggtcaccaacaggaatctccaatgtgagatggtaaaacagactcgtctctgcatggttcggccttgtgagcaagagcctggggaagcaacagacatgaaagsyaaraakygkcwcsggaccaagaagtccctgaaatccatccacctacagttcaagaattgcactagcctgtacacctataagcccaggttctgwgggatctgcagtgacgggcgctgctgtacgcccttcaataccaaaaccatccaggtggagtttcagtgtttgccagggcaaatcatcaaaaaaccagtcatggtcattggaacctgtacctgccactccaactgccctmasaacaatgaggccttcctccaagagctggagctgaagacsagcagaggaraaatgtaacaggtgcccagggaagtgcattygttgaggcaaactgttgytgtmacaaggcccgccatyacctgtwtataaraaacatagtgaaggagttgycccgtgtatgyttctgtgatcawawgaggtcattwawatttgtckctgwtttwaatgaaaactgttccmaatgtaaacttakaatcaarataagctcaggatatggcttaggggkgacttgctttcctgksctgwtcattacaagtgcaaatttgtgtaaatttaagycacatasatgatctagttggtaraatgtgtcacatcacactcattttytgkmcattagttaaatcccaataaatgttacagrrwtgrwwrrmamarwraaawmwaaaaaaaaaaaaaaaaaa

SEQ ID NO: 2829 - DNA, 3371 bp, Rattus norvegicus
tagatccccgggctgcaggaattctgcggccgcagaccatacacgcgtttgggtttgaagaggaaactggtctccgcttccccagcttgctccctctttgctgatttcaggggctatctcttagtgaggtggagatattccagcaagaataaaggtgaaggcagacggacctccaggacgcaggaggaaaacgctgatcattagagacctttgcagaagacaccacaaggaagaaaattagagaggaaaaacacaaagacattatacgagatcccaccaacctagccctggagagagcctctctgtcaaaaatggatatgtttcctctcacctggattttcttagctctgtacttttcgggacacaaagtgagaagccagcaagatccgccctgcggaggtcggctgaattccaaagatgctggctatatcacttccccaggttacccccaggactatccctctcaccagaactgtgagtgggttgtctatgcccccgaacccaaccagaagattgtcctcaacttcaaccctcactttgaaatcgagaagcatgactgcaagtatgacttcattgagattcgggatggagacagtgagtcagctgacctcctgggcaagcactgtgggaacattgcccctcccaccatcatctcttccggctccgtgttatatatcaagttcacatcagactacgcccggcagggggcaggtttctccctacgctatgagatcttcaaaacaggctctgaagattgttccaagaactttacaagccccaatgggaccattgaatctccagggtttccagagaaatatccacacaatctggactgtaccttcaccatcctggccaaacccaggatggagatcatcctacagttcctgacctttgacctggagcatgaccctctacaagtgggggaaggagactgtaaatatgactggctggacatctgggatggcattccacatgttgggcctctgattggcaagtactgtgggacgaaaacaccctccaaactccgctcgtccacagggatcctctccctgacctttcacaccgacatggccgtggccaaggatggcttctcagcacgttactatttggtccaccaagaaccacctgagaactttcagtgcaatgcccctctgggaatggagtctggccggattgctaatgaacagatcagtgcctcatccaccttctctgatgggaggtggactcctcaacagagcaggctccatggtgatgacaatggctggacacccaacgtggattccaacaaggagtatctccaggtggacctgcgcttcctaaccatgctcacagccattgcaacacaaggagccatttccagggagacccagaagggctactacgtcaaatcgtacaagctggaagtcagcacaaacggggaagattggatggtctaccggcatggcaaaaaccacaaggtattccaggctaacaatgatgccaccgagttggttctgaacaagctgcacacgccgctgttgactcgtttcatcaggatccgcccgcagacgtggcatttgggcatagcccttcgactggagctctttggttgccgggtcacagatgcaccctgctccaacatgctgggaatgctctcgggcctcattgctgatacccagatctctgcctcctccacccgagagtacctctggagccccagtgctgcccgcctggttagcagccgctctggctggttccctcggaaccctcaagcccagccaggtgaagaatggcttcaggtggatcttgggacacccaagacggtgaaaggcgtcatcatccagggggcccgaggaggagacagtatcactgccatggaagccagggcatttgtacgcaagttcaaagtctcctacagcctaaatggcaaggactgggaatatatccaggaccccaggactcagcagccaaagctgtttgaagggaacatgcactatgacacccccgacatccgaaggttcgagccagttccagcacagtacgtgcgggtatacccagagaggtggtcaccagcgggcatcgggatgaggctggaggtcctgggctgtgactggacagactcaaagcccacagtggagacgctgggacccaccgtaaagagtgaagagaccaccaccccatatcccatggatgaggatgccacggagtgtggggaaaactgcagctttgaggatgacaaagatttgcaacttccttcaggattcaactgcaactttgattttcctgaagagacctgtggttggatgtacgaccgtgccaagtggctgcagagtacctggatcagcagtgccaaccctaacgacagaacgtttccagatgacaagaacttcctgaaactacagagcgacggcggacgagagggccagtttgggcggctcatcagcccaccagtgcacctgccccgaagccctgtgtgcatggagttccaataccaagccatgggcggccacggggtggcactgcaggtggttcgggaagccagacaggaaagcaaactcctttgggtcatccgcgaggaccagggcagcgagtggaagcatggacgcattatcctgcccagctatgacatggagtatcagatcgtattcgagggagtgatcgggaaagggcgatccggagagatttccatcgacgacattcggataagcaccgatgtcccactggagaactgcatggaacccatctcggcttttgcagtggacatcccagaaatccatgggggagagggctatgaagatgagattgatgatgactatgaaggagattggaacaactcttcctctacctcaggggctggtagtccctcatctggcaaagaaaagagctggctgtacacactggaccccatcctgatcaccatcattgccatgagctcgctgggtgtcctgctgggggccacctgtgcgggcctcctcctctactgcacctgctcctactctggcctgagttcgagaagctgcaccacactggagaactacaactttgagctctacgacggcctcaagcacaaggtcaagatcaatcaccagaagtgctgctcggaggcatgaccgattgtgtctgaatcgcttctggcgtttcattccagcgagaggggctagggaagattactttttttttcctttggaaactgaatgccataatctggatcaaaccgatccagaatactgaaggtatggacagaacagacaggccagtctaggagaaaggaagatgcagccgtgaaggggatcattgcccacagaggacagtggtggtcaagttaatgcaggaaccgggcccgtgttctctgccgggacacagacaggagcgcatctcctcggagtcaacag

SEQ ID NO: 2830 - DNA, 2106 bp, Rattus norvegicus
gaggatagcctgaacagtcggtcagtagtacagtagcagctcacatgtgtggattgctccygtgaggaacatcattatgggctctacagatacagacatcgaagaactggaaaacgccacttacaagtatctcattggagaacagaccgagaagatgtggcaacgcctgaaaggaatactaagatgcttagtgaagcagctggagaaaggtgatgtcaacgttgtcgacctaaagaagaatatcgaatatgcggcatctgtactggaagctgtttacatcgacgagacraggaggcttctggatactgaggatgagctcagcgacattcagaccgactcggttccwtcggaagtccgggactggttggcttcaacctttacacggaaaatggggatgacgaaaaagaaacccgaggaaaaaccgaagtttcgcagcattgtccacgctgtccaggctgggatttttgtggaaaggatgtacaggaagaactatcacatggttggtttgacatatcctgcagctgtcatagtgacactcaaggaagttgataaatggtcttttgatgtatttgccttaaatgaagcaagcggggagcatagtctgaagtttatgatttatgaactatttaccagtaatgatcttatcaaccgcttcaagattcctgtttcttgcctaattgcctttgcagaagctttagaagttggttacagcaagcacaaaaatccgtatcataatttggtccatgcagctgatgtcactcaaactgtgcattacataatgcttcatacaggtatcatgcactggctcactgaactggaaatcttagccatggtctttgcagccgccgttcatgactatgaacacacaggaactacaaacaacttccatattcagacgaggtcagacgtcgccattctgtataacgaccgctcagttcttgagaatcaccatgtcagcgcagcctacagacttatgcaagaggaggaaatgaatattttggtaaatttatctaaagatgactggagggatcttcggaacttagtgattgaaacggtcttagcaacagacatgtcaggccatttccagcaaattaaaaacataagaagcagcttgcagcagcctgaagggattgacagagccaaaacgatgtccctgatactccacgcagccgacatcagccacccagccaaaacgtggaagctgcactacaggtggactatggccttaatggaggaatttttcctgcagggasacarrgaagctgaattagggcttccgttttctccactttgtgatcggaagtcaacgatggttgcccagtctcaaataggtttcattgatttcatagtggagccaacgttttctctcctgacagactcgacagagaaaattgttattcctcttatagaggaagcttcaaaaccagagtcttctaactatggggcaagcagctcgtccaccatgattgggttccatgttgctgacgctctgaggcggtcaaayacaaaaggctgcatgagtgatgggacctatgccccagactactctctgtcagckgtggacctgaagagcttcaaaaacaacctggtggacatcattcagcagaacaaggagaggtggaaagagttggctgcccaaggcgaacttgatcttcataagaactcagaagacttagaagaaaagcatgctgacacacatccataggtgtgaacgaactttaagagttcagttattttaaacacaagaggaaaatgaaagcagcatgaaaaacatgcaaagaccttgatttttctgcaaaaaaatatatgtttggctcaggccattttagtcgactcctccataaggaacaagagcataagtttcactcttcttagctcagcaaagcagtacctgcaagttatcattaggattctggctgctgtttctgccatcgttctccctccatgatttggccatcttcaatgaagccagagaaatctggagactttcaactttccgtcatgtttgacttggcctgaagacagaatggttttcaatgcacttcttgcaccgtgtcactcaagaggacccacaaccacacaattgttaacaacacaaggacaaca

SEQ ID NO: 2831 - DNA, 2227 bp, Rattus norvegicus
  misc_feature (1990)..(1990): n is a, c, g, or t
gtctcccggctgtgcwyggscgtgcggagggccggtgccagcacctccagctccgggacagcagcgggagccaagcccgagccgcakgcgtcgtcgccatgcgctggttccgggcgctgttgaagaatgcgtccctggcaggggcgcccaagtayatcgagcacttcagcaagttctccccgtcyccgctgtccatgaagcagtttctagacttcggatccagcaatgcctgcgagaaaacttcattcaccttcctccggcaggagctgcccgtgcgcctggccaacatcatgaaagagatcaacctgcttcctgaycgggtgctgagcaccccctcagtgcaactggtgcagagctggtatgtccagagtctgctggacatcatggaattcctggacaaggaccccgaggaccaccggaccctaagccagttcactgatgccctggtcaccatccggaaccggcacaatgacgtagtgcccaccatggcacagggagtgttggagtacaaggacacctatggtgatgacccagtctccaaccagaacatccagtactttttggaccgcttctacctcagccgcatctctatccgcatgctcattaaccagcacaccctcatctttgatggcagcaccaacccagcccaccccaaacacattggcagcattgatcccaactgcagcgtgtctgatgtggtgaaagatgcctatgacatggctaagctcctgtgtgacaagtattacatggcttcccctgacctggagatccaggaagtcaatgccaccaacgccacccagcccattcacatggtctacgtcccctcccacctctaccacatgctctttgaactcttcaagaatgccatgcgggccacagtggaaagccacgagtccagcctcactctccctcccatcaaaatcatggtggccctcggtgaagaagatctgtccatcaaaatgagtgaccgaggcgggggtgtccccttgaggaagatcgagaggctcttcagctacatgtactctacagctcctacaccccagcctggcactgggggtaccccgctggctggctttgggtatggactccccatttcccgcctctacgccaagtacttccagggggacttgcagctcttctctatggagggctttgggacagatgctgtcatctatctgaaggccctgtccacggactcagtggagcgcctgcctgtctacaacaagtctgcctggcgccactaccagaccatccaggaggccggtgactggtgcgtgcccagcacagagcccaagaacacatcgacgtatcgggtcagctaggggccttctcttcctggcacctgggaggatgctgccacctctgaatccagccaccacagggacttccctatctatcccctggggtacgggggtgaaactgggtctccccgatggccagatctgtctttgtagaaatcgcagtggcccatctgtggcgatccctaagtgccaatctgtctctatggagaaacctagggggtttccctggagcctggtctccatggtgatgatgcttgagggttggggacggctctacctggtggggtggccccagagacacttctcccaagaccagagctgtctgttttctaccagaaaccctggktccccctcactgcctgcatagtcctrgtctcccacgtggctgcctcgcttgccttatgcccacaccctgtacaggcacattgggctggtttcttcgtcagtagtaagaaagatggagagagmcksrskwrvckrkgbccaaccytgtvtcwgrwcmtksrgcstytytccatytccactytggacaytaaagttgccactgggaacttgagaatgggtgsccgttytcacccaaggcccaccgagaaggcctaagagtaacctgtccccaaggcgatcttagcaaygkywckrccgcttcytggcytggcatgtcctcacgtgtatacctcccytgcccagtntacgctcaccytatccctgcttgagctttagaccccagacttcmtatgcccactatgtgtgcacagrcgactcaaacccaggatgccccatgtacatagccagtktkgtaatytcagatgcctcacccttgccctccgcacacaggggttaaagccgtgtgcccctcccagtggctgggatggtgayagtgacatccacagtaaatagrtgaaatgwgraaaaaaaaaaaaaaaaaa

SEQ ID NO: 2832 - DNA, 2045 bp, Rattus norvegicus
atggccggttggcagagctacgtggataacctgatgtgcgatggctgctgccaggaggccgccattgtcggctactgcgacgccaaatacgtctgggcagccacggccgggggcgtcttccagagcatcacgccagcagaaatagatgtgattataggaaaagaccgggaaggtttctttaccaatggtttgactcttggaggaaagaagtgctctgtgatcagagatagcctatacgttgactcggactkcacaatggacatccggacaaagagtcaaggtggggagccaacatacaacgttgctgttggcagagctgggagagtcttggtctttgtaatgggaaaagaaggggtccatggaggcggattgaataakaaggcwtactcaatggcaaaatacttgagagactcttgggttctagctgctaggcagactgttaagtwttaggggamwttscycttaaattttccyagctgtaagcttaagtcttaattctggaaattttattagcaatgcagggtgatgggatatgaacctgtgtctcctttgtatccctctgttggtggggaaaggtgtctgtctttcttccccttccccttaaataattctgttcatttttgkytgtttccttgtgtactccagcattggttatagttatgggaaaggaaggtgtccacacaggcacaattaacaagaaaacatatgaactcgctttatacctgaagaggtctgatgtataagcagcctctcccatctacctacctatcaactgtcttcatcaccaccctaattatggtcataatgctaccagattgtagatggtagctagtttttccttccttattttctactgtcatgattcccaagggtcatttgtatgttagccactgtgtgcccaacccttatctggcatcgtgatcgcagcacaataatgatttgcatgatatcttgagattgggggargggggcatgccaagtcgggcatcacttcgtcttagcaattagtggaatactgattactaaaataagttaatattaagcaaggtgccggtgtacaatctctaatttgatcagtgtkttctcagcactttgagcatttacttagctcatttagtcttccttttgtagcgcatggttgskaggaaaaagtgcatgcatctgtacttcacacctttctcatcccctcccttcgaacatgaggcgtttggtttgcttccattctctttgtgtagtgcctggkttatttaacctaatcaatacctsctckctgagctgtgagagtykcagtgatttactttgatacastgaktgcacttgggacacactgtttgtagtgtcaatagcacgtgatgagtgcagctgtggagagaaaggcacttmctyccatgaccttactacagtaaccataccgatcaaattcccagggacwttcgatcattgcagtagctcagacttcttgkcttttctttgcacaccagctgtactcttgagtaaaatkgtaaaaggctgscattatggatattaggtaacccrrcayravsatctggagtgtgysmagtttatttttcmtmrswyywwtttttwtttgcagmttadgktyttatatgaagwtgcwttattgtggactkggstkkcykgtgatgkatttttttcatatgtatcctgtgscatactawtgttaaaatgaaskgttgytattgtgaratggaatttctttcgaatggcavwactttaggramawtmkarwatkkgctkskattgkttgggcattgtggataatgtacagatttaaaaacaaatcttgktgstgatttgtccatttctttccctgcactttgttacatctgggawacagtctaacycatctgatttaatatgcatttaaaaaaatgccataactattaaacmccttgtttacagacagatgaaatwmatttattccmmccmmrwaaaaaaaaaaaaaaaarwrarcktgcsgccscamsctyrtkccctttagtgagggttaattttagcttggcactggccgtcgttttacaacg

SEQ ID NO: 2833 - DNA, 927 bp, Rattus norvegicus
ggtggctggtggagtgaagctttggtagacatggctcccaacgcgttggctcctgaaccggagcatcccgaaggcatccgggccgtgttgctggggcctcccggggctggcaaggggacccaggcacccaaattggctgagaatttctgtgtctgtcacttggccactggggacatgctgagagcgatggtagcttcaggctcggagctggggaaaaagctgaaggcgasmatggatkccggaaaactggtgaktgatgaaatkswcswggagctcattgrgaagaatktggrgactccttcctgcaaaaatggctttcttctagatggcttccyhckgaywgkgaakywggcyswmrwgcyyratgamytcrtgsayrrgrggaaagagaagctsgattcagtcatcgagttcagcatccaggactccctgctgatccggagaatcacggraaggctgattcaccccaagagtggccggtcctaccatgaggagttcaaccctccaaaggagsccatgaaagatgatatcactggggagcccytgatccgcaggtcagatgacaacgagaaagccttgaagacccgcctggrggcctaccacactcagaccactccgcttgtggaatactacaggaaacggggcattcaytgcgccattgatgcgtcccagacccctgacgtggtgtttgcargcakmskggcagcsttstccaaagccacatgtaaagacttggtcatgtttrtctaatgytgggtwtgaagkgcctcttttcttcctctctgtgaaaggaatggwgggtggtcatggttaggtaggtagaaggaacttcctttctcagacagcaaggdcaccttmtaatgtactgattaagcacttacktgmwrwrdmwmrwawaaaaacaaacaagaagtgttgtgcggccgc

SEQ ID NO: 2834 - DNA, 2177 bp, Rattus norvegicus
ccgccttggctacaaagactctgtttcaaaaagccaaaaagatgactatgattatctagctggataggaaagagcagcgcagtggcccacttaaaatagatcgtaaaagcttaattctttccgctctttttacttgacacagtggcaggagtcctcctaaacggtttccactaattttgtcctcacagctctattttagacgacttttcacaaagcgttcgtgctggcggcaacatctcaagcagaaccctgactctgcaagtcccccgcgtccatttcttgccctcaacccacagaatgacttgcccttacttgttatggcgactatccagctttgtgccaggagtctcgcggggtctgctgggattgggactttcccctcccacgtgctcacactggctaaagttctgaagctccagttcattggsackwkscttgctatakgwagcgactacagttagsgggwacctggcatccgggmccgcaccctacttcccagcagggtgtcacgctcccctgaagactggrtaastrwcatggagsrtkmwsagtcskmtrtgrkcayyragctcyctctgagtcaggagacattttcatgcttatggaaacttcttcctccagatgatattctgcccaccacagcgacagggtcacctaattccatggaagatctgttcctgccccaggatgttgcagagttgttagaaggcccagaggaagccctccaagtgtcagctcctgcagcacaggaacctggaactgaggcccctgcacccgtggmccctgcttcagctacaccgtggcctctgtcatcttccgtcccttctcaaaaaacttaccaargcaactatggcttccacctgggcttcctgcagtcagggacagccaagtctgttatgtgcacgtactcaatttccctcaataagctgttctgscagctggcgaagacatgccctgtgcagttgtgggtcacctccacacctccacctggtacccgtgtccgtgccatggccatctacaagaagtcacaacacatgactgaggtcgtgagacgctgsccccaccatgagcgttgctctgatggtgacggcctggctcctccccaacatcttatccgggtggaaggaaatccgtatgctgagtatctggacgacaggcagacttttcggcacagcgtggtggtaccgtatgagccacctgaggtcggctccgactataccactatccactacaagtacatgtgcaacagctcctgcatggggggcatgaaccgccggcccatccttaccatcatcacgctggragactccagtgggaatcttctgggacgggacagctttgaggttcgtgtttgtgcctgtcctgggagagaccgtcggacagaggaagaaaatttccgcaaaaaagaagagcattgcccggagctgcccccagggagtgcaaagagagcactgcccaccagcacaagctcctctccccagcaaaagaaaaaaccactcgatggagaatatttcacccttaagatccgtgggcgtgagcgcttcgagatgttccgagagctgaatgaggccttggaattaaaggatgcccgtgctgccgaggagtcaggagacagcagggctcactccagctacccgaagaccaagaagggccagtctacgtcccgccataaaaaaccaatgatcaagaaagtggggcctgactcagactgacagcctctgcatcctgtccccatcaccagcctccccgtcccctcctttcttgccattttatgactttagggcttgttatgagagctgacaagacaatgctagtcccttcactgcctttttttaccttgtagatagtactcggccccctctatgcaaactggttcctggcccagattggggaatgggttggtagttgctgggtctctgctggtccagcgaaatcctatccggtcagttgttggacctggcacctacagtgaaatttcaccccaccccaccgcctgtaagattctatcttgggccctcatacgatctgtatcctccggacccatttcctccactctgcaaagcctgtctgcatttatccatcccccacccctstccctctttttatctckttttatatatccaatttcttattttacaataaacttttgttaccacttgaaaaaaaaaaaaaaaaaa

SEQ ID NO: 2835 - DNA, 4162 bp, Rattus norvegicus
ctgcaggtcgacggtatcgataagcttgatatcgaattcccaaagtttacagtcagttctttttgccatcacccctctcctccwgggccatcaatataaagataatcccacagctgcactttcgtaacaggcagaatctgtgtcttgagggcagtcctaggaaggcatgggtcttagatcctcaacagtcagtcatggccttagtctggtatrccctgggaagctactaccttactgttcctcaagaggcaggtataaggataccttacctttcatcttcacttcctgggaagagttttgactggctgatttccagtttgtgataatgttttgtctcaaagtacattttccttggaaatcacctacatgttccactcttgccatcttttttccttgtgaccttggcacaggcttcagcctctcctttctttctgttctcccagctatactatcattatacttctggctctcttgagcctggtcacacacagtctgttcagagacttagctgcttgttttatcgtcattcttctgaaagcaaaggttttgaagaaattattttaaatgacaacttttccttccctattgtgtttccagggcaagagaaaaaatgctttttttgcttgaagagggaaggaaagattccatggtcaaggccaactaacagtgagtgttgggtggggcatgtttggtaatatagcaagtagggtttatgatccagwtccccctcctcaccagggctaccatttcacatgacatttcacatgctcaggctgaggtacgatacatttaaatggacccaaggacaatttgggaggatttaaggacccctccacttaatttccacccacaatttacatttcatgattcatttatatcaaaatgaaattctagagaagctttggtggggggagatgagagagaaagaaaaaaaacaattggaagtgaaaagacagaaagagaagatggagtccttaaagaagggagtatcccaaaggaggtgggacaaggggaggagaaggggaggaggagaggaggaggaaagtgagcctgtctctttaagggggttggctgtcaatcagaaagcccttttcattgcaggagaasabkasraagatactcakagagaaaaagtaaaggacagaakaaggagactggwgagaccaskakbcttccagctgaacaaagtcakccgmaaaamaractakccagcaggctgcaattggwgccasagtgccaaaracatgggtkwgttaragtgctgtgctagatgtctggtaggggccccctttgcttccctggtggccactggattgtgtttctttggagtggcaytgttctgtggatgtggacatgaagctctcactggyacagaaaagttaattgagacctatttctccaaaaactaccaggactatgagtatctcattaatgtgattcatgctttccagtatgtcatctatggaactgcctctttcttcttcctttatggggccctcctgctggccgagggcttctacaccaccggcgctgtcaggcagatctttggcgactacaagaccaccatctgcggcaagggcctgagcgcaacggtaacagggggccagaaggggaggggttccagaggccaacatcaagctcattctttggagcgggtgtgtcattgtttgggaaaatggctaggacatcccgacaagtttgtgggcatcacctatgccctgactgttgtatggctcctggtgtttgcctgctctgctgtgcctgtgtacatttacttcaatacctggaccacctgccagtctattgccttccctagcaagacctctgccagtataggcagtctctgcgctgatgccagaatgtatggtgttctcccatggaatgcttttcctggcaaggtttgtggctccaaccttctgtccatctgcaaaacagccgagttccaaatgaccttccacctgtttattgctgcatttgtgggkgctgcagccacactagtttccctgctcaccttcatgattgctgccacttacaactttgccgtccttaaactcatgggccgaggcaccaagttctgatctcccatagaaatccccctttgtctaatagcgaggctctaaccacacagcctatagtgttgtgtctcctgtcttaactctgcctttgccactgattggccctcttcttacttgatgaskakracaagaaaggagagtattgcagtgattaatctctctctgtggactctccctcttatgtacctctttcagtcattttgctccacagtgggctcctgctagaaatggggaatacctgagaaggtgattcccccgctgcaagtcgcagaggaatgaaagctctaattgagtttgcaagcatctcctgaaggccaggatgtgcttccttctcaaagggcacttccattgaggaaaacaaagtggaaagaaagattctcaggtagaaagcaggaatgtccttggtctccttgccatcagtaggagtcaaatatattctctttgatgcacaaaammaaraamwmamwcttttcttcctagttccactgaagacagaaggaaataagcaatagcatttgcccaaatctgcctcctgcagctaggagaagggggtcaaagcaaggatctttcacccttagaaagagagctctgacgccagtggcaatggactatttaagccctaactcagccaaccttccttacagcattagggagcacagtgtctatttagacaaagtggggcctggaggaggggggcctcatctgtccttacagctcattaggaagagaaacagagtgttgtcaggatcgactcactcccttctccctgataacagctaccatgacaaccttgtggtttccaaggagctgagaatagaagggaactagcttatataaaataagactgtgacctaaggagcatcagttgggggatgctaaaggtgtaaattgagatgccctctggcagatgcaaaacacttaactctttggatagcatctccccccaccccatcagttgtgtcctcttggcctctggcacaatatcttcacaatggtgctcttttccttgggttttatccattcacttacagcaggtgattagaggattttgattagtttcagaatgaytcctgtttcatatttcccagttgtttatctcttgtttggagctgtaccagaaagaactggagaatgattctttgagcttagttctttttcaaaagaaaaaagaaaaactggacagtaagcatcacaaaaatatttgaaattgtgtagtcccatgaaatgattgggattttccccaagtattctaccttttgtagaactaggcttggtaaatttgaacctccatttgaataacctgtccaatattttcttttctaataaatgacagatgattttgcttgctaatattatctcagcattttgaaagtttaggcttagcatagaggttattgtgtcttggtatatataggtcacataatagatttcagcaactgccagctgtttagttggtgagcttccagagagctctggagacatggtgaggacagacagaattggwaacctgaagaactcccagatttcaggcttatcctgtacttgttaactttgggtgaaagaaagaaaagcaaagaaagaaaggwaaagcctctgatctgtttttamtgaaggaaaagttactgtagattttttttttttgtagatttgkgctgtcattccccaaagtgcttttgtcatgttgaaaragatataaggatttagaagaagatacttkagacttgttcttggsccagtatataaggtaaactagcaggatgcvcagtagtgaggagagcttaaaggacctggaagaamccaatcaagataaaggaaggtgaaataatctatatcttttatttggtttgattttaatatcataacagataaccamccactccctgaaaacctcacacgtatatatacacacacgcatgcacatacaaagagagttaatcamctgcragtgtttccttcatttctgawatagaattttgattttaacaacataaaggrtraactcttagaaactcatcttacaamatgtmttttataaaattaaagaaaataaaattaagaatgttctcmrycaaaaaaaaaaaaaaaaa

SEQ ID NO: 2836 - DNA, 4005 bp, Rattus norvegicus
cacgagggttmgtawgsagagawsgycsttyaraaaggcagatgtccctttaaggtttgctttgctgctgcccgtggactttagcctaaacagggtcccgcgaagttggctttatttgtccatgtctcggacacagcctgggtagctgccagtgagatttcagggacggagcgcgcaaaggggggggaaatgtggcaatccatctgggatgtgagacgcgtggagagggcttagcagcatttgaccaaaacacaggaaatcactcctccacagctcctgggcgcagcagcggctggggccactgccggacaccctcggagaccacacgagtgacccagagcgcaagtcgccagcgtcccggttctgcctgttcctgccagctcctgcccacgaaccggcacgtagctggttccagcagccgctccagcaatggtccccaggcgtcctgccagcctagaggtcactgtagcctgcatatggcttctcacggtcatcctaggcttctgcgtctccttcaatgttgatgtgaaaaactcaatgagtttcagtggcccagtagaggacatgtttggatacactgttcaacaatatgaaaacgaagaaggcaaatgggttcttattggttctcctttagttggccaacccaaagcaagaactggagatgtctataagtgtccggttgggagagagagagcaatgccttgcgtgaagttggacttgccagttaacacatcgatccccaatgtcacagaaataaaggaaaacatgacatttggatcaactttagtcaccaacccgaatggaggatttctggcatgtgggcccttgtatgcctatagatgtggacatttgcattatacaactggaatatgttctgatgtcagtcctacatttcaagttgtgaactcctttgcccctgtacaagaatgcagcacccagctggacatagtcatcgtcctggatggctccaacagcatctacccctgggaaagtgtcatcgcctttttaaacgaccttcttaagaggatggatattggccctaagcagacacaggtcgggattgtacagtatggagagaatgtaacccatgagttcaacctcaataagtattcatccacagaagaggtccttgtcgcagcaaacaaaataggccgacagggaggcctccaaacgatgacagcccttggaatagacacagccaggaaagaggcattcactgaagctcggggtgccaggaggggagttaaaaaagtcatggttattgtgaccgacggagaatcgcatgacaactatcgcctgaaacaggtcatccaagactgcgaggacgaaaacattcagcgattttccatagctatccttggccactataacagggggaacttaagcactgaaaaatttgtggaggaaataaaatcgatcgcaagcgagcccacggaaaagcacttcttcaatgtctcggatgagttggccctggtcactattgttaaagctctgggagaaaggatattcgctttggaagcgacagctgaccagtcagcagcttcatttgagatggaaatgtctcagactggcttcagtgctcactactcccaggactgggtcatgcttggagcggtgggagcctatgactggaacggaactgtggtcatgcagaaggctaaccagatggtcatccctcataacaccacctttcaaactgagcccgccaagatgaacgagcctctggcttcttatttaggttacacagtgaactcggccaccatccctggagatgtgctctacatcgctgggcagcctcggtacaatcatacgggccaggtcgtcatctacaagatggaggatgggaacatcaacattctgcagacactcggcggagagcagattggttcctactttggtagtgtcttaacaacaattgacatcgacaaagattcttatactgatctgcttctcgtcggggcccccatgtacatggggacagagaaagaggaacagggcaaggtgtacgtgtacgctgtgaatcagacaaggtttgaatatcaaatgagcctggaaccaattaggcagacctgctgctcatccctgaaggataattcatgcacgaaagaaaacaagaatgagccctgcggggcccgcttcggaacagcaattgctgctgtaaaagacctcaacgtggatggatttaatgacgtcgtgattggagctccgctggaagatgaccacgcaggagctgtgtacatttatcatggcagtggcaagaccataagggaggcgtatgcacaacgcattccatcaggtggggatggcaagaccctgaaatttttcggccagtctatccacggagagatggatttaaatggtgacggtctgactgacgtgaccattggaggccttggtggagcagccctcttctgggccagagatgtggctgtagttaaagtgaccatgaattttgaacccaataaagtgaatattcaaaagaaaaactgccgtgtggagggcaaagaaacagtgtgcataaatgctacaatgtgttttcatgtgaaattaaagtctaaagaggactcaatttacgaggctgatctgcagtaccgtgtcacccttgattcactgaggcagatatcacggagctttttttctggaactcaggaaaggaagattcaaagaaatatcaccgttcgagaatcagaatgcatcaggcactccttctacatgttggacaaacatgactttcaggactctgtgagagtgactctggattttaatctcactgatccagaaaatggtcctgtacttgatgacgctctgccaaactcagtccacgaacacattccctttgccaaagactgtggaaacaaggaaagatgcatttcagacctcactctgaatgtgtccaccacagaaaagagcctgctgatcgtcaagtcccagcatgacaagttcaacgttagcctcaccgtcaaaaacaaaggagacagtgcgtacaacaccaggacagtggtgcagcattcaccaaatctgattttttcgggaattgaggagatccaaaaagatagctgtgaatctaatcaaaatatcacttgcagagttggatatcctttcctaagagcaggagaaacggttaccttcaaaataatattccagtttaacacatcccatctctcggaaaatgcaatcattcacttaagtgcaacaagtgacagtgaggagccccwsgarkctcttaatgataatgaagtaaatatttccatcccagtaawatatgaasttggactgcagttttacagttctgcgagtgaacatcasatttcagtcgctgccaatgagacgatccctgagtttattaactccactgaggacattgggaatgaaattaatgtcwtctakacgattagaaagagggggcatttcccaatgccagaacttcagctgtcaatttcattccccaatttgacggcagayggttatcctgtactgtacccaattggrtggtcakcttcagataatgtgaactgtakaccccggagccttgaggacccctttggsatcaactctgggaagaaaatgacaatatcgaagtctgaggttctcaaaagaggcacaatccaggactgcagtagtacgtgtggagttrccaccatcacgtgtagcctccttccttccgacctgagtcaagtgaatgtctcgctcctcctgtggaaaccgactttcataagagcacatttttccagcttaaaccttactctaagaggagaacttaagagtgaaaattcatcgctgactttaagtagcagcaaccggaagcgagagctggctattcagatatccaaagacgggctcccaggcagagtgccgctgtgggttatcctcctgagcgccttcgcggggctactgctgctaatgctccttatattggctctgtggaagattggattcttcaaaagrccactgaagaagaaaatggagaaatgaaaggtttcatagaaaraaaaaaaaaaaaaaaaa

SEQ ID NO: 2837 - DNA, 10259 bp, Rattus norvegicus
agactcttccctgaagctgccgggctaaggctaaggccagagccaatgcctccatgaggggctccctcccacaccccggggccagaggaccctctgccaccagagtgagatcctcgagaccatcatcctagtcaaccccagtgcagacagtatcagctcagaggttcaccatcttctcagcagcccatcagctcacaaactcctgatcctgagtggacaaactttagaacctgagggagaccttatcctacagagtggtacctactcatatcaaaactttgcccaggtccttcacaaacctgagattgcccagttgcttagcaacagagacccggagatccaggccttcctcactgtttcctgcttaggggagggtgactggagccacctgggactgtccagttcccaagagaccttgcacctccggctaaatcctgagcctgtgctacccaccatggatggtgtggctgagttctccgagtatgtctctgagactgtggatgtgccatccccctttgacctgcttgaaccgcccacctcaggaggcttcctcaagctctctaagccttgctgctacatctttcctggtggccgtggggactctgctctctttgctgtcaatggctttaacatcctggtggatggcggttcggatcgcaagtcctgcttctggaagctggtgcggcacctggaccgcatcgactccgtgctgctcacacacattggggctgacaatctgccgggcatcaacggcctcctgcagcgcaaggtggcagagctagaggaggagcagtcccagggctccagcagctacagcgactgggtgaagaacctcatctcccctgagcttggagttgtgttcttcaacgtgcctgataagctccggctgcccgacgcctcccgcaaggccaagcgcagcattgaagaggcctgtctcactcttcagcacttaaaccgcctaggcatccaagccgagcctctgtatcgtgtagtcagcaacaccatcgagccactgaccctcttccacaaaatgggtgtgggtaggctggacatgtatgtcctcaaccccgtcaaggacagtaaggagatgcagttcctcatgcagaagtgggcaggcaatagtaaagccaagacaggcattgtactggccaatgggaaggaggcagagatctctgtcccctacctgacctccatcactgctctggtggtatggctcccagccaaccctactgagaagattgtgcgtgttcttttcccgggaaatgctccccagaacaagatcttggagggcttggaaaagcttcggcacctggactttytgcgctaccctgtggcaacgcagaaggacctggctgctggggccgtgcccsccaacttgaaacccagcaaaatcaaacatcgggctgacagcaaggagagcctcaaagctgctcccaagacagcagtgagcaagctggccaaacgggaggaagtgttggaagaggggsccaaggaggcccgctcagagctggccaaggagttagccaagacaraaaaraaarmaaaagaaccgtctgagaagcccccagaaaaaccctccaagtccgaaagggtgaggggcgagtccagcgaagcgctgaaggccgagaaacggaggctgatcaaggacaaggccggcaagaagcacctgaaggaaaagatttcaaagctagaggagaagaaggacaaggagaaaaaggagatcaagaaggaaaggaaggagctcaagaaggaggaagggaraaarraararaaaaaggwtgccaaaaarramraaaarargaaagataccaaaccagaggtcaagaaactctccaagccagacctgaagccttttacccctgaggtccgtaagaccctctacaaagccaaggcccctggcagggtcaaggtggacaaaggccgagccgcccgtggagaaaaggagttgtcttctgagccccggacacccccagcccagaagggggctgctccgcctgcagctgtcagtgggcacagagagttggccttgtcctcaccagaggacctcacacaggactttgaggagttgaagcgtgaggagagaggtttgctggctgaacaaagagatacggggctgggtgagaaaccactccctgcagatgccacagagcaggggcacccgagcgcagccatccaggtgactcaaccctctggccctgtgctggagggagaacatgtggaaagggagaaagaggtagtcccagactccccaggggataaagggagcacaaacagaggcccagactctggggctgaggtcgagaaagagaaagaaacctgggaggaaaggaagcagagagaagcagagctgggcccagagaacactgcggccagggaggagagcgaagctgaggtaaaggaggatgtgatcgaaaaggccgagttagaggaaatggaggagactcatccttcagatgaggagggggaagagacaaaggctgagagcttttatcagaaacatacgcaggaagccctaaaggctagcccaaagagcagagaggctcttggcggccgggacctggggttccagggcaaggcacccgagaaggagacagcatcattcctaagcagttyggccacacctgcgggagccactgaacacgtctcttacattcaggatgasacaatccctggctactcagagactgagcagactatttcagatgaggagatccatgatgagccagatgaacgcccagcgccgcccagatttcctacgagtacctatgacctctctgggcctgaaggtcctggcccctttgaagccagccaggctgcagatagtgctgttccagcctcctcgagcaaaacttatggggcacctgagactgaactcacctaccctcccaacatggtcgccgcccctctggctgaagaggaacatgtgtcctcagccacgtcaatcaccgagtgtgacaaactctcttcctttgccacatcggtggctgaggaccaatctgtggcttcactcacagctccccagacggaggagacaggcaagagctccctgttgctcgacactgtcacgagtatcccctcttcccgcactgaagccacccagggcctggactatgtgccgtcagstggtaccatctcccccacctcttccctggaagaagacaagggsttcaagtcaccaccctgtgaggatttctctgtgaccggggagtcggagaagaaaggagagactgtggggagaggcttgagcggggagaaggctgtggggaaggaggaaaaatatgtagtgacgtctgagaaactgtccggtcagtatgctgctgtgtttggtgcccctggacacaccctacccccgggggaaccagccctcggagaagtggaggaacggtgcctcagyccagatgacagcacggtgaagatggcttctcctccaccatctggcccacccagtgctgcccacacgccctttcaccagtctccagtggaagacaagtctgagccgcgagactttcaggaagattcctggggagaaacaaagcattctccaggtgtgagcaaggaagactctgaagagcagacggtgaagccagggcccgaggagggcacttcagaagaggggaagggacctcctaccaggagcccccaagcccaggacaygcctgtgagcattgctssksgtsagactggctgtactatccaactcttaccagaacaagacaaagccatagtgtttgagactggagaggcaggttcgawtctmggagcagggaccctccctggagaagtgaggacatcaactgaagaagccactgaacctcagaaagatgaggtacttcgctttactgatcaaagcctttcccctgaagatgcagagtctctgtctgtcctcagtgtggtctccccagacactaccaaacaagaggccactcccaggtctccctgcagcctgaaagagcagcagccgcacaaagacctttggccaatggtgtctccagaagacacccagtcactttctttctcagaagagagtcctagcaaggagacctctctggatatctcttctaagcagctctctccagaaagccttggcaccctccagtttggagaactgaacctaggaaaggaagaaagggggcctgtgatgaaggcagaagacgactcttgccacctagctcctgtgtctattccagagccacacagggccacagtgtcacctagcacagatgagacccctgctgggactttacctggtggctctttttctcactctgcactgtcagtcgataggaagcactcacctggggagatcacgggccctggtggacactttatgacatctgatagctccctcaccaagagtcccgagtctttgtcaagtcccgccatggaagatctggccgtggagtgggaaggtaaagctccagggaaggagaaagaacctgagctaaagagtgaaacccgacagcaaaagggccagattctgccggagaaggttgctgttgtggagcaggacttgatcatacatcagaaagacggggctctggatgaggagaacaaacctggaaggcagcaggataagactccagaacagaaaggcagagacttggacgaaaaggacacggctgcagagctggacaaaggcccagaacccaaagaaaaagacttagaccgggaggaccagggccagagagcagggcctccagcagagaaggacaaggcctcagaacaaagggacacagacctgcaacagacccaggccacagaaccaagagacagagcacaagagcgcagagattcagaagaaaaggacaagagtttagagctgagagataggactcctgaagagaaagatagaatattagtacaggaagacagggctccagagcacagcatccctgaaccaacacagacagacagagctccagatcgcaaaggcacggatgataaagaacagaaggaggaggcctcagaagagaaagaacaggttttagaacaaaaagactgggccctaggaaaggagggtgagaccttggaccaagaggccagaactgctgaacagaaagatgagaccctaaaagaggacaaaactcagggacagaagagctctttcgtcgaagataaaaccacaacatcaaaagagacggtccttgaccaaaagtctgcagagaaggccgacagtgtggagcagcaggatggagccgccctggagaagaccagagctttggggctggaagagagcccagcagagggaagcaaggctcgagagcaggaaaagaaatactggaaggaacaggatgtggtccagggatggcgagaaacatctccaaccaggggagagccagtgggaggccagaaagagcctgttccagcctgggagggcaagtctcctgagcaagaagtccggtattggagggacagagacataacactacagcaggatgcatactggagggagctaagctgtgacaggaaggtctggttcccccatgagctagatggccaaggagcccgtccacggtactgtgaggaacgtgaaagcacttttcttgatgaggggccagatgaacaagaaataacccccctgcagcacactccccggagtccctggacctcggatttcaaggatttccaggagcccctgccacagaaggggctggaagtagagcgctggcttgctgagtcaccagttggcctrccmccmgaggaagmggacaaactgacacgctcgccctytgagatcatctcccctccagcatccccacctgagatgactggacagagggttccttcagctccaggacaagagagccctgtcccagacactgagtccacagcacccatgaggaatgaacctaccaccccttcatggctagctgagatcccaccttgggtacctaaggacaggcctmtgcctcctgcacccctctccccagctccagctcccccaacacctgccccagagccacatactcctgtgcccttctcctggggcttagctgaatatgacagtgtggtggctgccgtgcaggagggggcagcggagctggaaggcggccsatactccccactcgggaaggactatcgaaaagctgaaggggaaagggaaggagagggtggggctggagctcctgacagcagctccttcagtccaaaggtcccagaggctggtgagagccttgccaccagggacactgagcagactgagccagagcagagagagcccacaccctatcccgatgagagaagctttcagtatgcagacatctatgaacagatgatgcttactggactgggccctgcttgccccaccagggagcctccactgggggcatccggggactggcccccacacctctcaaccaaggaggaggctgctggctgcaatacttctgcagagaaggagacttcctcccctgcctcgccccaaaacctccaatctgacactccagctttcagctacgcatctctggcaggacccgctgtacctcccaggcaagaaccggatccaggacccaatgtggagcccagcatcacccctcccgcagtgccccctcgcgcccctatctccctgagcaaagacctgagtccccctcttaatggaagcactgtgagctgcagcccggacaggaggaccccatccccaaaggaaacgggccgaggtcactgggatgatggtaccaatgactcagacctggagaagggggcccgggaacagcccgagaaagagactcggtccccaagtccccatcaccccatgcctatgggccactcctcactgtggcctgaaaccgaggcatacagcagcctttcctcagactcacacctaggatctgtccgtccaagtctggacttccctgcttcagcctttggcttctcctccttgcagcctgctccccctcagctgccctctccagctgaaccccgctccgcaccctgtggctcacttgccttctctggggaccgagctctggccttggttccaggaactccaaccagaacccgacatgatgagtacctggaagtgaccaaggcacccagcctggattcctcactgccccaactcccatcacccagctctcctgggggccctcttctctctaacctgcccagacctgcctcgccagccttgtctgaagggtcctcttctgaggctaccacgcctgtgatttcaagtgtggccgaacgcttccctccaggtctcgaggcagctgaacagagtgctgaaggactgggctcaggaaaagagtcggctgcccacagcctctgggacctcactcccctgagcccagctccctcagcttcactggacttggctccagctccagctccagctccagctccagctccaggcctgcctggagacttgggcgatggtaccctgccctgccgccctgagtgcacaggggaactcaccaagaagccaagccccttcctgagcccctctggagatcatgaagccaatggcccaggagaaaccagccttaatcccccagggtttgtcacagccacggcagaaaaagaagaggctgaagcccctcatgcttgggaacgagggtcctggcctgagggagctgagaggagctcccggccggatacacttctctcatctgagcagccactgcgtcctgggaagagctccgggggcccaccctgcagtctttcttctgaagtcgaggctggacctcagggatgtgctacggatccccgcccccactgcggggagctttccccctcattcctgaaccctcctctgcctccatccacagatgacagtgacctttccacggaagaagctcggctggcaggaaaaggagggaggcgacgggtagggaggccaggggccacgggaggtccatgccctatggctgatgagacaccccccacatcagccagcgactcaggctcctcacagtcagattctgatgtcccaccagaaactgaggagtgtccatccatcacagctgaggcagccctcgactcagatgaagatggggacttcttgcctgtggacaaagctgggggagttagcggaactcaccatcccagacctggccatgacccacccccaacccccctaccagacccccgcccatcccctccacgaccggatgtttgcatggctgaccctgaggggctcagctcagagtcggggagggttgagagactacgagaaaagggacgacctggccgtagggcccctggccgggccaagcctgcatctcctgctaggcggttggatattcggggaaaacggtcacctactcctggcaaagggcctgtagatcgaacatctcgtactgtaccccgaccacggagcactccaagccaggtcacctcagcagaagaaaaggatggtcacagtcccatgtccaaaggcttagtcaatggcctcaaggcaggatcaacagccttgggctccaagggtggttccggccctcctgtgtatgtggatcttgcctatatcccaaatcactgcagcggcaagactgcggatcaggacttcttccgccgagtacgtgcgtcctactatgtggtcagtggaaatgaccctgccaatggcgagccaagccgggctgtgctggatgccctgctggaaggcaaggcccagtggggggagaaccttcaggtgactctgattcccactcatgacacggaggtgactcgtgagtggtatcagcagacacatgaacagcagcagcagctgaatgtcctggtcctggcgagcagcagcactgtggtgatgcaggacgagtcctttccagcctgcaagattgagttctgaatgacccatgctcccttccccaaggatccactcctacagttcatttagagaatggctactgctgagtcctctggggttgagggaagtagagctgggcaggggccatgtcatattattaggctaagcggaaggtcctgtccttcccctcctctctccctgggggtttcaaaaccaaaggcaatgagggggcatacaaaatcatgaaaggttatctgatgcccaaaaacccctagagccactccctctcctagcactgccaaatgctggtcttgcacgaggatgggtttcagacagcacactcctccccatggaggaagatttaacaccctctcccccagaacctcattatttatttggcattccagaaaggattgctgataatgtatatgatgcagggaaggccactgttagtaaggtgccagagctgcgcccttttttccatctcccagtccctagccaccagagtctgggttccatcagcgacctggggacatgtggctactatactgtcttattgcttccctcaatatctgaatgtctcaatccaaaacttgaagctctttagaccaagaactagggagaggaaaaaggagctcatctctcagcccctgcttcaaaccacttacagccttgggctgtacccagaccaggctacctgggcagcacaacgggcaaggagagcccccaaccccagtcgctccaagcacccctatcacttagtcttcacctaccccatttcaataagcctcattccttctcatcccctgcttggcttctctgcatgtggtcatctgctatggcctggtgtgtaatgggtttaaaaaaagccactgcctgacatccacatccactttarsmatkygksacwssstcaacatyscaatcctctmccatcctgcagctgaaatgggaacactggctgcctctctaaacctaaactcytggatagagtttctgggaggtggaggctggactagagacctggggagggggatgggagggasgaggggagagaagagaagargcwmtagkttaactccyccagagtsaagmcmggmtgagcatthtaytacaggacagggcctcaccccaagcaagccagtgagcagcccagccagaccstgstggaytgagaaacccakctgctgacakaccctgggacttgccttytttgccaagtcaaggggaawccaaaaggagcttccctcmtattmttcctagctcccctccctgccctggctctgctcctccccacacttccctgctacagtcccagttgctgtaacagccacctccactctaacaataaaccaagttcattgcgrwmmrrwrwarwrmwrmwwaggttttcccagactcctccctacagtaagctgtcccggatcccattcctccgtttcagttagcagttatcttggaagactcttgattattcaaacccattccaggacccaggagagccaacacgcgtgagaggagg

SEQ ID NO: 2838 - DNA, 2951 bp, Rattus norvegicus
cagcgtgctgaagccggagcgagagcgctgttgctgacccagctgagcccagctcctaggacgccagccctcgaccatctttcatactccagccacggaacggagccagggcagacgggtccggattttccccctgccccgaccctcctctccacctcccgccgtcgtgacaccggctgggggcgacaggaggcactgggtacccagaacgaggattgcgagcgttctctgaccatttgcacgaccccagagattgccacatctttcttgttctctgctaaacgtttctcttcggagtctctggcagcccgttggtcatgaaaaccttcacgttgccagcatccgtcctcttctgcttccttctactcatccgggggttgggagcagcaccccccgggcgctccgatgtttatcctcctcccctcggctctgagcataatgggcaggtagctgaggacgcagtgtcccggccaaaggatgacagcgtcccagaggtccgagcggctcggaattccgagcctcaggaccagggagagctcttccagggcgtggatccccgggcgctggccgcggtactgttgcaggcactggaccgtccggcctcgcccccggctgtcccggcaggttcccagcagggaacacccgaagaagcagcagaagctctgctgaccgagtccgtgcgcagtcagacccatagcctcccggcatcagaaatccaagcgtccgctgtggcgccccctcgccctcagactcaggacaacgatcccgaggcagacgaccgctcagaagagctggaggcactagcatccttgctccaagaacttcgagatttcagtccgagtaatgctaagcgccagcaagagacggcggcagcagagactgaaacccgcacgcacacgctgacccgagtcaatctggagagccccgggccagagcgcgtatggcgcgcttcctggggagagttccaggcgcgcgtcccggagcgtgctcctctgccgccctcggtcccttctcaattccaggctcgaatgtccgaaaacgttccccttcccgaaacccatcagttcggggaaggagtgtcctcccctaaaacacatcttggtgagactttgacacccttatccaaggcgtaccaaagtctaagtgcccccttccccaaggtgcgtcggctcgagggctcattcctgggcggttccgaggcaggagagcgcctgcttcaacaagggttagctcaggtagaggcagggaggaggcaggcggaggccacccggcaggccgcagcgcaagaagagcggctggccgatctcgcctccgacctgctgctccagtatttgctgcagggcggcgcccggcagcgcgatctcgggggtcgcgggctgcaggagacgcagcaagagcgggagaacgagagggaggaggaggcggagcaggagagacgcggtggtggggaggacgaggtgggggaagaggatgaggaggcggcagaggcggaggcggaggcagaggaggcggagagggcgcggcagaacgcgctcctgttcgccgaggaggaggacggggaagccggagccgaggacaagcgctcccaggaggaggcgccaggccatcggcggaaggatgctgaggggacagaggagggcggggaggaggatgacgacgacgaagagatggatccgcagacgatcgatagtctcattgaactgtccaccaaactccacctgccagcagacgatgtggtcagcatcatcgaagaggtggaggagaaacggaagcggaagaagaacgcccctcccgagccggtgccgccccccagggctgccccagccccgacccatgtccgctccccgcagcccccacctcccgccccggcccgggatgagttgccggactggaacgaagtactcccaccctgggatcgggaggaggatgaggtgtttcccccggggccctatcaccccttcccaaactacattcggccgcggacactgcagccgcccgcatcctcccgccgccgtcacttccatcacgcgttgccacctgcgcgccaccatcccgatctggaggcccaggccaggcgcgcgcaggaggaagcggacgcggaggagcgccggctgcaggagcaggaggagctggagaattacattgagcacgtgctgctgcaccgcccgtgacccgcccctgcgcgcccgctcccaactgcgcgcgccgccacgccccccctccgtgtcgctcctcctccctctcggtgtttgcatgcgccccggctccgcccctcggctgccgcccggccccgccccacaaggccccgccccgggttctgtcaggaccagacctgtcagacttctttggggtctgatcctggggccagcccaggcgggtgtgtggtttgtgcgagtccccttacacccccacttcctccaggggcctcgtccccatctagtttctctagcgacttcctggtcccaaacggggaaaagctgttctatttaatcgtgtgaagtgtctgtctcccagccttggggcccccggagcctcccttctccaaattgctgtgaacttacccacatcttgcccttctgttgtaaatacccctcacggaggaaatagttttgctaagaaataaaagtgactattttmttarramwwwrwwwwmmawwawwcacccgtccccttgggcctatctggtcctttccaaggggcggtgagggaagcgccagtctccctagtctcagaccaaagccagactgggtgggagaaaggagtgaaggtgaacctggaaagggaatgttctagtaaaaggtacacgttgccaagcaagacatgagtgtcataccagggtaccttcctactgaccactgcaagttctctccctgacttccacatgcccaccttggtacgctcacccacccacaaaacaaatgtaataaaaaccataacaaaaaaaaaaaaaa

SEQ ID NO: 2839 - DNA, 1964 bp, Rattus norvegicus
gattcggcacgagaggaagcgttgacgagggtagctgtgctggtgtgtgctgtcctgctgacatcctttagtaggatgctggggacactggggctttggacactgcttcctgcagctgcacaagtatccccaaacaggaggacctgtgtgttctttgaggctcctggagttcggggaagcacaaaaacactgggggaagtggtagatgcaggaccaggccccccgaagggtatccgctgcctctacagccattgctgctttgggatctggaatctgacccatggccgggcacaagtggagatgcaaggatgcctagacagtgatgaacccggctgtgagtccctccactgtgaccccgtcccccgagcgcaccccagccccagctccacactcttcacatgctcctgcggtaccgacttctgcaatgccaactacagccatctgcctccttcaggaaaccgaggggctcccggcccccaggagcctcaggctaccccaggtgggcccatctggatggcgcagctgctgctgggagtgttccttgtgctgctgctgagtatcatcatcttggccctgttacaacgaaaagcctgtagagtgcaaggtgggtcagacccggagccggagccaggctcaggaggagactgcagtgaggaactgcccgagttggctgagctgcgcttctcccaggtaatccaggaaggaggtcatgcagtcgtctgggctgggaggctccagggtgagatggtagccatcaaggccttccccccaagggctgtggcccagttccgagctgagcgagctgtgtaccagctgctaggcctacagcataaccacattgttcgctttatcactgctggccagggaggycctggccccttgccctctgggcctttgctggtactggaactgtaccctaagggctccttatgccactacttgactcagtacacgagcgactggggcagttccttgaggatggctctgtccctggccgagggcctggcgtttctccacggggagcgttggcaggatggccagtacaaaccaggtatcgctcaccgagacctgagcagccagaatgtgctcattcgggaagataggtcatgtgccatcggagacctgggccttgccttggtactccctggccttgctcagccccctgccttggcccctactcarccccgaggcccagctgccattttggaggctggcacccagaggtacatggctccggagctcttggacaagactctagacctgcaggactggggcacagctctccagagagcggatgtttactctctggctctactactgtgggagatcctgagccgctgttccgatttgaggcctgaccacagaccaccaccttttcaattggcttatgaggcagaactgggcagcaatcccagtgcctgtgagctctgggccctggcggtcgcggagaggaagcgccccaacmtcccttcctcttggagctgctctgscmyrgaccctagggggctgagggagctcctggaagattgytgggacgcagacccagaagcaaggctgacagctgagtgtgtgcagcagcgcctggcagccctggcttatcctcaggtggcttcctccttcccagagagctgtccacagggctgcccagagaactrccctgcagcgcctgcctmtgcrgctttcccctgcaggcctcagcagagttcttgtctcctcagtgttcagcaaggctctggctctaagtcctgagcctgtaagtgccactgttcaggtgtatgtaaatgagcagctcatatgaactctgtacaggctgacatgcgtgtggccgacatgcrtgtgtcgggtgtcagcctcatgcctgttgatgtcattctgtgtgggtttctaacccatcgggtagctatgctcaggaaagagaataaagcaagattcccactcaaaaaaaaaaaaaaaaaaaaaaaaaa

SEQ ID NO: 2840 - DNA, 2044 bp, Rattus norvegicus
  misc_feature (34)..(34): n is a, c, g, or t
  misc_feature (60)..(60): n is a, c, g, or t
  misc_feature (63)..(65): n is a, c, g, or t
  misc_feature (77)..(77): n is a, c, g, or t
  misc_feature (217)..(217): n is a, c, g, or t
  misc_feature (231)..(236): n is a, c, g, or t
  misc_feature (341)..(342): n is a, c, g, or t
  misc_feature (500)..(501): n is a, c, g, or t
  misc_feature (535)..(540): n is a, c, g, or t
ctaggtgcttctcaaccaggcctagtgacaggcnccacttcgccagcgcatctcagagcnctnnntcactgggtacnagcacctcgtctcggtgctggagaaggtgagtgggcctgggtgtcgccgccctgcagcctcaatttctatgcctgggtctccggaccgctcagggctgatatagaccttctgggccacaagccgggttagctgcggcggncgccaccgctgccnnnnnnctcgcgcactgccgcaagccggggtgcggggagacgaggttcagcacggccagggtgcggggatccggcccgggtttgggcagtggaccgaggaggcgggagccnncagccagcggaggggcgaggagcggaggagggaccgcaggggagaggagggagaaagaggaggggagcgaggcgagggggcggggagccgaggcgagaggcaggcggaccgtgggggaggcgactgggcaaggcgggatccaggcagtagagaggtgnnggcccggctgagtcgggagaaggctaccagactnnnnnngaagggcgagccagagctgccggtggggcggggcggggcggaagggtgcgaagcccggcacctgggcgcagatcacggcccggggagaccggccgcccaccggagaccgcagccgcccgccctccgctctgggatgtcggagcgatccaggcatccaggacgctgacggagcgagcccgaggatgggacggcgcccgcagctccgrcycsyrmaggymmkwctccttctggggctgaaccctgtgtccacctcccttcaggatcagcgctgtgagaacctgtccctgaccagcaatkttyctggcctgcagtgcaatgcatccgtggacctcattggcacctgctggccccggagccctgcgggccagttggtggtccgaccctgccctgcctttttctacggtgtccgctacaacacgacaaryaakgrmtaccgggagtgcctggccaacggcagctgggcagcccgtgtgaattattctgagtgccaggagattctcaacgaagagaagaagagcaaagtacactaccatgttgcagtcatcatcaactacctgggtcactgcatctccctggtagccctcctggtggcctttgtcckmkkcytgcgscycagkagcatccggtgcctgagaaacatcatccactggaasctcatctcggctttcatcctacgcaacgccacgtggtttgtggtccagctcaccgtgagccccgaggtgcaccagagcaakgtkgbcwggtrtaggttggtgacasccgcctacaattacttccatgtaamcaacttcttctggatgttcggtgagggctgctacctgcacacagccattgtgctcacgtactccaccgaccgtctgcgcaagtggatgttcgtctgcattggctggggtgtasctkkscccatcattgtggcttgggccattgggaagctgcactacgacaatgaaaagtgctggtttggcaaacgtcctggggtatacactgactacatctaccagggccccatgatcctggtcctgctgatcaactttatctttctcttcaacattgtccgcatcctcatgaccaaactccgggcatccactacatctgagaccattcasymyaggaaggctgtgaaggccactctggtgctcctgccccttctgggcatcacctacatgttgttcttcgtcaaccctggagaggacgaggtctccagggtcgtcttcatctacttcaactcttttctggagtcctttcaggrcytcyttgtgtctgtgttctactgttttytgwrcmgygaggtccgctccgctatccggaagaggtggcgtcggtggcaggacaagcactccatcagagcccgagtggcccgagctatgtccatccccacctccccgaccagagtcagctttcacagcatcaagcagtccacagcagtgtgagctccaggccacagagcagcccccaagacctgaggccggggagatgatgcaagctcactgacgagccagtctgc

SEQ ID NO: 2841 - DNA, 5604 bp, Rattus norvegicus
cgggcgggcttctcggggagctctgtgatgctctacatcgagcctgccggcagcatctctactggatcccacaggcatccaacgctggaggcctcgcggtatctcgggtgtcaacacaccggatgatggatctgtttgtccttccgtgacgcaatgccatgtagtccaacggcaagcatgtatgggatactgccattgtagggatccagggcctggagacggctctgctttggggaatcaggtgaggtgaccaaggaacaagaagcataccctcaccaatgacatcatgacagcaagagagcacagccctcgccatggtgccagggcccgtgcgatgcagcgggcttccaccattgacgtgacagccgacatggtgggcctctctctggcaggaaacatccaagacccagatgagcccattttagagttcagcttagcttgcagtgagcttcacactccatcgctagatcgaaaaccaaatagttttgtggctgtgagtgtcaccacccctccacaggcattctggacgaagcacgcgcagacggagatcatcgagggaaccaacaaccctatctttctgagcagcattgccttctttcaagactctctcatcaatcagatgacccagatcaagctgtcagtgtacgacgtcaaagacagatctcagggaacaatgtacttgctgggctctggaacattcgtggtcaaagacctgctccaggacaggcatcaccgattgcatctgacactgaggtctgcagagagtgaccgagtcggtaacataactgtgatcggctggcagatggaggagaagtcagaccagcagccccctgtgacccggtctctggacactgtcaatggcaggatggttttgcccgttgacgagagcttgaccgaggccttgggaatccgatccaaatatgcttctttgcgaaaagacagcttactgaaagcggtgtttggtggtgccatctgccgcatgtaccgcttcccaaccaccgatggcaaccacctacggatcctggagcagatggcagagagcgtcctctcgctgcacgtgcctcggcagtttgtgaagctcctgctggaagaagatgcagccagagtctgtgagttggaagagttgggggagctgtccccttgctgggagagcctccggcgccagattgtcacccagtatcagactattatcctcacctaccaggagaacctgactgacctccatcagtacaaaggtccttcgtttaaagcaagcagcttgaaagcagataaaaagttagaattcgttcccacaaacctgcacatacagaggatgcgagttcaggacgacggcggctcagatcagaactacgacgtcgtcactattggagccccagcagcacactgccaaggttttaagtcaggaggtcttcgaaaaaagctgcacaagtttgaagaggccaagaagcacagttttgaggagtgttgtacatcttctacctgccagtccataatctacataccacaggatgtcgtccgggccaaggagatcattgctcagatcaacaccctgaaaacccaagtgagctactatgcagaacggctctcaagggcggcgaaggacaggtctgccactggccttgagaggactctcgccatcttggcagacaagactcggcagttggtgactgtctgtgactgtaagctgttggccaactccatccatgggctgaatgcagcacggcctgactacatcgcttccaaggcctcccctacctcgactgaggaggagcaggtgatgcttcggaatgaccaggacaccctcatggccaggtgggcagggaggagcagccggtcttccctgcaggtggactggcatgaggaagagtgggagaaagtgtggctgaatgtggacaagagcctggagtgcatcattcagcgggtggacaagctgctgcagaaggaacgtctgcatggggagggcggcgaggatgttttcccctgttcaagcacctgttccagcaagaaagattgcagcccccctcctgaagagtcctgtccaggtgagtggagcgaggccctttaccctctgctgaccaccctcacagactgtgtggccatgatgagcgacaaggccaaggcagccatggtcttcctgctcatgcagacagctgcccccacaatcgcctcttacctcagcctgcagtatcgccgtgacgtcgtcttctgccaaaccctgaccgccctcatctgtggctttatcatcaagctgaggaactgcctgcacgatggtggcttcctacggcagctctataccatcgggctcctggcccagtttgagagcctgctgagcacctatggagaggagttggccatgttggaggacatgagccttgggatcatggacctgaggaatgtgacctttaaagtcactcaggccacttcgaatgcttctagtgacatgctgccagtcatcacaggaaaccgggatggctttaacgtgcggattcctctgccaggcccactgtttgactctctccccagagagatccagagcggcatgctgctgcgggtgcagcccgtcctcttcaacgtgggcatcaatgagcaacagacactggccgagaggtttggagacacatccctacaagaagtcatcaatgtggagagcctggtgcggctgaattcctactttgagcagttcaaggaggttttgccagaggactgtctacctcgatctcggagtcagacctgccttccagagctgctgcggtttctaggacagaatgtccatgcacgcaagaataagaatgtggacatcctctggcaagctgctgaggtctgtcgccgccttaatggggtccgattcaccagctgcaagagtgccaaggaccgcacagccatgtcggtgaccctggagcagtgtctgatcctgcagcatgagcacggcatggccccgcaggtcttcacacaagccctggagtgcatgcgcagtgagggttgtcggcgagaaaacacaatgaagaatgttggaagtcgcaaatatgcatttaactccctgcagctgaaggccttccccaagcattacaggcctccagaagggacttacggaaaagttgagacatgaacacacggtgtcctctaattagctgtcatgtaatcaatgtgggtccctctagtgtcacatacattcttcaagaagacctgaaggattggtttttatttctgtgtttttaaagacatgtcactggagagtccacggagcatgattttgtgctggaatctgtagggttacgtgtgggtcgatagcgtggatagaaagccgccctcaaccacagctttcagtgtaactgtacagttaatgtcatagttcctagaagatgccagctaggtctcatacactccagcaggctttctcaaatagccacttaggccctgctcaccccctttacctttctattcagtaactcacaagtgagcactgacttaaaatcttctttcaaaaagactgactataaagcaggaagtacctaacctgtgcacttcaggtcccaggtagagcagcaggtagagcagcaggtagagcagcaggtagagcagcaggtagagcagcaggtagattctgactcagtctgggggagaacctgcatgctatgacaggctggtgctcgtggccctaaaaggcaccaagctctgtgaaccgaaagtggaaggaaagcttggttggtacaccaggagctcacacacctggacccacactgttcctccccctcacaagtcatggatgagtgtctgcttaagatgtaaagccagtattgaggtcctggactctccccccaccccacccccaccccaccccacccccaccccaccccaccccggatgctccgtgtatgtttagccctacccacagggtgtttctccctttgttctccagcagtcaggaccttcaatgtggcttgtcaggtgtctggatttagggccagagagacagtagaaacttagatattttcaaagtagatgttcttctgggagcttcgtaatagtcttctagaagaccaataaatcatgtttgaatgtctagagaaagcatcttagtttctggtttgcaatgatggttacggtcccccttctgtttcacggctattgataaacagttgaaactgtcccctaccttgagagtctgagatgagattatggaacagggaatgagggattttgtagacactgtaatctgctcatcttttacaaggtgacggtgagtcttgtctgcacgtggcagattttttttccttagagatttatatgtttataagttctgttcaccgtaattctgtttacatgttatttaaaaggctgtaaaaagaaatgtatatgaactgtattcgtgacactgatactaatgacctgtaccaccatgggaactcgtaggcaagtctaggtagttttcttttggctcctttagaaaaacasstaacagcttggatctgaggcatttgaggtatcaataggaccagtcttggcaagagacagggagggtgcgggcatccctctaccccagtgtgcagacagcctcctgtctctggtgcctgctgggaggaagatgtgccctgctaaggggtgtgtgctcactgccccaccctcaaggcaaggcactgtggaaggtgmgksrckargctctctttacccaacccttccctcggggtctgctctgctggtctcacattgtcctgaagcctcaggccctgatcaaagatggctgagtctcagtgcggcggctaagccwykwrrcttgttgttggttcacttactcttagcttttagtttttgttcgttcatttttttcttattttgacatcactgccttttaaaaawawwwmwwmagattttagaatgaaatgtttcccatgttctccagcgttcctttctgtccacagggcatttgacttgtccacagggcatttgacctgtccacatttataaagggaacaggcgaagctgacttatttgtcagcttctgcatgtgaattcttgtctcagtttctgtttataatatgaatcactgtaaaactctaagacttggctaatcacgtaaaagattgtggcttcagtgttttctctkwaggcattgtgactggcttccagagcatcacacacgcccagaagggtcatctcgcacagcacaggctcagcaagccytgggccgctcacaggaggccgaactgttccytgtggaggaaaacagttytacagctttccagtgaacaacgttccgtccggcacctttccccatttaggaaggaatktgcagtctytgggcggtgggcatrccgtkcggatcctgtcagagctcctgcagcacatctgcctttactgkccyttaaggatgkataaatgctghacagtgctgttgkatctcccgacacktgttttcsctcagcttagtgcatttaaatacttgkatttatttatttgtttgggacatattaatatatatgaacatatagktactgttttatatattmttagcttattcaaagccatgatgctgtaaatgtgcttgtctttagaatgataaataataaaaactgacaagaacattgaamwmaaaaaaaaaaaaaaaaa

SEQ ID NO: 2842 - DNA, 3123 bp, Rattus norvegicus
gaattcggcacgaggtcagcagcaacctcctcgagcagagccgcggcggaagcgggctcaggggagcgagcccggccccgccagcccagcccagcccagcccagcccagcccaaccctgccgactccctccccacgcccgggtagcagccgccgtcgcctggagagaaggtggagaaagaaatctagcccctagcacgcacgcaccatcatggaccattatgattcccagcagaccaatgactatatgcagcctgaagaggactgggaccgggacctgctcctggatccggcctgggagaagcagcagagaaagaccttcacggcctggtgcaactcccacctgcgcaaagcagggacccagattgagaacattgaagaggacttccgagatggcctgaagctcatgctgctcctggaggtcatctcaggtgagcgtttggccaagccagagagaggcaagatgcgagtgcacaagatctccaacgtcaacaaggccctggatttcatagccagcaaaggggtcaagctggtgtccattggagctgaagaaattgtggacgggaatgtgaagatgaccctgggcatgatctggaccatcatccttcgttttgccatccaagacatctctgtggaagagacatcagctaaagaagggttgctcctgtggtgtcagaggaagacagccccatataaaaatgtcaacatccaaaacttccacatcagttggaaggatggtcttggtttctgtgccttgatccaccggcaccggcccgagttgattgactatggaaagcttcgaaaggatgatccactcacaaacctgaacacagcctttgatgtggcagagagatacctggacattccaaagatgctggatgcagaagacatcgtcggaactgcccggccagatgagaaagccattatgacctatgtgtctagcttctaccatgccttctctggagcccagaaggcggaaacagcagccaatcgcatctgtaaagtgttggccgtcaatcaagagaatgaacagcttatggaagactatgagaagctggccagtgatctgttagagtggatccgccgcaccatcccatggctggagaatcgggtgcccgagaacaccatgcaggccatgcagcagaagctggaggacttccgagactaccgacgcctgcacaagccgcccaaggtgcaggagaagtgccagctggagatcaacttcaacacactgcagaccaagctgcggctaagcaaccggcctgccttcatgccctccgagggcaggatggtctcggatatcaacaatgcctggggctgcctggaacaggcagagaagggctacgaggagtggttkctgaatgagatccggaggctagagaggttggaccacctggcagagaagttccggcagaaggcctccatccatgaagcctggacagacggcaaagaagccatgctgcggcagaaggattatgagacggccaccttgtccgagatcaaggccctactcaagaagcacgaggcctttgagagtgacctggctgcccaccaggaccgcgtggagcagatcgcggccattgcccaggagcttaatgagctggactattatgactcaccaagtgtcaacgctcgatgccaaaagatctgtgaccagtgggacaatctaggggccctgactcagaagcggagggaagctttagagcgaacagagaagctgctggagaccatcgaccagctatacttggagtacgccaagagggctgcacccttcaacaactggatggagggagccatggaggaccttcaagacaccttcatcgtacataccattgaggagatccagggactgaccacagcccatgagcagttcaaggctaccctcccggatgcagacaaggagcgcctggccatcctgggcatccacaatgaagtgtccaagattgtccagacctatcatgtcaacatggcaggcaccaacccctatacaaccatcacacctcaggagatcaakggcaaatgggaccatgtacggcagctggtgccccggagggaccaggctctaacagaggagcactcgaggcagcagcacaacgagaggttacgcaagcagtttggggcacaagccaatgtcatcggaccctggatccagaccaagatggaggagattgggaggatctccattgagatgcacggtaccctggaggaccaactcagccacctgcggcagtatgaaaagagcatcgtcaattataagccaaagattgaccagctggagggcgaccaccagctcatccaggaagcacttatcttcgacaataagcacaccaactayacaatggagcacatccgtgtgggctgggagcagctgctcaccaccattgccaggaccatcaatgaagtggagaaccagatcttgacccgggatgccaaaggcatcagccaggaacagatgaacgaattccgrgcctccttcaaccactttgaccgggatcactccggcacgttgggtcccgaagagttcaaagcctgcctcatcagcttgggttmtsmtatkggywacracmyscagkgagaggcagaatttgcccgratcatgagcattktrgacccmaaccgcttggggkwagtgacrttccaggccttmatcgacttcatgtcccgagagacggctgacacagatacagcggatcaggtcatggcttccwyvargatcctggctggagataagaattacatcaccggggatgagctgcgccgcgagytgccacytgaccaagccgagtaytgcatcgcgagaatggccccytacgcgggccctgactccgtkccgggtgctytagaytacatgtcyttcyccacgrckststacggssagagtgacctmtaacccacccvtgcytccccccaccvtggmctthtgcgcgtgcgccccaccstgctcytgcwccgcccagtatggctgtstgcgtttggtttcagctcagccaccaaggggacagagckccgacccaggcggcacckagcytccctacccgcaargtgacagttyacaaaattatyttytgcaamaaarraraaaaaaarttacatttaaaaaaaagtttaaaaaaaaaaaaaaaaaa

SEQ ID NO: 2843 - DNA, 3812 bp, Rattus norvegicus
gggccttgccggcggagctatgtctcaggggttcaggggacccacaggggtgttccctcaccagacacagccctgcttggaccctagctatgagcacagcaagtggagatacctgcagccacgtgggtcggagtcttaccttaggagtttccagctccagcagatagagtttctcaaagggcggctcccagaagcacccttgattggagcacagacccagtcactaccgccattcctcccaggacactggccaaggttcccagggccacctgcccaaggaaaacaaccggaaatctgggggtttcccaggagtgtgactctcagaaatcaggggttccatataggacccccacttcctcctccacacagcaggggtccgccatggagaggtgctgaaggtctttgctcacacttccaggagctgagcatcagtcagaatccagagcagaaggtcctaaaccgcctggaagagcttggtgaggggaaggccaccactgcctacgcgctagccagagagctcaggacccccaaaaaggacatcaatcgtatattgtactccttagaaaggaagggaaaactgcatagaggagtggggaagcctcctttgtggagccttgtgcccttaagtcaggcttgcactcagccccctagagctgtgaattcagacaaggaagtccctcgaggagagcccgatttggacagtgaggacggagaccctgcctctgacttagaaggaccttctgagcttcttgatatggctgaaattaaggagaaaatctgtgactatctgttcaatgtgtcaaagtcctctgccctgaacctggctaagaacattggcctcgccaaggcccgagatgtgaatgcagtgttgattgacttagaaaggcaaggcgatgtctacagggaaggggccactcctcccatctggtacttgacggacaagaagcgtgagaggctgcagatgaagagaagtacacacagtggtcctgcagctaccccagcagctgtctcagaagccactcaaagcacctcattccctacctgccacccaccccaatcaggtggctcaagcagcatggcaacctccaaaagagtggaaaacgggcaggagcctgtgacaaagtatgaaagtaggcacgaggcccgaccaggaccagtacgactgcggcctcatgcttatcacaacggcccctctagagcagggtatgttgcctctgaaaatggcccgtgggccacagatgacatcccagataacttgaatagtatccacacagcaccaggtgagtttcgagccatcatggagatgccctccttctacagccctaccttgccacggtgttcaccctacaagaagctaactgagtgccagctgaagaaccctgtcagcgggttgttagagtatgctcagttcactagtcagacctgtgatttcaacctgatagagcagagtggaccgtcccatgaacctcgatttaaattccaggttgtcatcaatggtcgagagtttcccccagctgaggctggcagcaagaaagttgctaagcaggacgcagcagtgaaagccatggcgattctgcttcgggaagccaaagccaaagacagtggacagccagaagaattgtccaactgtcccatggaggaagacccagagaagccagcagagtcccagccccccagctcctcagcaacatccttgttctctgggaagagcccagttactacactgcttgagtgtatgcacaagctagggaactcctgtgaatttcgtctcctgtccaaagaaggccctgctcatgaccccaagttccagtactgtgtggcagtaggagcccagactttcccctctgtgagtgcccccagcaagaaagtagcaaagcagatggccgcagaggaagccatgaaagctctgcaagaggaggcggccaattccgctgatgaccagtctggaggtgcgaacacagactcacttgatgaatctgtggctcccaacaagatccggaggatcggtgagctcgtaaggtacctgaacaccaaccctgtgggtggcttgttggagtacgcccgctctcatggctttgctgctgagttcaagctcattgaccagtctggacctcctcatgaacccaagtttgtttaccaagcaaaagttgggggccgctggtttccagccgtgtgtgcacacagcaagaaacagggcaagcaagacgcagcggatgcagcccttcgtgtcttgatcggggagagcgagaaggcagagcagttgggtttcgcagaggtaaccccagtaaccggggccagtctcagaagaactatgctactcctttccaggtccccagatgcacatccaaagacacttcctctcactggtagcaccttccacgaccagatagctatgctgagccacagatgcttcaacgctctgaccaacagtttccagccctccctgctcggccgcaagatcctggctgctattattatgaagagagatcctgaggacatgggtgttgttgtcagtttggggactgggaatcgctgtgtgaaaggggactctctcagcctgaaaggagagactgtcaatgactgccatgctgaaatcatctcccggagaggcttcatcaggtttctctacagtgagctgatgaagtacaaccaccacactgccaagaacagcatattcgagctggccaggggaggagagaagctccagataaaaaagacggtttcttttcacctctacatcagcacggcaccatgtggagatggagcccactttgacaaatcctgcagtgaccgtgctgtggaaagcacagagtcccgccattaccctgtctttgaaaatcccaagcaaggcaagcttcgcaccaaggtggagaatggggaaggcacaattcctgtggagtccagtgacattgtacccacgtgggatggcatccggcttggggaaagactccgtaccatgtcctgtagtgacaaaatcctacgctggaatgtgctaggcctgcaaggggcgctgttgacacacttcctacagcctgtgtacctgaaatctgtgacattaggttaccttttcagccaagggcatctgacccgtgctatttgctgccgtgtgaccagagatgggaatgcatttgaggatggactacgttatccctttattgtcaaccaccccaaggtcggccgagtcagtgtgtatgattccaaaaggcagtccggaaagaccaaagagwcaagcgtcaactggtgcttggctgatggctatgacctggagatcctggatggcaccaggggcaccgtggatgsacsagggaaagagttgtcgcgggtgtctaagaagaatattttccttcagtttaagaagctctgctccttccgagcccgcagagatttgctgcagctctcctatggggaggccaagaaagctgcccgtgactacgacttagccaagaactacttcaagaaaagcctgagggacatgggctatgggaattggatcagcaaaccccaggaggaaaagaacttttatctctgtccagtgcccaatgactgatagtggggtgtgttcccatggggtcrgasgrrggtcatagcattcctcatcacattgggccagagtttaggggccttttttaaccccctcccccccattttttaatggagaaaccataatagatggtaaagacctttrrwwmmmawwaawmmwrmwwrmwwtgggatttcgaggtggggtctggccaagtccccacctcccttttcccaagggaagaggccgagattaaaggaagaggaagcactaccaaaaaaaaaaaaaaaaa

SEQ ID NO: 2844 - DNA, 4031 bp, Rattus norvegicus
cccgggcagcgcgctctgcggtcgcctaccgcctgccgcccccgcgccgccgcgacgtggcaggaggcgatgcggcggcgccgctacctgcgggaccgcgccgaggcggcggcggcagcggcggcgggaggcggagaggggctgcagcggtcccgggactggctctacgagtcctactactgcatgagccagcagcacccgctcatcgtcttcctgctgctcatcgtcatgggcgcctgcctcgccctgctagccgtcttcttcgcgctcgggctggaggtggaagaccatgtggcatttttaataacggttcccactgccctggccattttctttgccatattcattcttgtctgcatagagtctgtgttcaagaagctactccgtgtgttttcgctggtgatttggatatgtctggttgccatgggatacctgttcatgtgcttcggagggactgtgtctgcctgggaccaggtgtcattcttcctcttcatcatctttgtggtatataccatgcttcccttcaacatgcgagatgccatcattgccagcatcctcacatcttcatctcatacgatagtgctgagcgtctacctgtctgcaacaccaggggccaaggagcacctgttctggcagatactggccaatgtgatcattttcatttgtgggaacttggcgggagcctaccacaagcacctcatggagcttgccttgcagcaaacctatcgggacacgtgtaattgcatcaagtcccggatcaagctggaatttgaaaaacggcagcaggaacggctcctgctctccttgctgccagctcacatcgccatggagatgaaagctgaaatcattcagaggctgcagggccccaaagcaggacagatggaaaacacaaacaacttccacaatctgtatgtcaaacgacacaccaacgtgagcatattatacgctgacattgttggcttcacccgccttgcaagcgattgctcccctggcgaactggtccacatgctgaatgaactctttgggaagtttgatcaaatagcaaaggagaatgaatgcatgagaattaaaattttaggagactgctattactgtgtttccgggctccctatatcactccctaaccatgccaagaactgtgtgaaaatgggattggatatgtgcgaagccataaagaaagtgagggatgctaccggagttgatatcaacatgcgtgtaggagtgcattctgggaacgttctctgtggtgtgattggtctccagaagtggcagtatgatgtgtggtctcatgatgttactctggcaaaccacatggaagctggaggagtccctgggcgtgttcacatttcttcagtcactctggagcacttgaatggggcttataaagtggaggaaggagatggtgagataagagacccatatttaaagcagcacttggtgaaaacctactttgtaatcaatcccaagggagagcgacggagtcctcagcatctcttcagacctcgacacactctggacggagccaagatgagagcatctgtccgcatgacccggtacttggagtcctggggagcagccaagccattcgcacatctgcaccacagagatagcatgaccacagagaatgggaagattagtaccacggatgtgccaatgggtcaacataattttcaaaatcgcaccttaagaactaagtcacagaagaagagatttgaagaagaactgaatgaaaggatgatccaagcaattgatgggatcaatgcacagaagcaatggctcaagtcagaagacattcaaagaatctccctgcttttctataacaagaatatagagaaagaataccgagctactgcactgccagcattcaagtactacgtgacctgtgcctgcctcatctttctctgcatcttcattgtacagatacttgtattgccaaaaacgtccatccttggcttctcctttggagctgcatttctctccctcatcttcatcctctttgtctgcttcgctggacagcttttgcaatgcagcaaaaaggcctccacctctctcatgtggcttttgaaatcatcaggcatcatcgccaaccgcccatggccacggatctccctcacaatcgtcaccacggctatcatactaaccatggctgtgttcaacatgtttttcctgagcaactctgaggagacaacccttcccactgccaatacatcaaatgcaaacgtttctgtcccggataaccaggcgtcgattcttcatgctcgaaacttgtttttcctcccgtacttcatatacagctgcatcctgggcttgatctcctgctccgttttcctgagggtgaactatgagttaaaaatgttaatcatgatggtggcactcgtgggctacaacaccattctactccacacccatgcccatgttctggatgcgtacagccaggtcctgtttcagagaccaggcatttggaaagacctgaagaccatgggctccgtgtcactctccatattcttcatcacgctgctggttctgggcagacagagtgaatattactgtaggttagacttcttgtggaagaacaagttcaaaaaagagcgggaggagatagaaaccatggagaacctaaatcgagtgctgctggagaacgtgcttcctgcacacgtggctgaacacttcctggccaggagcctgaaaaatgaggagctgtaccaccagtcctacgactgtgtctgtgtcatgtttgcctccattccggacttcaaggagttctacacagagtcagatgtgaacaaggaaggcttggaatgcctgcggctcctgaatgagatcattgctgactttgatgatctgctttctaagccaaagttcagtggtgttgaaaagatcaagaccattgggagcacatacatggcagccacgggactgagtgccatacccagccaggagcacgcccaggaacctgagcgtcagtacatgcacataggcaccatggtggagtttgcatatgccctggtgggaaaactggatgccatcaataagcactccttcaacgacttcaaactgcgagtgggtatcaaccatgggcctgtaatagctggcgtcataggggctcaaaagccacagtatgacatctggggcaacactgtcaacgtggccagcagaatggacagcaccggggtcctggacaaaatacaggtgactgaggagacaagcctcatcttgcagacgcttggctacacgtgtacatgtcgaggtatcatcaatgtgaaggggaaaggggacctgaagacatattttgtaaacacagagatgtcaaggtccctttctcagagcaacttggcatcctgagaagctgtctcttcctgacaagaagaatgtacttgcaggaaggtaccacgcactttctgactgcaacccttccccttcgtcctgatgtacgtgctctgccccatcctctggagcccctgcagactagttcctgtgacccagtgacatactgtttggtgtctgcgcgtgcmcaggttgtcctgccacttgcactgtgcttgctcctaagcaggasrvgrrggaaccatktcctggaaggagagcattggaagaagtgatgaagaggtgaagtgaacacacattcttaaggcaataaaaccggggggtgwatattatcttctggtgcatgttcttctytggaaaatacggkagytcgtaactgcatycmtartytgwtattcaaacacmcagkatttgtgaataagctgatcccgtcacccaacatggwgtctgtgttcacytacccatgtgtctcawtgccagtggtcgtccttgggggctcagytgagactytcagcttctgtcaccytgmtgtcctgtyttgtggcagcagcacgttgccatccatyaccagaattwgtcctcacagcytakgaccagttttgtaccaaactcatsygatgttttsatgccatttgtcwwwhgtaaggttaattcattmamagwtttatgdwctttgdwddrwarwrmmmraaaaaaaaaaaaaaaaa

SEQ ID NO: 2845 - DNA, 3959 bp, Rattus norvegicus
  misc_feature (3756)..(3756): n is a, c, g, or t
  misc_feature (3942)..(3942): n is a, c, g, or t
ggagaggagagaagagagagagattcatttgccttccttggattgctgagggaagagaagttggtcaggagggaaaggggaggaatctgagctatgttcaaagaagcctgacatctgtcgaggatcccagccccaaggtggagccagtgtgcttatgatgacctgctgggaactggcttcattctgctctgcctgcccgtcctggagcctggtgaatccttccctgagtctaacctccgtcctcatgagactgttctctccatttctgcttgcaggaagattagtgtcaccgcctttccccctgcctctgggtgccaagcctgcagcctgcccgtcagccccagctccagctgatcccccaccatccaggtcgcctgcagcctgtaactacccactgtgttggttacagcagtcatctatcccgtgcgccctgaagccagctctgtacagtttcgtttctgatctctccagagcccaagcagagtagacccctgtccagcctagtgaccttcgcctgagcgctggttaatatttgaccaaaggcggtggggctcctccccctgggaagatatargctggtctggggctactctgctttcttcttggcctgagctgttccgagstccctgcccaccagcatcatggccaagggtttctacatttccaagaccctgggcatcttgggcatcctgttaggtgtggcagccgtatgcaccatcatagctctgtcggtggtctacgctcaggagaagaacaggaatgcggagaactctgccatagcccccacgctcccaggcagcacctcagccaccacctcaactaccaaccctgctatagatgaaagcaaaccttggaaccagtatcgcttgcctaagactcttatacccgactcctaccaggtgaccttgaggccttacctcacccccaacgagcagggcctgtacatcttcaaaggttccagtactgtccgctttacctgcaacgagaccacaaatgtcatcattatccacagcaagaagctcaactacaccaacaaagggaaccacagggtggcgttgcgagccctgggtgacactccggcacctaacatcgacacaacggaactggtagagcgcacggagtacctggtggtgcacctgcagggctccctggtaaagggccatcagtacgagatggacagtgagttccagggggagctggctgatgatctggctggcttctaccgcagcgagtacatggaaggtggcaacaagaaagtggtkgccrcyrcacwgrkgyaggmkgsmgrkgctsgaaaatcctttccttgcttcgatgagccagccatgaaggcctcattcaacatcacgctcatccaccccaacaacctcaccgctctgtctaacatgcttcccaaagattccaggacccttcaggaagatccttcctggaacgtcactgagttccaccctaccccgaagatgtccacatacctgctggcctatatcgtgagcgagttcaaatatgtagaagccgtctcacccaatagagtccagattcgaatctgggctcggcccagtgccattgatgagggccatggtgattacgctctgcaagtcacaggccctatcctaaacttctttgcccaacattataatacagcctaccctctagaaaaatctgaccagattgccctgcctgacttcaacgctggagccatggagaactggggrctsgtgacctaccgagagagtgccctggtctttgaccctcagtcctcctccattagcaacaaggagcgggtggtcactgtgattgcccatgagctggcccatcagtggtttggcaacctggtgaccgtggattggtggaatgacctstggctgaacgagggctttgcctcctatgtggaatttctgggtgctgactatgcagagcccacctggaatctgaaagacctcatagtactgaatgatgtgtaccgtgtgatggccgtggacgcgctcgcttcctcccacccgttgtccagccctgccaacgaggtcaacacgccagcccagatcagtgagctgtttgacagcatcacctacagcaagggagcctcagtccttaggatgttgtccagcttcctgacagaggacctgttcaagaagggcctttcgtcttacctccacaccttccaatactcgaacaccatttatctggacctgtgggaacaccttcagcaggcagtggacagtcagacagctatcaaactcccagcctcagtgagcaccatcatggaccgatggattctacagatgggttttcctgttatcactgtgaacaccagtrcgggagaaatctaccaggaacacttcctcctggaccccacttccaaacctacccgcccctcagattttaattwmctctggattgtgcccattccgtatctcaaaaayrsramggaggatcactactggctggagaccgagaaaaaccagagtgcagaattccaaacatcctccaatgaatggctcttactgaacattaatgtaaccggctactaccaggttaactatgatgaaaacaactggaggaagattcagaatcagctgcaaacagacctttctgttatccctgtcatcaaccgtgcgcagattatccacgackscttcaacctagccaghgctggaaagctatccatcactctgccgctgakcaacaccctcttmctggccagwgaaacagaatacatgccctgggaggctgccctgagcagcctgaactacttmaagctcatgtttgaccgctcggaggtctacggycccatgaagcgctatctgaagaagcaagtcacacccctmtymgcctacttcaaaatcaaaaccaacaactggctcgaccgtyctccaacactgatggagcagtacaacgaaattaatgccatcagcaccgcctgttctagtggtctcgaagagtgtarggatctcrytgttgggcttyatagtcagtggatgaacaactctgataataacccgatccaccccaaccttcggtctactgtctactgcaatgccattgctttcggtggtgaggaagmkwggaactttgcttgggaacagttccggaaagcaactctggtgaacgaggcagataaactccgctcagccttggcctgtagcaacgaggwgtggattttgaacaggtacctgagttacactctgaaccccgactacatccggaagcaggatgctacctccaccatcgtcagcatcgccaacaacgwggttggacaaactctagtttgggactttgtccgaagcaactggaagaaactgtttgaagattacggcggaggatctttctcctttgccaatctcatccagggagtgacccggcgcttctcctctgagttcgagctgcagcagctggagymgywtrmagmskryaactmsgccacwgkstttggytmcrgcactckrkyybtggmscaagccctggagaagactaaagccaacatcaagtgggtgaaggagawcaaagacgtggtactcaagtggttcmcagaaawcagctagttagtcccgggccgagaaccatctgtcccggsgtgacgcmtatgactatytcarcagcctgtgcagggtmtmtgtbttcaragcgccagacaccggyatbtgaccctcaaggtcaaagtytccarcctatggagvtarcctagbtchtaattgtcagavtgccaracacctyccgkyccttgcccytygtrccaaythtgccccaggcccaggcctntggggctkatytcagggaarccsagcthtgagtytagatttactggacaaagggtagcmtaraaaragtytccctgaawkccttaytactttcccyccacaagacccagaaccaaagaatcaacagggcmcaaagatstmtatrtatttttaagagaaaatgtaaawaaagaatttytwaaatgwnaammaaaaaaaaaaaaa

SEQ ID NO: 2846 - DNA, 5792 bp, Rattus norvegicus
gcccgggtcccgcctcttcctcagcttggagctgggctccgaaggctgctctgggacagagtctcatactgatgaacggagagcactcaatggccacgcctggagagtcctgcgcaggcctgagggtctggaaccagacagaacaggagcctgtggcctatcacttgctcaacctgtgcttcctgcgagccgccgggagctgggtgccccccatgtacctctgggtccttggccccatctacctcctctacatccatcgccatggctgctgctacctccggatgtcccgcctcttcaaaatcaaaatggtgctcggctttgccctcatccttctctacaccttcaacgcggccgtgcctctctggaggatccaccggggcatgccccaggccccagagcttctcattcaccctaccgtgtggctcaccaccatgagcttcgccaccttcctgatccacatggagagaaagaagggggtccgtgcatctgggttgttgttcgggtactggctgctctgctgcctcgtgccagccatcgacactgtccagcaggcctccgcagggagcttccgccaggagcccctccaccacctggccacctacctgtgcttgtccctggtggtggcagagctggtgctgtcttgtctggtagaccagccacccttcttctcggaagactccaagccattgaatccatgtccagaggccgaggcctcttttccctccaaggccatgttctggtgggcctctggactgctatggaagggctacaggaaactgctggggccaaaagacctctggtcacttgagagagaaaactcttcagaagaacttgtttcccagctggaaagagaatggaggaggaacttcagtgagctgccggggcacaaagggcacagtggtatggggacccccgagacagaggccttcctgcagccagagaggagccagcggggcccgctgctcagggctatctggcgtgtgttccggtccactttcctgctggggaccctcagcctggtcattagcgatgccttcaggtttgctgttcccaagctcctcagtctgtttctggagttcatgggcgacctcgagtcctcggcttggacgggctggctcctggctgtgctgatgttcttgtcggcctgcctacagacactgtttgaacagcagtacatgtacagagtcaaggtcctgcagatgaggctgcgaacagccatcactggcctggtgtacagaaaggtcctggtcctgtccagtggttccagaaagtccagtgcagcaggggacgtggtcaacctggtgtcagtggacgtacagcggctggtcgagagcatcctccacctcaacgggctgtggctgctcttcctgtggatcattgtgtgctttgtctacctgtggcagctccttgggccctctgccctcacagccgttgctgtcttcctgagccttctccccctgaacttcttcattaccaagaagaggagcttccatcaggaagaacagatgaggcagaaggcctcccgagcacggctcaccagctccatgctcagaactgtgagaaccatcaagtcccacggctgggagtgtgccttcctggagcgactcctgcatatccggggccaggagctaggtgccctgaagacctccgccttcctcttctctgtgtctctcgtgtccttccaagtgtctacatttctggtggcgctggttgtgtttgctgtccacaccctggtggcagaggacaacgccatggatgcggagaaggcgtttgtgacgctcacggtgctcagcatccttaacaaagcccaggccttcctccccttctctgtgcactgcctcgttcaggctcgggtgtcctttgaccgcctagctgctttcctgtgcctggaagaagtagaccccaatggcatggtcttgagtccctccagatgctcctcgaaggatcgaatttctatacacaatggcaccttcgcttggtcccaggagagcccgccctgcctgcacgggatcaacctcaccgtgccccagggctgtctgctggctgttgtgggtccagtgggggctggaaagtcctccctgctgtctgccctgcttggggagctgttgaaggtagaagggtctgtgagcattgagggttccgtggcctacgtgcctcaggaggcttgggtccagaatacctctgtggtggagaatgtgtgcttcaggcaggagctggatctgccatggttgcaggaagttctagaagcctgtgccttggggtctgatgtggccagcttccctgcaggagttcacaccccagtaggggagcagggcatgaatctttctgggggccagaagcagcggctgagcttggctcgggctgtgtacagaagggctgctgtgtacctgatggatgaccccctagcagccctggatgcgcatgtcagccaggaagtcttcaaacaggtcattggccccagtggacttctccaaggtacgactcggatccttgtaacacacacgctgcatgtcctgccccaagctgaccagatcctggtgctggccaatgggaccatcgcagagatgggctcctaccaagaccttctgcataggaacggagccctggtgggtcttctggatggagccagacagcctgcaggcgaaggagaaggagaagcacatgctgcagccaccagtgatgaccttggaggcttttctggaggtgggacgcccacgcgcagaccagagaggcccagacccagtgacgcagcccctgtgaagggcagtacttcagaggcacagatggagccttctctggatgacgttgaggtcactggactgacagcaggagaggacagtgtgcagtatggccgggtgaagagcgccacatacctgagctacctgcgggcggtgggcacaccgctctgcacctacaccctgttcctcttcctctgccagcaagtggcgtccttctgccaaggctactggctgagcctctgggccgacgacccggtcgtggatgggaagcagatgcattcagccctgcgtggctccatctttggactccttggctgtctgcaagccatcggactgtttgcctccatggctgcggtgttcctgggtggagcccgagcttcatgcctgcttttccggagcctcctctgggacgtggctcgctctcccattggcttctttgagcgcacaccagtcgggaacctgctgaaccgtttttccaaggagacggacatagtggatgtggacatcccagacaagatgaggaccctgctgacctatgcctttggactcctggaggttggcctggcagtgtcgatggccacaccactggctattgtggccatcctacctcttatgctcctttatgctgggtttcagagcctctacgtggccacatgttgccagctgagacgcctggagtcggccagttactcctcagtgtgttcccatctggctgagaccttccagggcagtcaggtggtcagggccttccaggcccaggggcccttcacagctcagcacgatgccctcatggatgagaaccagaggatcagtttcccgaggctggtggctgacaggtggctggctgccaacctggagctcctggggaatggcctggtgtttgtggccgctacatgtgctgtgctgagcaaggctcacctgagtgctggcctcgcgggcttctcggtttctgctgccctccaggtaacacagactctgcagtgggtggtccgcagctggacagatctggagaacagcatggtggccgtggagcgagtacaggactacgttcacacccccaaggaggctccctggaggctgccctcctctgcagcccagcctctctggccctgtgggggacagattgagttccgagactttgggctcagacaccgaccagagctgcccatggctgtgcagggtgtgtccctgaagatccatgcaggggagaaggtgggcatcgtgggcaggacaggggccgggaagtcctccctgacttggggcctgctgcggcttcaggaggccactgagggtggtatttggatcgatggggtccccatcaccgacatggggctgcacacactgcggtccagaatcaccatcatccctcaggaccctgtcctgttcccgggctcgctgcggatgaacctggacctgcttcaggagaacacagatgagggcatctgggcagcgctggagacggtgcagctcaaggccttcgtgaccagcctgcctggccagctgcagtatgagtgctcaggccagggagatgacctgagtgtgggtcagaagcagctcctgtgtctggcacgtgcccttctccggaaaacccagatcctcatcctggatgaagccactgcctccgtggacccagggacggagatacagatgcaggcggccctcgagcgctggtttgcacagtgtacagtgctgctcattgctcaccgcctgcgctccgtgatgaactgcgccagggttctagtcatggatgaggggcaggtggcagagagtggcagtccagcacagctgctggcccagaaaggcctgttttacaggctagcccaggagtcgggcckagcctgagtcaggactcttcccaaacctcctggagccagccacagagcctgcagtagctggagatgccagagactcaggggccacatgatgcccaatctaaactcctttttgggaggaagatagcagagagagtgacagagtattggaataccagacccagaagaacccagcatgcccaggttggcttgagcaaggccacacccaccccaggccaaaaagaacagtgactctcagcccaagctgtctacttcaaggccatacccaccccaggccattcaggttggatgccctggaccggggtgatggcgtgcacatatcccctaactccttattttgaggtcattgtagagttcactcacagttttaagaagccacatggagagaagccgcaaaccctctgccctgtttattccgggggtgacaccttgtccaaccctaggacaagatgaagcatcacactgactccgactgacttgtctttacctytgctgcgtgtgcatcagtgtttggactccgtgctttgkgctctcattggtttttkaracaggatttcacatagcccaggctggccctgaactcactttgttgctgaggatggccttgaacatytgatgctcctgccttccctcccaagtgctgggattatggcctgtgtcaccacgccctgtgtgggggtctcaaacaaggctttgtgtgtgcttgacaggcactcactytaaaaactgtgwwamarmmmmrrmwmwrgattcggywckactcctgtttaaaattgtagtggtgaagggtctcttgctcaaactggcctcaaactcgagatgctcctgtctcggtctccagagtgctggaatgacagacgtgtgccactacacctgccttgactcaccacagctaagtagtgacatccccatgggccagggctggtgagtcccgtgcgtgacagtgtgctgagcagtacccttcgcttytgctcagagatgcccttctaaagctgtggcaaagagatttccacacactgccgtgcccccccaggactgcatcatgaattgatccgccctaatagcacccatgactccctgagcagtgatatgttgggttcaggagaggattcctgcttgcttcttggacagggcttgctcttccctcgaccctgaggcttctctgattggctacccttaataaaggatttacgggatttcctttcaaaaaaaaaaaaaaaaa

SEQ ID NO: 2847 - DNA, 2483 bp, Rattus norvegicus
tcgatccaatggatttcttggtttcctgtatggaatgttaacaatctgtgttatacactattgagatgcagacgtggcttcctttggcccaacactttggaggccaggattcattgtctatctctgtttgcttgaagcccaacccaccacgagccaatcctttgtcttgttctgtgtctcatagtacttttttccttggttccttctgtgcctggtaatttccgcagcggccacaacttcattaagagagaaactgtcaagttcaagaaggaagtgaagttggtctaacataccacagaaatttttctcaaaagaatcagaaaaaagggaagtacatcggcatgtttggaagggggatgccttcaaagatctttctttactgttgctgtctttgccggaattccgcgacaggtttaaatgtttctttggccacttgactactgaacacaaaatgaataactcaacaaactcctcgaacaatggcttggctattaccagtccttacaagacatttgaagtggtatttattgtccttgtggctggatccctcagtctggtgaccatcattgggaacattctggtcatggtttccattaaagtcarccgccaccttcagactgtcaacaattacttcttgttcagcctggcctgtgctgacctcatcataggtgttttctccatgaacttgtataccctctacactgtgattggctactggcctttgggacctgtagtatgtgacctwtggctagcattggactatgttgtcagcaatgcctccgttatgaatctcctcatcatcagctttgatagatacttctgtgtcacgaaacctctgacctacccagttaagcggaccacaaaaatggcaggcatgatgattgcagctgcgtgggtcctttccttcatcctctgggccccagccattctcttctggcagttcatcgtaggggtgaggactgtggaggatggggartgctatattcagttcttttccaatgcggccgtcaccttcggcactgccattgcagckttctatctgcctgtcatcatcatgactgtgctctattggcatatatcccgggcaagcaagagtagaataaagaaggaaaagaaggaacctgtggccaaccaagacccagtatctccragtctggtgcaaggaagaattgtaaagccaaacaataacaatatgcctggtggtgatggcggcctggaacacaacaagatccagaatggcaaggctccacgggacggcgtgactgaaamctgtgttcarggggaggagaaagagagctccaatgattcgacgtcatcagctgctgtggcctccaatatgagagatgatgagataacccaggatgaaaacacagtttccacttcgctggrccactccagagatgacaactctaagcaaacatgcatcaaaattgtcaccaaggcccaaaarggtgatgtgtrcaccccaacgagtaccactgtagaactagttgggtcgtcgggtcagartggggatgaaaagcagaacrttgtagcccgcaaaatcgtgaagatgmccaagcagcctgccaaaaagaagcctccaccatcccgggaaaagaaagtgaccaggacaatcttggctatcctgttggctttcatcataacgtgggcgccatacaatgtcatggtgctcatcaatactttctgtgcaccctgcatccccaatacagtatggacaattggctactggctctgttacatcaatagcaccatcaatccggcctgctatgcgctttgtaatgccaccttcaaaaagacttttaagcacctcctcatgtgtcattacaagaacataggcgctacacggtgaaaagaccatcaaaagaagaaatgtggtcgagtgtgtcttggggaagaacagcgaccagaaagctgtgtttatagtgacctgccatttcactttacagtcttactgcaacatgaaagtaaggagttttagagagacactatcattgcgcccatgctccgttttggaaagactaccttattaaactctcaccttataaaccctgtcagtttaggagcaccgagaaattgaaagaggcatgctgaaactgcagatctaaggaaaaatctctactgtctcctgctctcttgaagaagggcgtcagagtctacaatttcatgtctctgcacaagaagaataacctagtctatttgttgtttctttctgttgttcccctgtgtggcggtgagaaagaaatgacacattccatgctaacacagagacctacatggaaagaagcaggcactgtacaatgagagagaagaagaaagaaaatcaaataggatgcagagatggtctgcagagcacgagcatatatatcctcggctgtgctgtgctctgatcggaaggatttcaacacaacaacctgcttatttcttctctcttgccccctcccctgccgatggaaatcaagaaagccaacaacaaccagtcg

SEQ ID NO: 2848 - DNA, 1125 bp, Rattus norvegicus
gaaagcagtgactgaggagcttgtaccaccggtgactagatgaccatggactctggagcagacaaccagcagagtggagatgctgctgtaacagaagctgaaagtcaacaaatgacagttcaagcccagccacagattgccacattagcccaggtatccatgccagcagctcatgcgacgtcatctgctcccactgtaaccttagtgcagctgcccaatgggcagacagtccaggtccatggggtcatccaggcggcccagccatcagttattcagtctccacaagtccaaacagttcagtcttcctgtaaggacttaaaaagacttttctccggaactcagatttcaactattgcagaaagtgaagattcacaggagtctgtggatagtgtaactgattcccaaaaacgaagggaaatcctttcaaggaggccttcctacaggaaaattttgaatgacttatcttctgatgcaccaggggtgccaaggattgaagaagaaaaatcagaagaagagacttcagcccctgccatcaccactgtaacagtgccaaccccgatttaccaaactagcagtgggcagtatattgccattacccagggaggagcaatacagctggctaacaatggtaccgatggggtacagggcctgcagacattaaccatgaccaatgcagctgccactcagccgggtactaccattctacaatatgcacagaccactgatggacagcagattctagtgcccagcaaccaagttgttgttcaagctgcctctggtgatgtacaaacataccagattcgcacagcacccactagcaccattgcccctggagttgttatggcgtcctccccagcacttcctacacagcctgctgaagaagcagcacgaaagagagaggttcgtctaatgaagaacagggaagcagcaagagaatgtcgtagaaagaagaaagaatatgtgaaatgtttagagaacagagtggcagtgcttgaaaaccaaaacaaaacattgattgaggagctaaaagcacttaaggacctttactgccacaagtcagattaatttgggatttaaattttcacctatgtggtggaaaatggactggattggccacaaccagaa

SEQ ID NO: 2849 - DNA, 1852 bp, Rattus norvegicus
gcgagagaggacggaagcctgtgggagcccgtggcctttaaagtgcgattcagccctttcctccggggctagtttgtaaacacggcagcgctccgggctcgctggtggctgaaaggaacatgaattagtgacctggaaagacactagatggcaacttgggaagtattgccatcccaagtatagcaagagcttagggattcctgttaacagaataaaactcatggcccaccagctacaaagtgtctttgccatgaaacagaggacatgataaactgtttaacttaatgaaattcaagttgcatgtgaattctgccagataaaacaaggacctgtggaatatgagtgatgacaaaccctttctatgcactgcccctgggtgtggccagcgttttaccaacgaggatcatttggctgtccataaacataaacatgagatgacactgaaatttggtccagcacgtaatgacagtgtcattgtggctgatcagactccaacaccaacaaggttcctaaaaaactgtgaagaagtgggtttgtttaatgagttggcaagtccattcgagaatgaattcaagaaggcttcagaagatgacattaaaaaaatgcctctagatctgtcccctcttgcaacacccatcataagaagcaaaattgaggaaccttctgttgtagaaacaactcaccaggatagcccgttacctcaccccgagtctactaccaatgatgaaaaggaaataccattggcacaaactgcacagcccacatcagctatcgttcgtccagcatcattacaggttcccaatgtgctgctcacaagttctgactcaagtgtaattattcaacaagcagtaccttcaccaacctcaagtactgtaatcacccaggcaccatcctctaacaggccaattgttcctgtaccaggcccatttcctcttctattacatcttcctaatggacaaaccatgcccgttgctattcctgcatcaattacaagttctaatgtgcatgttccagctgcagtcccacttgttcggccagtcaccatggtgcctagtgttccaggaatcccaggcccttcctctcctcaaccggtccagtcagaagcaaaaatgagattaaaagctgctttgacccagcaacaccctccagttaccaatggtgatactgtaaaaggccacggcagtggattggttagggcccagtcagaagagtctcgtccacagtccttgcagcagccagccacgtccactacagagactccggcgtctccagctcacacaactccacagacccaaaatacaagtggccgtcgaagaagagcagctaatgaagatcctgatgagaaaaggaggaagtttctagaacgaaatagagcagcagcttcaagatgccgtcaaaaaaggaaagtatgggttcagtccttagagaagaaagcagaagacttgagctcactaaatggccagctgcagagcgaagtcaccctgctgagaaatgaagtggcacagctgaaacagcttcttctggctcataaagattgccctgtaaccgccatgcagaagaagtctggctatcatactgctgataaagatgacagctcagaagacctttccgtgccaagcagcccacatacagaagcgatccagcacagctctgtcagtacgtccaatggagtcagttcaacatcaaaaacagaagctggagccacttcagttctcacccagatggcggaccagagcaccgagcctgcactttcacagattgtcatggctccttcctcccaggcacagccctcaggaagttgattaaaaacctgcagtgcaacagggtttagatactgattagtgacttcata

SEQ ID NO: 2850 - DNA, 3132 bp, Rattus norvegicus
gccgctggaaaatgtckcaggaraggcccacgttctaccggcaggagctgaacaagaccgtctgggaggtgcccgagcgataccagaacctgtccccggtgggctcgggagcctacggctcggtgtgtgctgctywygakrcaaagacgggacatcgtgtggcagtgaagaagctgtcgagaccgkttcagyccatcattcacgccaaaaggwcctacagggagctgcggctgctgaagcacatgaagcacgagaatgtgattggtctgttggatgtgtttacacctgcaaggtccctggargaattcaacgatgtgtacctggtgacccatctcatgggggcagacctgaacaacatcgtgaagtgtcagaagcttaccgatgaccacgttcagtttcttatctaccagatcctgcgagggctgaagtatatacactcggctgacataatccacagggacctaaagcccagcaacctcgctgtgaatgaagactgtgagctgaagattctggattttgggctggctcggcacactgatgacgaaatgaccggctacgtggctacccggtggtacagagcccccgagattatgctgaattggatgcactacaaccagacagtggatatttggtccgtgggctgcatcatggctgagctgttgaccggaagaacgttgtttcctggtacagaccatattgatcagttgaagctcattttaagactcgttggaaccccaggggctgagcttctgaagaaaatctcctcagagtmtgcaagaaactacattcagtctctggcccagatgccgaagatgaacttcgcaaatgtatttattggtgccaatcccctggctgtcsacctgctggaaaagatgctggttttggactcrgataagaggawcacagcagcccaagctcttgcgcatgcctactttgctcagyaccacgaccctgatgatgagccagtggctgamccttatgaccagtcctttgaaagcagggacytccttatagacgaatggaagmrcctgacctacgatgaagtcattagctttgtgccaccgccccttgaccaagaagaaatggastcctgagcaccttgcttctgttctgtccatcccacttcactgtgaggggaaggcctgttcatgggaactctccaaataccattcaagtgccwcwwrwwraaarawwmmwwcatggtggaagggggtgcatgtatgtgcgtagtgtttgtgtgtgtctgtctgtctgtccgtttgtccatgtatctttgtggaagtcattgtgatggcagtgacttcatgagtggtagatgctccttggcagtctgcctgctctctcagagtccgggcaggccgatgggaactgccgtctccttagggatgtgtgtgtgtatgttaagtgcaaagtaagaatattaaaatatccctgttcctagttaccttgccacttcggcttctcctgtggccctgcctttaccatatcacagtgacagagagaggctgcttcaggtctgaggctatccctcagccatgcataaagcccaagagaaccaactggctcctgggctctagcctgtgatcggcttgctcatgtcctcagaacctgtcagtctgtttgtgccttaaaaggagagaagggcgcgttgtggtagttacagaatctcagttgctggcgttctgagccaggcaaggcacagggctgttggatggccagtggggagctggacaaaacaaggcagccttcaaggaggccatgggtgcatgtttgcatgagtgtatgtgcaaccgccctccctcacctccaggagcaagctgttttctatgcttacctaagttcacctcagtgcagaggtctccagtgccaggcacaggctcctgccatcagtagcttcctatgtcatcttcacgtcatgcgggtgtttgcatgctgtgctctggagcttgtcctgtcttctggaagccctgggccgggcgtgtgaagacttcccagcagtcctatccacgcacctcagctgaggccacgggcacactgctgcttcctcactccagctacgttgtgttgaacacaactgatcctccaggtgcttgtggtgcaggaaacgggacgaacagagcacctgaacccttgccatctgacatcaccgacacaggagaacagtcctctcctctcctctcctctcctctcctaggacagtccccrgctctggaatcatgttcttctcactcatggtagccagctaagaaagctgcaaaccgaacaaagggagaaccgagctcctgaagccaggagctccttttactgtccttctcaaaatagggtcattagacacagccaagtcgtcaaaggcccctttccttgtacggggcccccccgcccccggcagcttgacactgatttcagtgtctatttggggagaaagcaattttktcttggaattttgtatgttgtaggratccttagagagtgtggttccttctgatggggagaaagggcaaattatttwaatattttgtatttcacctttataaacatgaatcctcaggggtgaagaacagtttgcataattttctgaatttcaggcactttgtgctatatgaggacccatatatttaagctttttgtgcagtaagaaagtgtaaagccaattccagtgttggacgaaacaggtctcgtatttaggtcaaggtgtctccattctctatcagtgcagggacatgcagtttctgtggggcagggtaggaccctgcatcatttggagcccagaaggaggccgactggccaggcctcaccgcctcagtatgcagtccagctccacgtcatcccctcacaatggttagtagcaacgtctgggtttgaacgccaggcgtggttatattattgaggatgcctttgcacatgtggccatgctgtgttaggactgtgccccagggcccggacttgaagctagagctggcagaagagctcctggcatccatggtgcgatgctgccgccacccagtttctccattggaagacaagggaatgagaagactgctgtgtatgtgtatttgtgaacttggttgtgatctggtatgccataggatgtcagacaatatcactggttaaagtaaagcctatttttcagat

SEQ ID NO: 2851 - DNA, 2030 bp, Rattus norvegicus
  misc_feature (962)..(962): n is a, c, g, or t
caaaagctggagctccaccgcggtggcggccgctctagaactagtggakcccccsskcyscaskwmkkckgccgmggcmcggkcggctttytgcgctgtagcggtctctgccgttccttggaagcacagctccccttcmmmgcyssagyyccastcscsgtscggccgcrgammtawrgatsmsymgskctgaggarktgkcctggatttcctggttctgtgggctccgtggtaatgaattcttctgtgaggtggatgaagactacatccagracaaatttaatcttactggactcaatgagcaggtgcctcactatcgacaagccctagacatgatyttggacytggaacctgatgaagagctggwagacaaccccaaccagagtgacttgattgagcakgcggccgakatgctctatgggttgatccacgcccgytacatcctcaccaaccggggcattkcacaaatgttgraaaagtaccagcaaggagactttggctactktcctcgagtayacwgkgagaaccagccgatgbttcccmtcggcytttcggacatcccaggaraggccatggtgaagctctactgccccamgtgcatgracgtgtacacacccaagtccthtaggcaccaccacacggatggcgcatacttsggcactggtttccctcacatgctcttcatggtgcatcccgagtaccggcccaagyggccggccaaccagtttgtgcccargcthtacggtttcaagatccatccaatggcytaccabctgcakctccaagccgccagcaacttcaagagcccartcaagacgattcgctgagtgycctcccacvtcctctgcctgtgacaccaccgtccctccgytgccaccctttcaggaagtctatggtttttagtttaaattaaaggaattgttactgtggtggggatatgaaataaaggaagaraaggcwwnraaaaaaaaaraarwvmrrmykcgrsrksksrccyaggtgtaymcarytgcmsattaccaatggctgcagaacacccaatcatgacctctagtgctttatagcaaaagtgtaaagtggtacctgggtgaccagcattgccatggttacatccatttgcgtaatcaagcagctgtgcaactgctcttctaacagatgaacagctgcatgcatctccagcaggcatggattgtctcttgtctatgatcctcagtgcgttcacttagagtatttctagagtttgagtccttgccgtgatagagccatgtagggaatgcactgattgcatgttaccccaagcgtcatgaaaccttccgacacggtgacctatttaatggtcttgtttgttgacatgacaaattaacattcttagagttacatctcgaaaaaagcatttgtgatagataagccctttgagccttgtggctaaatttttgtggctttgtttaactttcaaaggttatatatgcactaaccttttttgatggctaagtaggctttaaattacagtaaattttttcaaataaaactggctgtaaaatatattttgaattagagttgttcactttttcatagctacttatgtttttttcccaataatttatttcacatctctaccagtgaacgcagcccatcactagaaaatgaccttgtcctgatttcagtttcaactattagttttaaagctcactgttgaataagaggaagtggtggtgcattttaaattgactttcatgtgcttttaaaatatgacagatctccttgataatgtacttttatttgatctcaagttgtataaaaccaataaatttgtgttactttgattgcagtagtatcttatgcatagtgattccatgttatatgcagactagttaggcaactgttttcttagttacaagcttcacttttgtgcagttaaaaaaacaaaagtaggctacagtctgtgccatgttgatgtacagtttctgaaattgttttacaagactttgataataaaacccttaaactcacaaaaaaaaaaaaaaaaaacc

SEQ ID NO: 2852 - DNA, 2752 bp, Rattus norvegicus
gtcggtccgcccgtgcgtgcgtctgtccgttcggcctccgtccggcccgcagcatggccggcgtcagcttcagcggccaccgcctggagctgctggcggcgtacgaggaggtgatccgggaggagagtgcagccgactgggctctgtacacttacgaagatggctcagatgacctcaagcttgcagcatcaggagaaggaggcttgcaggagctttcaggccacttcgagaaccagaaagtgatgtacggtttctgcagcgtcaaggactcccaggctgccttgccaaaatatgtgctcatcaactgggttggtgaggatgtgcctgatgcccgaaaatgtgcttgtgccagccatgtggccaaggtggctgaattcttccagggcgttgacgtaattgtgaatgccagcagtgtggaggatatcgatgctggcgccattgggcagcggctctccaatggactggctcggctctctagcccagtgctgcaccgcctgcgccttcgggaggatgagaatgctgagccggtgggcaccacctaccagaagacggatgcggccgtggagatgaagcggattaaccgtgagcagttttgggagcaggccaagaaggaggaggagctgcggaaggaggaggagcggaagaaggctttggatgccaggctcaggtttgagcaggagcggatggagcaggagcggcaggagcaggaggaacgggaacggcgctaccgagagcgggagcagcagatcgaggagcacaggaggaaacagcagagtctggaagctgaagaggccaagaggaggttaaaggatcagtctatctttggtgatcagcgagatgaagaggaagagtcccagatgaagaagtcggaatctgaggtggaggaggcagctgccatcattgcccagcggcctgataacccacgggagttcttcagacagcaggaacgagtggcttcagcctctggtggcagctgtgacgcaccctcgcccttcaaccaccgaccaggtcgtccgtactgccctttcataaaggcatcggacagtgggccttcctcctcctcctcttcctcctcttcccctccacggactccctttccctatatcacctgccaccgcaccccaaacctctcttcctccctcccatgcagtcacctggacagccaccggaggatggcgcccactcccattcccacccggagcccatctgattccagcacagcctccacccccatcacggagcagatcgagagggccctggatgaggtcacatcctcgcagcctccacccccacctccaccacccccaccagctcaagaggcccaggagtctgctcccagactggacggtgaagaggtctgcaaggaggccaaagtagcagcagctcctcaggtctgggctggctgtgcagaggagcctcctcgggcacaggaacctcccctgttgcaaagcagccccacggaggacttgatgtgcacagaatctcctgagcaggctgtcctggcggcctctccagagcctgatgcctctgtcacctcagtagctgatgctcatgcagctgacaccatcgagaccaccactgccactactgccaccactattgccgacaacgtcacccctgccgccgccagcctcattgatctgtggcctggtaacggggaagaggcctcaacgcctcaggctgaacccagggtgcccaccccaccctcaggtgctgaggcctccctggcagaggtgcctctgttgaatgaggcagctcaggagccgctgccaccagtgggcgaaggctgtgccaaccttcttaatttcgatgagctgccagaacctccagccaccttctgtgacccagaggaggaagccgaaggagagccgctggctgcctcccaggtcctaactatgccctcagccctagaggaggtagatcaggtgttggagcaggagttggagccagaacctcatctgctgaccaatggagagaccactcagaaggaggggacccagcaggccagcgaaggatacttcagtcagtcacaggaggaagaattcgcccaatcagaagagccatgtgcaaaggctccacctcctgtattctacaacaagcctccagaaatcgacatcacctgcygrgrtgcagacccagttcctgaagaggaagagggcttcgagggtggtgattagtagtggcgactgccccctggctgccctcgccaaggctgcccacctgcagtgcctctggccagccggcttgcagcgccagcattagcagcagccccgcctggctcccactctggattccggcactggccggggacctgtctgcttctctacccacagggcctgacttttacagcttttytyttttttttwaaagttgatagacttgtacaattgactggttttcctcccgttggtagttgaaacaatgttgcagattccacccccttcctgcccagaccagattgtagcttagtccttcctgctcagctgaccagggtggaggcctcaccctgcttgggacctggtgggggtcgggggttctggtgggaaaatgttcccccycatcacttttcctagttttatgtttcttggaaaaaaaatatcactttgtattctctatccagggcttcagatattttgcacgaaatttaaaacatggcaataaatggctcgtgggctctgrmwmmmwrrrammmmammmmwwmwmwwwaaaaaaaaaaaaaaaaaaaaaaaagttatcttatgcgcctcgtgcc

SEQ ID NO: 2853 - DNA, 1384 bp, Rattus norvegicus
gatttcttccktcaacctctttgtgtgtgaatcagctccttcaatatgagctacagtctctatttggcctttgtgtgtctgaatctcctcgctcaaaggatgtgcatccaggggaaccagttcaatgtggaggtcagcagaagcgacaagctttccttgcctggatttgagaacctcactgcaggatataacaaattcctcaggcccaattttggtggtgacccagttcggatagcgctgactctggacatcgcaagcatctctagtatttcagagagtaacatggactacacagccactatatacctccgacagcgctggaccgacccacggctggtgttcgaaggcaacaagagctttactctagatgcccgtctcgtggagttcctctgggtgccagatacttacatcgtggagtccaagaagtccttcctgcatgaagtcacggtgggaaacaggctcatccgcctcttctccaacggcacagtcttgtatgcactcagaatcacaacaacagttacatgtaacatggatctgtcgaaataccccatggacacacagacctgcaagttgcagctggaaagttggggatacgatggcaatgacgtggagttctcctggctaagagggaacgattcggtacgtggactcgaaaacctgcgccttgctcagtacaccatccaacagtatttcaccctggtcaccgtatcccagcaggagacaggaaactatacgcggttggttttgcaatttgagcttcggaggaatgtcctgtatttcattctggaaacctacgtcccttccaccttcctggtggtgttatcctgggtctccttttggatctctctcgagtcggttcctgcgagaacctgcattggagtgacaacagtgttgtccatgacaacgctgatgattggctcccgcacatccctacccaacaccaactgcttcataaaggccattgatgtttacctggggatttgcttcagctttgtgtttggggccttactggagtatgcagttgctcactacagctccttacagcagatggcagtcaaagatagggggccagcaaaggactcagaagaagtcaatatcaccaacatcatcaacagctccatctccagctttaaacgaaagatcagcttcgccagcattgaaatttctggcgacaatgtcaactacagcgacctgacgatgaaagccagcgacaagtttaagtttgtcttccgagaaaagatcggcagaatcattgattacttcacaattcaaaatcccagcaacgtggatcgatattccaaactactgtttcctttgatttttatgttggccaatgtattttactgggcatactacatgtatttttgagatgccattgaactct

SEQ ID NO: 2854 - DNA, 4475 bp, Rattus norvegicus
gcgtcacggcgcgggcggaagatggccgggttggttgcccgcagctgctaacccggcagtgcggagctggagcctggctcccgctgccgcgaagcggccgtcgccatgtcgctgctgcagtctgcactggacttcctggcgggccctggttctcttggcggagctgccggccgtgaccagagtgacttcgtggggcagactgtggagctgggcgagctgcgtctgcgggtgcggcgggtcctggccgagggagggtttgcatttgtttatgaagctcaagatctgggaagtggcagagagtatgcattaaagagattactatccaatgaagaggaaaagaacagagccatcattcaggaagtatgtttcttgaaaaaactttctggccaccccaatattgtccagttctgctctgcagcatccataggaaaagaggaatcggacactgggcaggctgagttcctcctgcttacggagctctgtaaaggacagctggtggagtttctcaggagagttgaatgtaaaggccctctatcctgcgacagcattctgaagatcttctaccagacatgcagagcagtgcagcacatgcacaggcagaaaccacccatcatccacagggatctcaaggttgaaaacttactgcttagtaaccaggggaccattaagctgtgtgactttggcagtgccacaaccatctcccattatcctgactacagctggagcgcccagaagcgagcaatggtggaggaagagatcacgaggaacaccacacccatgtacagaacgccagaaattgtagacctgtattctaacttccctattggcgaaaagcaggatatctgggcactgggctgtatcttatacctgctgtgtttccggcagcatccttttgaagatggagcaaaacttcggatagtcaatgggaagtattccattcctgtgaatgacactcgttacacagtcttccatgaccttattcgtggcatgctaaaggtcaatccagaagagaggctatccattgctgaagttgtccgacaactgcaggaaattgcagcagcccggaatgtgaaccccaaagcccccatcacagaacttctggagcagaatggtggctatgggaactcagggccttcccgagcacaaccaccttctgggggccctgtgaacagcagtggagttttggctctggcagagtatgaccagccctatggtgggtttctcgatatcctacggggtgggacagaacggctcttcaccaacctcaaggatacttcctccaaggtcatccagtctgtggctaactatgcaaagggcgatcttgacatatcttacatcacatccaggattgcagtgatgtcgttcccagcagaaggtgtggagtcagcaatcaaaaacaatatagaggmtgtacgattgtttctggatgccaagcatccaggacattatgctgtctacaacctttctccaagaatataccgggcttccaagttccacaatcgggtcactgagtgtggctgggcagtcaggcgggcaccacatctccacagtttgtatactctatgcaggagcatgcatgcctggctccgggaagaccacaggaacgtctgtgttgtacattgcatggatgggagagctgcgtctgctgtggcagtctgtgcattcctgtgcttctgccgtctcttcagcactgcagaggctgctgtgtacatgttcagcatgaagcgctgcccaccaggcatttggccatcccacaaaaggtacattgaatacgtgtgtgacatggtggcagaggaacccatcacgccccacagcaagccaatgctggtgaaatctgttgtcatgacccctgtgccactgttcagcaagcagaggaatggctgccgaccattctgtgaggtctatgttggggaggagcgtgtaaccaccacatcccaggagtatgacaggatgaaggaatttaaaattgaggatggcaaggctgtcatccccctgggcataacagttcaaggcgatgtcctcaccatcatttaccatgccagatccactttaggagggagactgcaggccaagatggcgtccatgaaaatgttccagattcagttccacactgggttcgtgcctcgaaacgcaaccactgtgaaatttgcaaagtatgacctggatgcttgtgacattcaagagaagtacccagatctgttccaggtgaacctggaagtggaggtggagcctagagacaggcccagccgagacgttccaccttgggagaataccagcctaagggggttaaaccccaagatcctcttttccaacagggaagagcaacaggacattctgtctaagtttgggaaaccagagctaccccggcagccgggctccacagctcagtatgatgctgaggcagggtctccagaggctgagatcacagagtcggactcaccacagagcagcagcacggacaccaaccactttcttcacacactggattggcaggaggaaaaagacccagagactggtgtagacaatacctctcctaaggagagtcagtctaacctgattgcagatggagatggaagtgaagtatcagatgaagaagaggcttcatgccctagtgaagagagaaagcctggggctggagaagatacaccaaggctggcagctgggaccagacagcaagacttaatatttgatgtgggcatgctggctgccccacaggagcctgtacagcctgaagaaggtgtcgatctcctggggctgcactctgaaggggacttaaggcctgctgctcccttgcaggctagcggggtccagtctagcaacactgacctgttgagctcccttcttgaaccatctgatgcttctcaagtgggacctcctggtgacctgcttggtggtgagactcctctgctgttagcaagcccagtttctcttcttggggtgcagagcaacctgcaaggaaaagtccctgacactgtggacccatttgaccagttcctgctgccatccagctcggacacccagccctgctccaagcctgatctctttggagagtttctcaactctgactctgtagcttcctcaactgccttcccatcgacccacagcgscccacccccatcctgcagcactgccttcctgcacctgggagatctgccagcagagcccaacaaggtgattgcttcatccagccacccagatctgctaggaggatgggatacgtgggctgagactgctctacctgggccggcctccatgccagtaccagaaggtactctcttctcttctgcaggtcacccagcccctccaggccccaaccccagccaaaccaagtctcagaacccagacccatttgctgacctcagtgatctcagctctagcctccaaggcttgcctgctggacttcctgcagggagcttcgtkggcacatcagccaccactcacaaaagcaacagctcctggcagacaactcgtcccacagcccctggaacctcatggcccccgcaggccaagccagcccccagagcctctgaacaactaaggtctcactttagtgtgattggggcccgagaagagagaggtgtccgtgcgcccagctttgcccaaaagccaaaggtctcagaaaatgattttgaagatctgctgcctaatcaaggcttctctaagtctgacaagaaggggccaaagaccatggcagagatgcggaaacaggaacttgccagagatacagacccattcaaattgaagcttttggactggattgaaggcaaagagaggaatattcgtgcactgctgtccactctgcacacagtattgtgggrtggggagagccgctggacacctgtgagtatggctgacctggtgactccagagcaggtgaagaagcagtaccgccgtgcagtgctggtrgyrcrwsstgataaggccacagrkcwgcyakrwgrayrgkmtrcyrrgmtgawctkcatskasctgaatgatgcatggtctgagtttgaaaaccagggctcaaggcccctcttctgaggcctgtgatgactatgsctgcargagctgctcatgaatcctgaatgctgctggcctgactgaggcacaaatgggaccataacaggtgyggcasgwgrtatcgcyccaggggcctggaccatctactcccaatcatccctgcattcatcatggmsaaataccattccatggctgggagagaaagcattcctcagatctgatatttgktgttttkwttttywtwttyttktcccrgaggaaaagtgttgatttatattccttccacagctgtcacaatttgtgatttacttggtgthtggtggctgtcacctcttgaatggcacatgtcgctggcamttctctcctgtaatttytycaaatatggggtgcatccacaccccactytgataagtttgccaatcatctgtacataattaamctmktkyccgatrrmwraaaaaaaaaaaaaaaaa

SEQ ID NO: 2855 - DNA, 1080 bp, Rattus norvegicus
atgactctggagtccatgatagcgtgttgcctgagcgacgaggtgaaggagtcgaagcgcatcaacgcggagatcgagaaacagctgcggcgagacaagcgcgacgcccggcgcgagctcaagctgctgcttctcggcactggcgagagcgggaagagcaccttcatcaagcagatgcgcatcatccatggcgccggctactcggaggaggacaaacgcggcttcacaaagctggtgtaccagaacatcttcaccgccatgcaggctgtggtgcgcgctatggacacgctcaagatccgctacaagtatgagcagaacaaggccaatgcactcctgatccgggaggttgatgtggagaaggtcacgacttttgagcatcagtatgtgaacgccatcaagacactgtggagtgaccctggtgtccaggagtgctacgatcgcaggcgagagttccagctctctgactcggctaagtactacttgacggacgtggaccgcatcgctacagtaggctacctgcccacccagcaggatgtgctgcgggtacgtgtgcccacaactggcatcatcgagtacccgtttgacctggagaacatcatcttcaggatggtggatgtgggcgggcagaggtcagagcgcaggaagtggatccattgctttgagaatgtcacgtccatcatgttcttggtggcattaagcgagtatgaccaggtcctggtggagtcggacaaygagaaccgcatggaggagagcaaggccctgttccgcacaatcatcacctacccctggttccagcactcgtctgtgatcctcttcctcaacaagaaggaccttctggaagacaagatcctgcactcacacttggtcgactacttccccgagttcgatgggccacagagggacgcacaggccgcccgcgagttcatcctgaagatgtttgtggatctgaaccccgacagcgacaagatcatctactcgcacttcacctgcgccacsgacaccgaraacatccgcttcgtgtttgctgccgtgaaggacaccatcctgcagctgaacctgaaggagtacaacctggtctga

SEQ ID NO: 2856 - DNA, 1423 bp, Rattus norvegicus
aggccggggcccgcgcgccatggacgcccctcagccggcgcggcgcggccgcggcctgagggcggtcatgtccggggtggtgcggaccctcagccgctgcttgctgccggccgaggccggagcccgcgagcgcagggcgggcgcggcgcgcgacgcggaacgcgaggcccgacggcgcagccgcgacatcgacgcgctgctggcccgcgagcggcgcgcggtgcggcggctggtcaagatcytgctgctgggcgccggcgagagcggcaagtccaccttcctcaagcagatgcgcatcatccacggccgggagttcgaccagaaggcgctgctggagttccgcgacaccatcttcgacaacatccttaagggctcgagggtgcttgtagacgctcgggacaagcttggcattccctggcagcactctgagaacgagaagcacgggatgtttctgatggccttcgagaacaaggcagggctgcctgtggagcctgccaccttccagctctacgttccagccctgagygcactctggagagactccgggatcagggaasccttcagccgcagaagcgagttccagctgggtgagtcagtgaagtacttcctggataacttagaccggattggccagctgaactacytccccagtaagcaagacatcctgttggctagaaaggccaccaagggaatcgtggagcatgacttcgtgataaagaaaatcccatttaagatggtggatgtgggcggccagaggtcgcagcgccagaagtggttccagtgcttcgacgggatcacatcgatcctgttcatggtgtcctcaagcgagtatgaccaggtcctcatggaggataggcgcaccaaccggctggtggagtccatgaacatcttcgagaccatcgtcaacaacaagctcttcttcaacgtctccatcatcctcttcctcaacaagatggacctgctggtggagaaggtgaagtcggtgagcattaagaagcacttcccagacttcaagggcgacccgcaccggctggaggacgtccagcgctacctggtccagtgctttgacaggaagcgcaggaaccgcggcaagcctctgttccaccacttcaccactgccatagacaccgagaacatccgcttcgtgtttcatgccgtgaaggacaccatcctgcaggagaacctgaaagatatcatgctgcagtgagacagcccctctgccagtcctctcgtggcctctgtgtggccacatgtctctggtgtgtctgccacctgcatggacctgcagtgggcatctcgaagccacaccatctaatacctggcactaagaatgctggactgtcagccacaccagcgagctgcgggcaagaggatgggagtgtcagtgatagctactgaatcggggactgaaactactgaatcc

SEQ ID NO: 2857 - DNA, 1267 bp, Rattus norvegicus
cggccgccgctgcctcgggggagcgagggcggagggcgtgkgtgcgcgcgtgtgagcagggcgccggcggggctgcagcgaggcacttcggaagaatgactctggagtccatcatggcgtgctgcctgagcgaggaggccaaggaagcccggaggatcaacgacgagatcgagcggcagctgcgcagggacaagcgcgacgcccgccgggagctcaagctgctgctgctggggacaggggagagtggcaagagtacckkcmkywmsmasatsagratcatccacgggtcggggtactctgatgaagacaagaggggctttaccaaactggtgtatcagaacatctttacagccatgcakgccatgrtcagagctatggacactctcaagatcccatacaagtatgaacacaataaggctcatgcacaattggttcgagaggttgatgtggagaaggtgtctgcttttgagaatccatatgtagacgcaataaagagctkgtggaatgatcctggaatccaggaatgctacgatagacggcgagaatatcagctatctgactctaccaaataswatctgaacgacttggaccgtgtggctgacccttcctatctgcctacacaacaagatgtgcttagagttcgagtccccaccacagggatcattgagtaccccttcgacttacagagtgtcatcttcagaatggtcgatgtaggaggccaaaggtcagagagaagaaaatggatacactgctttgaaaacgtcacctcgatcatgtttctggtagcgcttagcgaatacgatcaagttcttgtggagtcagacaatgagaaccgawtggasgagrgcaaagcactctttrgaaccattatcacatatccstggttccagaactcmtctgttattmtgttcttaaacaagaaagatcttctagaggagaaaattatgtattcccacctagtmgactacttcccagaatatgatggaccccagagagatgcmcaggcagcacgagaattcatcctgaagatgwtcgtggacmtgaaccccgacagtgacaaaatcatstactcgcacttcacgtgtgccacmgacacsgagaacatccgcttcgtgtttgctgctgtcaaggacaccatcctgcagctgaacctgaaggagtacaatctggtstraccacgcctcccagaacccattcttccmttccccatgggctgttgaagataaacaagwgggactgtacttctgtggaaaaaaaaaaaaaaaaa

SEQ ID NO: 2858 - DNA, 3417 bp, Rattus norvegicus
ggggagagatggatagcaagcaagggagggagagagggagtgggaggaggaggaggaggagagggagcccaacgaccatttaaagcgatagcaatccctgccctctccccagtgcttggctgttggagagcgcaagaggcaagccagggaacggggagcgcaagctggtgcgccggccagcggagccacagtgccaggtgccaaagactggctgacgccctgggacacccccaccctctcctgctgcacctcctcggtctcctccaccctctgtgcctacagaagtccctgggcttcccccaaaggagctcacctccagaagcccggacctgggagagcccaccagcataccctccagcgccgccgccgccgctaccgcagcagcatccggagcggcatggtccagctggggaagctgctccgcgtcctgactttgatgaagttcccctgctgcgtgctggaggtgctcctgtgcgtgctggcggcggcggcgcgcggccaggagatgtacgccccgcactcgatccggatcgagggggacgtcacccttggggggttgttcccagtgcacgccaagggtcccagcggagtgccctgcggcgacatcaagagggagaatgggatccacaggctggaagctatgctttatgccctggaccagatcaacagcgatcccaacctgctgcccaatgtaacgttaggcgcgcggatcctggacacttgttccagggacacttatgcgctcgaacagtcgctcactttcgtccaggcgcttatccagaaggacacctccgacgtgcgttgcaccaacggagagcccccggttttcgtcaagccagagaaagtagttggagtgattggggcttcggggagctccgtctccatcatggtagccaacatcttgaggctttttcagatccctcagattagttatgcatccacggctcctgaactcagtgatgaccggcgctatgacttcttctctcgagtggtcccgcctgattccttccaagcccaggcgatggttgacattgtaaaggctttgggctggaattacgtgtctactcttgcatctgaaggaagctatggagagaaaggtgtggagtccttcacacagatttccaaagaggcaggtgggctctgcattgcccagtccgtgagaatcccccaagagcgcaaagacaggaccattgactttgatagaattatcaaacagctcttggacactcccaactccagggccgtcgtgatttttgccaacgatgaggatataaagcagatccttgccgccgccaaaagagctgaccaagtaggccattttctctgggtcgggtcagacagctggggttccaaaatcaacccactgcatcagcacgaagatattgcggaaggagccataacaatccagcctaaaagggcaaccgtggaaggatttgatgcttacttcacatcccggacacttgaaaacaacaggagaaatgtatggtttgccgaatactgggaagaaaacttcaactgcaagttgacaattagtgggtccaaaaaagaagacacagatcgcaaatgcacaggacaggagcgaattggaaaagactccaattatgagcaggaaggtaaagtacagtttgtgattgatgctgtctatgccatggcccatgctcttcatcacatgaacaaggatctgtgtgctgactaccgcggagtgtgcccagagatggagcaagcaggcggcaagaagttgttgaagtatatccgccatgttaacttcaatggtagtgctggaaccccagtaatgtttaacaaaaatggcgatgctccagggcgttatgacatcttccaataccagacaacaaacacaaccaaccctggttatcgtctcattgggcagtggacagatgaacttcagctcaatatagaggacatgcagtggggcaaaggagtccgagagatcccatcctctgtgtgtacattgccatgcaagcctgggcaaaggaagaagacacagaagggaacgccttgctgctggacctgtgagccctgtgatggataccagtatcagtttgatgagatgacctgtcagcattgtccctacgaccagaggcccaatgagaaccgaactggctgtcagaacatcccaatcatcaaactggagtggcactccccctgggctgtcattcctgtcttcctggcaatgttggggatcattgccaccatctttgtcatggcaactttcatccgctacaatgacacacccattgtcagggcatctgggcgggaactcagctatgttttattgacaggcatctttctctgctatatcatcaccttcctaatgattgccaaaccagatgtggcagtgtgttctttccgacgtgtcttcttgggcttgggcatgtgtattagttatgctgcccttttaacaaagaccaatcggatttatcgcatattcgagcagggcaagaaatcggtgacagctcccagactcataagcccaacgtcacaactggcgatcacttccagtttaatatcggtgcagcttctaggtgtcttcatttggtttggggttgacccccccaacattatcatagactacgatgagcataagaccatgaacccagaacaagcaaggggtgttctcaaatgtgacatcacagaccttcaaatcatttgttccctgggatatagcattcttctcatggtcacatgtactgtgtatgccatcaagactcggggcgtaccagagaattttaatgaagccaagcccattgggttcactatgtacacgacgtgtatcgtatggcttgccttcatcccaatattttttggcacagcgcagtcagcagaaaagctctacatacaaactaccacgcttacaatctccatgaacctaagtgcgtcagtggcgctgggaatgctatacatgccgaaagtgtacatcatcattttccaccctgaactcaatgtccagaaacggaagcgaagcttcaaggccgtagtcacagcagccaccatgtcatcaaggctgtcacacaaacccagtgacaggcccaacggtgaggcaaagacagaactctgtgaaaatgtagacccaaacagccctgctgcaaaaaagaagtatgtcagttataataacctggttatctaacctgttccatgccatggagccacagaggaggaagaccttcagttattctgtcacccassstggcattggactcttggtcctgcccgcttcctatctctggaggagcttctcswsccgggagagcaatgttagaggatccacacatcctgaacagctgctttatgagacacctttactttatcttggcttaagaagtcattggcatcagcactgccatcttggctgtaattctggactccctaagcaaagggagagttgagactcaagtccca

SEQ ID NO: 2859 - DNA, 1068 bp, Rattus norvegicus
cttcattcagcsscsygkkcykcwsgwmttmmgtttctagttcccggccggtgagccactccggcttttcgcggtctacttgtcccagcgtccggctctggactgtctatcgctctctgacgttcagtcccgggtcgctgcttgtgcgcgcacgccgcctcacacgacaaacttatggcggagcgcggggaactcgatctgacgggcgccaaacagaacaccggcgtgtggctggtgaaggttcctaaatatttgtcccagcaatgggcaaaagcccctggaagaggtgaagttgggaaactgaggattgccaagaatcaaggaaggactgaggtatcatttactttgmayraggatcttgcgaatattcatgatatcggtgggaaaccagcttcagtcagtgmtcctagagaacatccatttgtcttgcaaagtgttggaggacagacattaacagtgttcaccgagagctcctcagataaactgtcattggaaggaatagtggttcagagrgcggaatgccgacctgctgccagtgaaaactacatgaaactaaagagattgcaaatagaagaatcttccaaacctgtaaggctctcacaacaggctgacaaarktgtawccmccaattacaagcctgtcgstwaccatcagtmcaatattkratwtkaaaggaagaagaaagaagwtggwaarcgagcwysggcagacaaacaacacgtyctagacatgctgktctyarmctttgagaaacatcartactataatcttaaggacytggtggacayyacaaagcaacctgtgggatacctgaaagaaatcttgaaagaaatcggcattcagaatgtaaaaggaattcacaagaatacgtgggagctgaagccagagtacaggcattaccaaacagaggagaagagcgaytgagagaagcgtgtgcaacagttacaggcagatctytgccaccacacgctgactgcctgcccaccctgacaggacaaagacaactgagtctgtctgccattcctcagtaaactgttaaagctgggactccawaaaaaaaraaaaaaa

SEQ ID NO: 2860 - DNA, 1670 bp, Rattus norvegicus
gcctacaggcgcccggctcctccgacccaccgtccagcacyatgacagatcaggcttttgtgacgctcaccacaaacgatgcctatgccaaaggggcgctggtcctgggctcatctttgaaacagcacaggactactaggaggacggttgtactcgccagcccacaggtttcagactccatgagaaaagttttagagactgtctttgatgaagtcatcatggtagatgtcttggacagtggtgattctgctcatctaaccttaatgaagaggcctgagttgggcatcacgttgactaaactccactgctggtcactcactcagtattccaaatgtgtgttcatggatgcagatactctggttctctcaaatattgatgatctttttgaaagagaagaattgtcagcagcaccagacccagggtggcctgactgtttcaattctggagtctttgyytatcamccctcaattgaaacgtataaccagctgttgcatcttgcttctgagcaaggtagttttgatggtggggaccagggcctactgaatacatattttagtggctgggcaacgacagatatcacaaaacacttgccatttgtgtataacctgagcagcctctcaatatactcctacctcccggcatttaaagcgtttggtaaaaatgccaaagttgtgcacttcctgggacgaaccaagccatggaattacacgtacaatccccaaacaaaaagtgtcaaatgtgaatcccaggacccaattgtgagtcacccagagtttctgaacctgtggtgggacaccttcaccaccaatgtcttacccctgctccaacaccatggccttgtcaaagatgccggttcctatctaatgatggaacatgtcacaggagccttgtcagacctgtcctttggggaggccccacctgcatcacagccttctttgtcctcagaagaaaggaaggaacggtgggaacagggccaggctgattatatgggagcagattcttttgataacatcaagagaaaacttgacacttacctacagtagaagcactgccattttcttgtggacacatccatswckwrggcacrtttcgatacatagtatgtgaagtctgttacaattgttagaggctttcactaaacctcagcaratgaggggtttgggcaggacaacaggtgagaactgggcaaatgttattaagtaataaywckaktatgtggacaagtgytgtgtttaaccctagactttttcaaaaactctaaattcttaaatygscarwgkgtgataaagaaaagccaacattragctactaaattaggctctttcaaatggtgcagaacttgactctccatcttcaaaacaaggtatgagattctccaatatttgcttgttgtatccttcactagacctgcaatgtagaattgttcaaagcctgtcagagaagtagccttctagactaaagtggcctttattaacactgcggagtgattcataagcctaccagctagtgttagttcaccagttttctatgcaccatgaaggcggcatgcagacctgctctttctcagttatctacttgaaaattgcagtgtgctctctgayggtagctgyggaagcactgtgtataacaaataaagacttattgacmtmmmwmamaaaaaaaaaaaaaaa

SEQ ID NO: 2861 - DNA, 1818 bp, Rattus norvegicus
cgcgccgcggrmtksyggrctcggctgccgctccggtgtcgggagatgaccctgcccggacacccgacgggcatggcgcgaccacggggcgcggggccctgcagccccgggttggagcgggctccgcgccggagcgtcggggagctgcgcctgctcttcgaagcgcgctgcgccgcagtcgccgccgcagcggccgcaggggagccccgggcccgcggggccaagcggcgtgggggacaagtgcctaacgggctcccgcgtgctgcccctgctccggtgatcccgcagctcactgtgacaagcgaggaggatgtggccccggccagccccgggccgccggaccgggaggggaactggctcccagctgcggggtcgcacctgcagcagccacgccgcctctccacctcgtccctctcctccaccggctcctcgtcgctgctcgaggactcggaggacgacctgctgagcgacagcgagagccggagccgcggcaacgtgcagctggaaaccagcgaagacgtggggcagaaaagccattggcagaagatccgtaccatggtcaacctgcctgtcatgagtcctttcaaaaagcgctactcctgggtgcagttagcagggcacacagggagtttcaaagctgcgggcaccagcggcctgatcctgaagcgcagctcggagcctgaacactactgcctggtgcggttgatggctgatgtgctgcgtgggtgtgtgccggccttccacggtgtggtcgagcgggatggtgaaagctacttacagttacaggacctgcttgatggcttcgatgsacmkkgcgtgcttgactgcaagatgggtgtcagaacttacctggaagaagagctgaccaaagcccgagaacggcccaagctgcgaaaggacatgtataagaaaatgctggccgtggaccccgaggcacctactgaggaggagcatgcgcagcgtgccgtcacaaaacctcgatacatgcaatggcgcgaaggcatcagctccagcactacactcggcttccgcatcgagggcatcaagaaagccgatggatcttgcagtactgatttcaaaactacacgaagcagagagcaagtgactcgagtctttgaggagttcatgcaaggagatgctgaagtgctgaagaggtatctgaaccgcctacagcagatccgggataccctggagatctctgatttctttagacggcacgaggtgattggcagctcactcctcttcgtgcatgaccattgccatcgcgctggtgtgtggctcatcgattttggcaagaccacgcctctccccgatggccagatcctggatcatcggaggccctgggaggagggcaatcgtgaggacggctatttgctggggctggacaatctcattggcatcttgsccaacctggctgagagatgaggctgggccttttccctcagcttgggccagctggtcagagatgtggacctgtggctgcatccccaccatgcatgccggcaagagactggaaccccgctggcggcagttcacatggtcctggaggacyaggtgccatccactaagggggtgtagtacattaggagctggcttctacacaagcctgyctcccagagctgaatgacactaatttataggagaggaaggaaacagtgggcttctcccccagccttgtcaagtgactttgcacctctccagagggtcccgatccagaattgtacttcacaggtatatagacttactggtctaacttcctacactaccatggacacccttcctaataaaactcaaagattcaaaaaaaaaaaaaaaaaa

SEQ ID NO: 2862 - DNA, 10716 bp, Rattus norvegicus
gggacgcagagggagcgcgggccagggaggaggagcgaaggtgtaggacagaacttcgccaggaacaggaaacccacggccgggcaggggcggcgacggcggcgcggggccatcgcagtgtccccagcggkggcctcgctgccgcgtcccgagctgagccgcttggacccctcggactcagaggacccaagctcacccttgcgagcagcggagacagcggggacggcctcacgagcgtgaagcagcatgtctgacaaaatgtccagcttcctctacattggggacatcgtgtccctgtacgcggagggctcggtcaatggcttcatcagcaccctggggttggtggatgaccgttgtgtggtgcacccggaggcgggggatcttaccaacccacccaagaagttcagagactgcctcttcaaggtgtgccccatgaatcgatactctgcccagaagcagtactggaaagccaagcaggcgaagcagggaaaccacacggaggctgccctgctgaagaagctccagcacgccgcagagctggaacaaaaacagaatgagtcagagaacaggaaacttttgggagaaattgtgaaatacagcaamgttatacaactactgcacataaaaagcaacaagtacctcaccgtgaacaagaggttacctgccttactggagaagaatgccatgcgtgtgtccctggatgctgcagggaacgaagggtcctggttctacatccatcccttctggaagctgagaagcgagggtgataatatcgtcgtgggagataaagtcgttctgatgcctgtaaatgctgggcagcccctgcatgccagcaacgtggagctcctggacaaccccggctgcaaagaggtgaatgctgttaattgcaacactagctggaaaatcactttattcatgaagttcagctcctaccgagaggatgtattaaaagggggtgacgttgtgagactgtttcatgcrgaacaagagaagtttctgacctgtgatgactatgagaaaaaacagcacattttcctgcggacgaccttgcgtcaatcagcaacgtcggccactagctctaaagcactctgggagatagaggtggttcaccatgatccatgccgcggaggtgcaggacagtggaacagcctgttcaggtttaagcatcttgcaactgggaactacttagctgcagagcttaaccctgactatcgagatgctcaaaatgaaggaaaaactgtgagagacggggagcttccaacctcaaagaaaaaacrccaggcaggggagaagatcatgtacacgctggtctcggtcccgcacggaaatgacatcgcgtccctttttgaacttgacgccacaactctgcagagagctgactgcctggttcckaggaactcctacgtgcggttgaggcacctgtgtaccaacacgtgggtaacaagcaccagcatccccatagacacrgaggaagagaggcctgtcatgctgaaaattgggacctgccagaccaaggaagacaaagaagcctttgccatcgtgtgcgtcccgctgtctgaggtccgagacctggactttgccaacgatgccaacaaagtrttggccaccacggtgaagaagctggagaayggcagcatcacccagaatgagaggaggtttgtgactaagttgttggaagacctyattttctttgtggctgatgtgaccaacaacggacaggatgttctggatgtggtcatcaccaagcccaaccgggaacggcaaaaactaatgagggaacagaatattctggcacaggtgtttgggatccttaaagcccctttcaaggagaaggctggggaaggctcgatgctgaggctggaggacctgggcgaccagcgctatgccccgtacaagtacgtgctgcgtctctgctaccgygtgctgmggcattcgcagcaggactacaggaagaaccaggagtacatygctaagaacttctgcgtcatgcagtctcagatcggctatgatattttggcagaagatacgatcacagccttgctacacaacaaccgcaaactcctggagaaacacatcacggccaaagaaatcgagaccttcgtcagcctgctcaggaggaaccgggagccgaggtttctggactatctgtctgacctctgcgtgtccaatagcaccgccatccctgtgactcaggagctcatctgcaaattcatgctgagccccggcaatgcggacatcctcattcagacgaagctggtgtccatgcaagtggaaaaccccatggagagytccatccttcccgatgacatcgacgacgaggaggtttggctttactggattgacagcaacaaggagcctcacggcaaggccatcaggcacctggcccaggaggccagggaaggcaccaaggctgacctagaagtcctgacctattacaggtaccagctaaacctctttgcaaggatgtgcttggaccgccagtacctggccatcaaccagatttcaacacagctgtctgtrgacctgatcctgcggtgcgtgtctgacgagagcctgccctttgacctccgagcctctttctgccgactcatgctccacatgcatgtggaccgggacccccaggagtctgtggtgcctgtccgmtacgcccggctctggactgagatccccaccaagatcacgatccatgagtatgactccatcacagactcttccagaaatgacatgaagaggaagtttgccctgacaatggaatttgtcgaagaatatttgaaagaagttgtgaatcaaccgtttcctywtggggayaaagagaaaaataaactgacatttgaggtrktyyammwrrmmmrraammwmatctacttcggattctacagcttcagcgagttgctgcggctgacgagaactctgctggcgatcctggacatcgtccaggcccccatgtcgtcgtattttgaaagattaagcaagtttcaagatggaagcaacaatgtcatgaggaccatccacggggtgggagagatgatgacacagatggtgctcagcagaggctccattttcccagtgagckkgcccgacgcacagcccagcgtccaccccagcaagcaggcgagccccggcgagcaggaggatgtgacggttatggataccaagctaaaggttatcgagattttacagttcatcctgagtgtcaggctggactaccgtatctcttacatgctgtccatatacaagaaggaatttggggagaatgatggcaacggtgacccctctgccagcggcaccccggaaacattgctaccatcagctcttgtccctgacattgatgagattgcggctcaggcagaaacgatgtttgctggaagaaaagaaaaaactccagttcagcttgatgatgagggaggcagaaccttcttaagagtcctcatccacctgatcatgcatgactatgctccactgctgtccggggccctgcagctgctgttcaaacacttcagccagagagcagaagtgcttcaggccttcaaacaggtgcagttactggtgtcgaaccaagatgtcgataactacaagcaaatcaaggcagacctggaccaacttcggctgacggtggagaagtccgagctatgggtggaaaagagcggcagctatgagaatggagacatgggcgagggccaggccaaaggaggcgaagaggcaaacgaggagtccaacctcttgagcccggtgcaggacggcgcgaagacacctcagatcgacagcaacaagggcaacaactaccggatcgtcaaggagatcttgattaggctgagtaagctctgtgtgcagaacaagaaatgtcgtaatcaacaccaacggttgctgaaaaatatgggggctcactccgtggtactggaccttctgcagatcccctatgagaagaccgacgagaagatgaacgaggtgatggacttagcccacaccttcctgcagaacttctgccgcgggaatccacagaaccaagttctccttcacaagcatctcaacctgttcctaacccctggactcctggaggcggaaaccatgcggcacatcttcatgaacaattaccatctgtgcaatgagatcagcgagagggtggtccagcactttgtgcactgcattgagacacacggccgccacgtggagtacctgaggttcctgcagaccatcgtgaaagcagacggcaaatacgtgaagaaatgccaggacatggtgatgaccgagctgatcaatgggggtgaagacgtactgatattctacaacgaccgagcctcatttcccatccttctyaacatgatgtgctccgagagagcccgtggggatgagagcggccccctggcctaccatatcacccttgtggagttgctggcagcgtgcactgaggggaagaacgtctacacggagatcaagtgcaattctctcttgcctctggacgacatagtgagggtggtgacccacgacgactgcattcctgaggtaaaaattgcatacgtgaactttgtcaaccattgttacgttgacacagaagtggagatgaaggaaatctatacaagtaaccacatttggaagttatttgagaacttcttggtggatatggcaagggtctgcaacaccaccacggaccggaaacacgcagacacctttctggagaggtgtgtgacagagtcagtcatgaacatcgtgagyggcttcttcaactcgycgttttcggataacagtaccagcctccagacccatcagccggtctttatccagctgctgcagtccgccttcagaatttacaactgcacctggcccaacccagcccagaaagcctccgtggaatcctgcatcagagccctggctgaagtggccaaaaaccgtgggattgcgattccggtggatttggacagccaggtcaacacactcttcatgaagaatcactcaagtacagtgcagagggcggccatgggctggaggctctctgctcgctccggacctcgcttcaaggaagctcttggagggccagcatgggactacaggaatattattgaaaagttacaggatgtcgtggcctctctggaacagcagttcagccccatgatgcaggctgagttctctgtgcttgtggatgtgctgtacagcccggagctactgttcccagaaggaagcgatgccaggatacgatgtggtgccttcatgtccaagctgattaatcacacaaagaaactgatggaaaaaraaraaaaamwrtgcattaaaatcctccagacgttacgggagatgctggagaagaaagacagcttcatggaagagrgtagcacattacggaaaatcctcctgaatcggtacttcaagggtgaccacagcgttggtgtgaacggacctctgtcaggagcctacgccaagacagcacaagtgggagggggcttcactggacaggatgccgataagacggggatttccatgtccgatatccagtgtttgctggacaaggaaggggcctccgaacttgtcatcgatgtcattgtgaacaccaaaaacgacaggatyttttccgagggcatcttgcttggcattgccctgctggaaggaggaaacacacaaacccagaattctttctaccagcagttgcatgaacaaaaaaagtcagagaaattcttcaaagtcctttacgatcggatgaaggctgctcagaaagagatcagatccacggtgactgtcaacaccatagacttagggagcaagaagagagaggaggacagtgacctcatggccttgggccctcggatgagagtgagagactcatcgctgcatttgaaagagggaatgaaagggcagttgactgaggcgtcttcagccacgtccaaagcatactgtgtgtacagaagggaaatggacccagacattgacacgatgtgcccgggacaggaagcaggaagtgcggaggaaaagtctgcagaggaagttaccatgagcccagccatcactatcatgcggcccatcctcaggttcctgcagttactgtgtgagaatcacaaccgggagcttcagaacttcttgaggaaccagaacaacaaaacaaactacaaccttgtctgtgaaacacttcagtttctggactgcatctgtggaagcaccacagggggcctaggcctgctggggctctacatcaatgagaagaacgtagctctggtcaaccagaccctggagagcttgaccgagtactgccagggcccgtgtcatgagaaccagacctgtatcgccactcacgaatccaatgggattgacatcatcatcgccttgattctgagtgacatcaaccctctgggcaagtacagaatggacctggtgctacagctgaagaacaacgcctccaagcttctgctggccattatggagagcagacacgacagtgagaatgcagagagaattctcttcaacatgagacccaaggaactggtggatgtcatgaagaatgcctataaccaaggcctggaatgtaaccatggggacgaggagggaggagatgatggtgtttctccaaaagacgttggacacaacatctacatcctggcccatcagttggcccgccacaataaactcctacagcagatgctcaagcctggatccgatccagaggaaggggatgaagccttgaagtactatgccaaccacaccgcacagatcgagattgtgcggcacgaccggactatggagcagattgttttccccgtccccaatatctgcgaattcctcactcgggaatccaaataccgggtgttcaacacaacggagagggatgagcaaggaagcaaggtgaacgacttcttccagcaaacggaagatctctacaacgagatgaaatggcaaaagaagatcaggaacaaccccgccctgttctggttctccaggcacatctccctgtgggggagcatctccttcaacctggctgtgttcatcaacctggccgtggctctcttctacccattcggggatgacggcgatgaaggtacgctctccccgctgttctcagccctcctttgggtagcagtggcgatctgcacgtctatgctgttcttcttctccaagcctgtgggcatccggccattccttgtgtctatcatgctcagatcaatatacaccatcggtctggggccaacgctaatacttcttggtgctgccaatctatgcaataaaatcgtgttcctggtgagttttgtgggaaaccgaggcacrttcacccgagggtaccgagcagtcattctggacatggcctttctttaccacgtggcctatgtcytggtttgcatgcttggcctcttcgtccacgagttcttctacagcttcctgctttttgacttggtgtacagagaagagaccctgctgaacgtcatcaaaagcgtcacacggaatggccgctccatcatcctgactgcggtcttggctcttatcctggtctacctgttctccatcatcggcttccttttcttaaaggatgacttcaccatggaggtggacagattgaaaaacagaactccagtcacaggtaacgacggggttcccactatgaccttaacttccatgctgggaacctgccctaaggaaaactgctcacccacgatcccctcttcgaatgcagccggtgagggaggtgaggacggcatcgagaggacctgtgacaccctgctcatgtgcattgtcaccgtgctgaaccagggcctcaggaatggtggcggagttggtgacgtgctgagacgaccctcraaggatgagcctttgtttgctgcccgggtggtctacgacctccttttcttcttcatcgtcatcatcatcgtccttaacctgatttttggtgtratcattgacactttcgctgacctcaggagtgagaagcagaagaaagaaraaattctcaagacaacctgcttcatctgtggcttggagagggacaagtttgataacaagacggtgtcctttgaggagcacatcaagtcagagcacaacatgtggcattacttgtacttcatcgtcctggtgaaggtgaaggacccaacagaatacacagggcctgagagctacgtggctcagatgatcacagagaagaatttagactggtttcctcggatgcgagccatgtcacttgtcagcaatgaaggtgacagtgagcaaaatgagatccggaacctgcaggagaagctggagtccactatgagtctggtgaaacagttgtcggggcagctggcagagctgaaggagcagatgacagaacaaaggaaaaacaagcaaaggctgggcttccttggatcaaacacaccccatgwgamccatcacatgccaccgcactgacaccatgggggcacgccrtgaccagcctttcatcagatgcctgcctcatcgctgagggatggagatggaggggagcgaacagtggctattgttgaaaagctgaaaacaaccaagtgccaaggtgctgagccattcagctcccagaacaatctgtaactgtgtttgcacgcttgagaaggttcaagcttggaaaaraacaaaacaaaacagtatagggcacagcctctccatgtggcaggaagcgsccagcctgaggggctggagggggtgggagagtctgatcggggagcggcagacctccccctgctcgatcgataggccttggacttgtctcacacactgactgcagtgtccatcgtggctggttgaaattttttcttcaaactgtggcactggggtcagcgagacaggaagccmcactctgctggctaagtctaagaaatttaaaagattaaaaaggagawttgaaaarrrwrwmrwwaaamwwmmraaccttacgtgttaactggacattttcttcttggcatgagacgggctcagagcactacccctcagtgytttggagttcacaccccacccactgcaaaacataactgggatcagggtggctgtgtccagagctctgtacagggctgtgcaacagaaagctttcatagaattggctaagactgctcaaagcctggtgcctatgtgctgagatgttaaagacttggggaagagaagcttgtctgtaacactcaggawacaacgtttscagtgtatatgctactaaagtatgtgggcattgaaagaaaaactcgagggtaacagcccaacactgagaagcgttactcgggtggccttgcctttaaaagcaggttratttatatttgaggtgcttgacccaagtgcttgcgatccccgaagctgagggggttggggggaatctaagaattgcattgactacgtaagaatatgcaacatttcaacagcacatttaaggctgttagagtaacagctttttcaaaatgtaggcagatcataattccttccccmtaactgttttcatgttgactcrtgcaaccagattttgtcaagggaaaaaataacttggaaggagagattcctttttggagactgtctgaggtgtcagagacagacagatcatgtaagtgtgagaccatcttggtggtgaggggccaccagccaagacacyacattctgaaacagagaccctctctggcctccagattctttaaactctcagccaccaagggccacatggggtttgttacrgcaagttttaaagctttctggcatttcaatacagttttagcagttggctcctaaaaataaacaaacaaacaaacaagtcaaatcctgggtgtgtatagacccactgtacaggcagaaactcaaatggcttaccttctcttgggtgtagccttggaaccaccgagatgtactttctaactaaatgctgcacacactaggaccacccagagttacaaagtgctcttggacagggccctgctccccttagcctaaagtggaaagatgctggtgccttgacctcaggtgttctaggctaaaacactgcaccactgaccctcgactcttgtaagagacctgtcttcagttacccttaattctttgctaaagcttcaaactataatcacaaacatttttttgaagggtatcaccaaaattaggccacggcagccatttttaaagctcaggaccatggatacttcgacggtatttggtaaaagtaaaataggctgggcgatcagaaggataggagctgcttcagtctgctgtaacctaaccctccatccgttgtgccagcagcccacagttcgacaccgtggcttcctcctgtgggaactatccaaaagatttcacctaacgagactctcactatgtcaaaattaatttttttcagttgtactttttctttcccctctacaagatgaaagattataaagtgaaattttataaacatcaaccaaagcaaaggcactttctaggacactgacttcataaagatgttagaaatgaggaaatttgatgtcaggtgagagtttatacttgttatgtatggttactaatgcagcgggtgtagctgactgaagtttgatatagttgtattctcacatttatagtgatattaaaaatacagtcacctctgacttctatgccagggaaggcttttttaaattttaggttattaaaatccatattggttaaaagtcacagttcccactgaataatatttttaattcacagaagggtttgttcccaggtgtgctccattctgcatcacaagagtttagtcgaagacattttctaaattaaaataattgtttgtaattagaaaaaaaa

SEQ ID NO: 2863 - DNA, 3407 bp, Rattus norvegicus
tagcaagccagcaagcagcactcctccryggccwctgsatsagcwsmtgckkccrggakcgktccctgggactgactgaatagcacggacaatgggagctttctcatggtggagacagccatcttggatggcggacaataaaagagggaggatgactccaagcctgccatggctcctgtcggctctgactcttctgcatctgatgatgcacgtgaatggtcttaagagaggggtacaacaagatctgaaatgcacaaccaacaatatgcgagtgtgggactgctcatggccagcacccctcggggtcagccctggaactgttaaagacatttgcattaaagacaggccccattcctgccatcgactagagacaacaaacgttaagatyccagctctttcacccggtgatcacgaagtaacaataaattaccaaaacggctttcagagtaaattcacactgaatgaaaaagatgtttctttagttccggatacccctgagatcttgagtttgtctgctgacttctcgacctccacattacaactgaagtggaatgacaaagggtctgctctcccttacccctccaatgccacctgggaggttaaggttctgcagaatccgaggacggagcccgtagcactagtgtcactcaacacagtgctgagtggtaaagataaaggtcaccactggaactggacctcagaactgcccttgcagtgtgccactcactctgtgagcattagatggcacattgactaccctcgtttctctgggtacaaagagtggagtgagtggagcccgctgaagaacatttcctggacgcgtaataccgagactaacgtttttcctcaagacaaagtggtacttgcaggctcaaacatgacaatttgttgtataagtacaacgaaggtgctttcaggacagattggaaatacgttccgccctcttatccatctttatggggagactgtcgccatcaacatcctgaacatacctgtttctgaaaacagcggctcaaatgtgattttcagcacagtcgacgatgtgtatggaacggtcgtcttcgcaggctatccacccgatgttcctcagaaactgagctgtgagacacatgacttgaaagagattatatgtagctggaatccgggaaggataacgggactggtgggcccacgcaacacagaatacaccttatttgaaagcatttcaggaaaatcggcagtgttccacaggtttgaagaacttgcaaatgaaacctattggttaaccttgaaaatggctcctgaccaagaaattcataacttcaccctgactgctcgcaatccactgggccagacagaatcagcgatagtcatcaacgcaactgaaagagttgctcttcatgttcctatttcattgaaagtgaaggacgtcaattcaacagtcgttacactttcttggtacttgccaggaaattttacaaagattaatcttgtatgtcagattgaaatttgtaaagctaattccaagaaagaagtgcggaatgtcacaatgagaggagctgaggattcaacctaccatgttgctgtggacaaactaaacccatatactatctatactttccgggttcgttgttcttccgaaactttctggaaatggagcaagtggagtaatgaaaagcgatatttaaccactgaagccactccttcaaagggaccagatacttggcgagagtggagttctgatgggaaaaacttaatcatctactggaagcctttacccatcaatgaagctaatggaaaaatactttcctacaatgtgtcctgttcatcaagcgaggagacacagtccctttccgagatcctcgatccacaacacaaagcagagataaaggttaataaaaatgactacatcatcagtgtggtggcaagaaattctgccggttcatctccaccttcaaaaatagccagtatggaaatcccaaatgatgacatcacggtagagcaagcggttggaataggaaacaggatcttcctcagctggcagcacaaccccaacatgacctgtgactacgtgattaaatggtgcaactcgtcatggtctgagccctgcctcctggactggataaaggttccctcaaacagcacggggactgtcatcgagtctgatcagtttcagccaggagtgaggtataacttttacctctatgggtgtactaaccagggatatcaactgttacgttctacaattggatacatagaagaattagctccaattgtcgcaccaaactttactgtggaagacacatctgcagattcgatattagtgaagtgggacgacatccccgtggaggagctccgaggcttccttcgagggtatttattctacttccagaaaggagagagagacacacccaagacacggagcttagagacaagtcactctgacatcaagctaaagaatatcactgacatatcccagaagacactgcggattgccgaccttcagggtaaaaccagttaccacctggtcctgcgggcttatacacatggtggactaggcccagagaagagcatgtttgtggtgaccaaggagaactccgtgggattgattattgccatcctcatcccagtggctgtggctgtcattgttggcgtggtaacaagcatcctctgctatcggaagcgagaatggattaaagaaacattctaccctgatattcccaatccagaaaactgtaaggcgttacagtttcagaagagcgtctgtgagggaagcaacgctcttaagacattggaaatgaatccatgcaccccaaatcacgtcgaagtcctggaatctcggtcaataccccctaaaatagaagacacagaaataacgtccccagtttctgagcgtcctggcgaaagctctgagacagaccccgagaaccaggcggccgtgtcttactgcccacccatcattgaggaggaaataacaaacccagcagcagatgaggcgggaggggcttcccaggtcgtgtacattgatgtgcagtccatgtatcagccacaagccaaagcagaggacgagcaggacactgaccccgtgatggtggcaggctataagccacagatgcgcctccccattaaccccacagcggaagacacaacagcagaagatgaagcggacaagaccgcaggttacagacctcaggccaacgtaaatacttggaatttggtctccccagattccccaaggtccacagacagcaacagtgaagttgtctcatttggaagtccgtgctccatcaattccaggcaatttttgattcctcctaaggatgaagactctcctaaatctaatggaggagggtggtcctttacaaacttcttccagaacaaaccaaatgactaaccaggtcaccctttgtcacttcagtctgccatct

SEQ ID NO: 2864 - DNA, 1760 bp, Rattus norvegicus
cacgaggaggaattaacggaaacagtgtcaagagagtaagggcacagaggacttgctgaaaatgaatgtatgtacgttcactcttgtcttggcattagtcggtagtgtcagtggccaatactatgattatgatgcccctctcttcatgtatggggaactgtcacccaactgtgcaccagaatgtaactgtccccacagctacccaactgccatgtactgtgatgatctcaagttgaaaagtgtgcccatggtgccccctggcakcaagtacctttacctgaggaataaccagatcgaccatattgatgaaaaggcctttgagaatgtwacggatctgcagtggctcattcttgaccacaatcttctagaaaactccaagatcaaaggaaaggtcttctctaagctgaaacaactgaagaagctgcatataaactacaacaatttgaccgagtccgtgggtccgctcccaaagtccctacaagacctkcagctggccaataataagatcagcaagctgggctccttcgacgggctggtaaacctgaccttcatttaccttcaacacaaccagctcaaagaggaggctgtctcggcttctctgaaaggccttaagtcactcgaatacctcgacttgagcttcaatcagatgagcaagctgcccgctggccttccaacatctcttctaactctctacctagacaacaataagatcaccaacattcctgatgagtatttcaatcgcttcacsgggcttcaatacttgcgtttatctcacaatgagctggctgacagtggcgtgcctggaaactcatttaacatatcatctctgctcgagctcgatctctcctacaataagctcaagagtataccaaccgttaatgaaaaccttgaaaactattacctggaggtcaataaactcgaaaagtttgatgtcaagagcttctgtaagatcctgggaccactatcttactccaagatcaagcatttgcgcttggatggcaatcccctcactcaaagcagtctgccccctgacatgtacgagtgtctacgtgtagcaaatgaaatcacggttaattaacctcctctcattctaatacattgaagtatgttccagagcagtacttcatggatgggtatttgctggatgtgttaaagttttcacaatatcctttacattgttattgtcattgttgttgttggtattacttcatggattttaattaataaaggaaatgttttgtgaamawwwammamwwwwwaaataaaagatgaaaagcagrmmwawwwmawmrwragaacagacacataaaacccgttaaacttaagtctatttgtgaatttaatgttttctatagctmtatgttcaggtgattatgaagcctttttactgattgcttggaagtccaccaggtttctatggttcctcacatttwacattrgtgacttcgaaaacatgaaacaaacatgcatggatgtttgttatcmtratccaaatttttgtgacatgtcaaktttgtktkacagargtttagatcctatgttttgaaaccagtgatttgcaacataccaargaaaattactaaagacctgtctacttaaagaaatgtmgttagcagtaagaatttcccagttacttaatgaaacttytcktgagtcatttycctgtcakatytatgyttctttctgattgyttgcatgttrtgatyaacaagctgatagcaaawtaaaacaatgcaawtggwaaaaaaaaaaaaaaaaaa

SEQ ID NO: 2865 - DNA, 2530 bp, Rattus norvegicus
atgtcatttgtagcaggagttattcggcgcctggacgagacggtagtgaatcgcatagcggcgggagaagttatccagcggccggccaatgctatcaaagagatgactgaaaactgtttagatgcaaaatctacaaatattcaagtgattgttagagaaggaggcctgaagctaattcagatccaagacaatggcactggaatcaggaaggaagatttggatattgtgtgtgagaggttcactacaagtaaactgcagacctttgaggatttagctatgatttccacctatgggtttcgcggagaggctttggcaagcataagccatgtggcccatgtcactattacaaccaaaacagctgatgggaaatgtgcatacagagcaagttactcagatggaaagctacaagcccctcctaaaccgtgtgcaggcaaccagggtaccctgatcacggtggaagaccttttttacaacataatcacaaggaagaaagctttaaaaaatcccagtgaagagtacgggaagattttggaagttgttggcaggtactcaatacacaattcaggaattagtttctcagttaaaaaacaaggcgagacagtctctgatgtcagaacactacccaatgccacgaccgtagacaacattcgctccatctttggaaatgctgttagtcgagaactgatcgaagttgggtgtgaggataaaaccctagctttcaaaatgaatggctatatctcgaatgcaaactactcagtgaagaagtgcattttcctactcttcatcaaccaccggctggtggaatcggctgccctgaagaaagccatagaagctgtatatgcagcatatttacccaaaaacacgcacccattcctgtacctcattttggaaatcagtccccagaacgtggatgtcaatgtgcaccccaccaagcatgaagttcactttctccatgaggagagtattctggagcgtgtgcagcagcacatcgagagcaagctattgggctccaattcatccaggatgtattttacccagaccttgcttccaggacttgctgggccctctggggaagccgttaaatccacgacaggcatagcttcctcatctactagtggaagtggcgacaaggttcacgcttaccaaatggtccgtacagactctcgggaccagaagctcgatgcctttatgcagcctgtaagcaggcgtctgcccagccagccccaggaccctgtccctgggaacaggacagagggctctcctgaaaaagccatgcagaaggatcaggagatatctgagctcccggcccccatggaagcagctgctgacagtgcgagtttggagagagaatcagtgattggggcttcggaagtggtggcaccccagcggcacccctccagtccaggcagctccagaaagagacatccggaggactccgatgtggaaatgatggaaaatgattcccggaaggaaatgacagctgcttgctacccccggaggaggatcattaacctcaccagtgttttgagtctccaggaagaaattaacgaccggggtcatgagactctccgggagatgctccgtaaccatacctttgtgggctgtgtgaatcctcagtgggccttggcacagcaccagaccaagctctacctcctcaacactaccaagctcagtgaagaactcttctaccagatactcatttacgattttgccaacttcggtgttctcaggttaccggaaccagcaccactctttgacttcgccatgctggccttagatagtcctgaaagtggctggacagaggaagatggcccaaaggaaggacttgcagaatacattgttgagtttttgaagaagaaagccragatgcttgcagactatttctctgtggaaattgatgaggaagggaacctgattggattacctctcctgattgatagctatgtgccgcctttggagggactgcctatcttcattcttcgactggccactgaggtgaactrkgawgaaraggagtgtttcgaaagtctcagtaaagaatgtgctgtgttttactccattcggaagcaatacatactggaggagtcagccctctcaggccagcagagtgacatgcctggctccccttcaaagccctggaagtggactgtggaacacattatytataaagccttccgctcacaccttytgcctccgaagcatttcacagaagatggcaatgtcctgcagctcgccaacytgccagatctgtrcaaagtcttygarcgstgctaaatgcaatcatagccaccatagagagactgcatggccatccaaggtgaagyraagcgtatggcactgatytggaagccacagawtaggacacttggtttcttaggctccagggtttccagtgctctctgttcttgctctgtatcccagtattggtgctgcaatttaatgcatttcacytgtggattagctscaawtaaacwcacatgtgttgawrwrawwwwwwwwwrmmmrmrmamwrraaaaaaaaaaaaaaaaa

SEQ ID NO: 2866 - DNA, 2986 bp, Rattus norvegicus
atgaryccctggcagcccctgctcctggtgctcctggctctaggctacagctttgctgcccctcaccagcgccagccgacttatgtggtcttcccccgagacctgaaaacctccaacctcacggacacacagctggcagaggattacctgtaccgctatggttacactcgggcagcccagatgatgggagagaagcagtccctgcggcccgctttgctgatgcttcagaagcagctstccctgccccagactggtgagctggacagcgagacactaaaggccattcgttcaccgcgctgtggtgtcccagacgtgggcaaattccaaaccttcgawggcgacctcaagtggcaccatcataacatcacctattggatccaaagctacaccgaagacttgccgcgagacgtgatcgatgactccttcgcgcgcgccttcgcggtgtggagcgcggtgacaccgctcaccttcacccgcgtgtacgggctcgaagcagacattgtcatccagtttggtgtcgcggagcacggggacgggtatcccttcgacggcaaggatggtctactggcacacgcctttccccctggccccggcattcagggagatgcccacttcgacgacgacgagttgtggtcgctgggcaaaggcgccgtggtccccacttactttggaaacgcaaatggtgccccatgtcactttcccttcaccttcgagggacgctcctatttgtcctgcaccacggatggccgcaacgacggcaagccttggtgtggcacgacagctgactacgacacagacagaaaatatggtttctgccccagtgagaatctctacacggagcatggcaacggagacggcaaaccctgcgtatttccattcatcttcgagggccactcctactctgcctgcaccactaaaggtcgctcggatggttatcgctggtgcgccaccaccgccaactatgaccaggataagctgtatggcttctgtcctactcgagccgacgtcactgtaactgggggcaactcggcmggagagatgtgcgtcttccccttcgtcttcctgggcaagcagtactctacctgtaccrgcgagggccgcagtgatgggcgcctctggtgcgcgacgacgtcgaacttcgacgctgacaagaagtggggtttctgtccagaccaagggtacagcctgtttctggtggcagcgcacgagttcggccatgcgctgggcttagatcattcttcagtgccggaagcgctcatgtaccccatgtatcactaccacgaggactcccctctgcatgaagacgacataaaaggcatccascatctgtatggtcgtggctctaaacctgacccaaggcctccagccaccaccgcagctgaaccacagccgacagctcctcccactatgtgtyccactgcacctcccatggcctatcccacagggggccccacagtcgcccctacaggcgccccctcacctggccccacaggtccccctactgctggtccttctgaggcccctacagagtcttcgactccagwwgacaatccttgcaatgtggatgtttttgatgccattgctgatatccagggcgctctgcatttcttcaaggacggtcggtattggaagttctcgaatcacggaggaarccaattgcagggcccctttcttattgcccgcacgtggccagcyttkcctkcaaagttgaactcagcctttgaggatccgcagyccaagaagattttcttcttctctgggcgcaaaatgtgggtgtacacaggccagwcggtgctgggccccaggagtctggataagttgggkctaggctcagaggtaaccctggtcaccggacttctcccgcgtcgtggagggaaggctctgctgatcagccgggaacgtatctggaaattcgacttgaagtctcagaaggtggatccccagagcgttactcgyttggataacgagttctctggcgtgccctggaactcacacaacgtctttcastaccaagacaaggcctatttctgccatgacaaatacttctggcgtgtgagtttccacaaccgggtgaaccaggtggaccacgtggcctacgtgacctatgacctcctgcagtgcccttgaactaaggctcctcttttgcttcagcggtgcagcgcaagcctctagagaccacccctgagggggaggagctagtttgccggatacaaactggtgatctcttctagagactaggaaggagtggaggcrrrcagggccctctctgcacgctgtcctttcttgttggactgtttctaataaacacggatcccccaacctttammarmwamwmraammaawmarmwwgtctgtagttgtatacacatccaagcctgtggttggtcagaagacaactttgtagggtcggttctgaccttttgtttttatggggcatctggggattgaactcagctggcttttgtgacaagtacttcacccgctgcaccaccttaccggcccttttatttattatgtatgtggtcatgttcacacacatgtatttaacctatagaatgcttactgtgcgtcgggcgctgctccaactgctgtataaatattaaggtattcagttactcctactggaaggtattatgtaaccatttctctcttacatcggaggacaccaccgagctatccactcatcaaacatttattgtgagcatccctagggagccaggctctctactgggcattagggacagaggaatttattggatgttggttcttccttcaagaatcgctcagggattctcagtgtcctcaaaacatgctgaaaccggaccccagactccactctggagaatccaacccactcacaggggaaacagcccgtttaaagtgcatgtgtgctagagaggtagggtagccgagatgatccctcagtggaaggataaccaagtatcttcctcggacactcttttttaaataaatgaataaatgaaaa

SEQ ID NO: 2867 - DNA, 2498 bp, Rattus norvegicus
  misc_feature (2129)..(2129): n is a, c, g, or t
ggcatttccaggagcaattccctcacctccaaggcgactgcgctctaggaatcacattccgttcctttagaagacaaaggcgcccaagagagcagcggcgcgaccccagggcgtgggccccgccgcggagccctcactgcccgacgccccgacgccgcggaccatgtctcccgcccctcgaccctcccgcagcctcctgctccccctgctcacgctcggcaccacgctcgcctccctcggctgggcccaaagcagcaacttcagccccgaagcttggctgcagcagtatggctacctacctccaggggacctgcgtacccacacacaacgctcaccccagtcactctcagctgccattgccgccatgcaaaggttctatggtttacaagtgacaggcaaggccgattcggacacgatgaaggctatgaggcgccctcgctgtggtgttccagataagtttgggactgagatcaaggccaatgttcggaggaagcgctatgccattcagggcctcaagtggcagcataatgagatcactttctgcatccagaattatacccccaaggtgggcgagtatgccacattcgaggccattcggaaagccttccgagtatgggagagtgccacgccactgcgcttccgagaagtgccctatgcctacatccgggagggtcatgagaagcaggctgacatcatgatcttgtttgctgagggtttccatggcgacagcacaccctttgatggtgaaggaggcttcctggctcatgcctatttcccaggccccaatatcggaggggatacccactttgattctgctgagccctggactgtccaaaatgaggatctaaatgggaatgacatcttcttggtggctgtgcatgagttggggcatgccctaggcctggaacattccaacgacccctccgccatcatggctcccttttaccagtggatggacaccgagaacttcgtgttgcctgatgacgatcgccgcggcatccagcaactttatggaagcaagtcagggtcacccacaaagatgccccctcaacccagaaccacctctaggccctctgtcccagataagcccagaaaccccacctatgggcccaacatctgtgatgggaactttgacaccgtggccatgctccgaggagagatgtttgtcttcaaggagcgatggttctggcgggtgaggaataaccaagtgatggacggatacccaatgcccattggccaattctggaggggcctgcctgcatccatcaacactgcctatgagaggaaggatggcaaatttgttttcttcaaaggagataagcactgggtgtttgacgaagcttccctggaacccggataccccaagcacattaaggagctgggccgaggactgcccacggacaagattgatgcagctctcttctggatgcccaacgggaagacctacttcttccggggaaataagtactaccgcttcaatgaggagttcagggcagtggacagcgaataccccwrrmacmycrmmsyctsssmaggmwtssytkwgtctcycwkmggctymttcmtgggtagcsmtkaagtcttcacatacttsyacarrgggaacaaatactggaaattcaacaaccaraagctgaaggtagagccagggtaccccaagtcagctctgcgggactggatgggctgcccttcggggggccggcccgacraggggactgaggaggagacggaggtgatcatcatcgaggtggatsasgagggcagcggagccgtgagtgcagctgctgtcgttctgccggtgctgctgctgctcctggtactggcagtgggccttgctgtcttcttctttagacgccatgggacacccaagcgactgctttactgccagcgttcactgctggacaaggtctgacccccaccactggcccacccgcttctaccacaaggactttgcctcctccgaaggcagtggcagccggtggtggcaggtgggctgttctcacccatcctgggctccctccctccagcctcccttctcagtccmtaattggyttctcccaccctcaccccagccttgcttcatccataggtggktsscwygasggmtgrkmagaasmtggtytsgccwnwgsccytcaagggaccctmatagcttggtgtgtgbccaaccctatwtgaatgttgtcaaggctctgcacttgaaggcaggrccctctgaccttacaggcaaaggccaaatggggtcatctgcttctcttccatccccctarctacatatyttaaatctytgaastatgacctcaggaggctttgggcatatgagccctatamrtaccargtgtacccagttggcagcctcccgtcactctgahtaaaaagaatcttcagagtgcatatttggaggtsgaaagattgttcagttaccctaaagactttgraaraarraarraawraawraarrrarraawraarraaaraaaraaaraaaaaaaaaaaaa

SEQ ID NO: 2868 - DNA, 3026 bp, Rattus norvegicus
atggcagttcagcccaaggagacgctgcagttggagggcgcggccgaggtgggcttcgtacgcttctttgagggcatgccggagaagccgagcaccacggtcggcctcttcgaccgcggcgacttttacaccgcgcacggcgaggacgcgctgctggcggcccgcgaggtgttcaagacccaaggcgtgatcaagtacatggggccggcaggggcaaagaccctgcagactgttgtgctgagtaagatgaattttgagtctttcgtgaaagatcttcttctggttcgtcactatagagttgaagtttataagaataaagctggaaataaggcatctaaggagaacgactggtatttggcatataaggcttctcctggcaatctttctcagtttgaagacatcctgtttggtaacaatgacatggccacttccattggcattatgggtattaaactgtctacggttgatggtcagagacaggttggagttggggatgtggattccacccagagaaagctaggattgtgtgagttccctgacaacgatcagttctccaatctcgaggctcttctgattcagattggaccaaaggaatgcattttaccaggcggagagactgctggagacatggggaaactgaggcaggttatacagagaggagggattctgatcacagaaagaaagagaatcgacttttccacaaaagacatctaccaggatctcaaccggttactgaaaggcagaaaaggagagcagatgaacagcgctgtcttaccagagatggagaatcaggttgcagtttcatcgttgtctgcagtgatcaagttcctagaactcttatcagatgattcgaattttgggcagtttgaactggcgacttttgacttcagccagtacatgaagttagacatggcagcagttagagccctcaaccttttccagggttctgttgaagacaccacaggctctcagtctctggctgcattcttgaataaatgcaaaactgctcaaggacaaaggctggttagccagtggatcaaacagccgctcatggataaaaacaggattgaagagagattaaatttagtggaagcttttgttgaagattcagaattgaggagagctctacaggaggatttacttcgccgatttccagatcttaaccggcttgccaagaaatttcagagacaagcagcgaatttacaagattgttaccgactgtatcagggtgtgaaacagcttcccaacgtcatccaggctctggagaaataccaaggaagacaccaggcattgttgttggcagtttttgtgactcctcttactgatcttcgttctgatttttcaaaatttcaagaaaagatagaaacgactttagatatggatcaggtggagaaccacgaattccttgtaaaaccttcatttgatcctaacctgagtgagctaagagaagtcatggatggtctggagaagaagatgcagtccaccttaataagtgcagcgcggggtcttggattggaccctggcaaacagattaaattggactccagtgcacagtttgggtattactttcgtgtaacctgcaaggaagagaaagtcctccgcaacaacaagaacttcagcaccgtggatatccagaagaatggcgttaaattcaccaacagtgaattgtcttctttaaatgaagaatacactaagaacaaaggagagtatgaggaggcccaggatgccattgttaaagaaatcgtcaatatttcctcaggctacgtggagccaatgcagaccgtcaatgacgtgctagctcacttagatgccgtcgttagttttgctcatgtgtcaaacgcagctcctgtcccctacgtgcgaccggtcatcttggagaaaggaaaaggaagaattatagtgaaagcctccaggcatgcttgtgttgaagttcaacatgacgttgcttttattccaaacgatgtgcactttgaaaaagataaacagatgttccacatcattaccgggccgaacatgggaggaaagtcaacatacatccgtcagacgggggtgattgtgctcatggcccaaattgggtgttttgtgccgtgtgagtcrgcagaggtgtccattgtggattgcatcttggctcgagtcggggctggtgacagtcarctgaaaggcgtctccacattcatggctgaaatgctggaaactgcttctatcctcaggtcggcaaccaaagattccttaataatcattgatgagctgggaagaggaacctctacatacgacggctttgggtyagmrkgggccatatcggagtacatcgcaacgaasattggtgccttttgcatgtttgccacccattttcatgaacttaccgctttggccagtcagataccaaccgttaacaatctccacgtcacagcgctgactaccgaagagaccctgactatgctttaccaagtgaaaacaggtgtctgtgatcagagtttcgggattcatgtggctgaactcgctaatttccctaggcatgtgatagagtgcgccaagcagaaggctctggagcttgaggagtttcagagcattgggacctcacmggsacasgatgaaacccasccmvckgcamagagscgctgcctggaaagagagcaaggtgrraagattattctggagttcctgtccaaggtcaagcaagtgcccttcactgacttgtcggaggagagcgtctcagtraagctgaagcaactgaaagctgaggtgctggcgargaacawcagctttgtaaatgaaatcatctcacgggtaaaggctccktgagaggacagtggagcgaakccagtagggagagctcgcccttaccmtgctgtttcctgtagtacttaacaccagaacccggggagcagtgtgctgaagtatttagtgatacttgaaaacatgacggtctatagctgagtaccgtttaaatgggcatggacaactttgagcactatgctgaattttataaataaaatcatgtagtttctaaaaaaaaaaaaaaaaaa

SEQ ID NO: 2869 - DNA, 2855 bp, Rattus norvegicus
  misc_feature (2803)..(2803): n is a, c, g, or t
  misc_feature (2809)..(2810): n is a, c, g, or t
  misc_feature (2843)..(2843): n is a, c, g, or t
caaacagtcattagtggacgactctattgtaataaactgtgctttaaaatgtaaaccagggagcgttttttttcctcacattgtccagaagcaacctttcttcctgagcctggattaatcatgagagagctcgtcaacattccactgttacagatgctcaccctggttgccttcagcgggaccgagaaacttccaaaagcccctgtcatcaccacgcctcttgaaactgtagatgccttagttgaagaagtggcgactttcatgtgcgccgtggaatcctaccctcagcctgaaatttcttggaccagaaataaaattctcatcaagctgtttgacacccgctacagcatccgagagaacggtcagctcctcaccatcctgagtgtggaggacagtgatgatggcatctactgctgcacagccaacaatggagtgggaggagcggtggaaagttgtggcgccctgcaagtgaagatgaagcctaaaataactcgtcctcccatcaatgtaaaaataattgagggattgaaagcagtcctaccgtgcactacgatgggtaaccccaagccatccgtgtcctggattaagggggacagtgctctcagggaaaattccaggattgcagttcttgaatctgggagtttaaggatccataatgtgcaaaaggaagacgcaggacagtaccgatgtgtggcaaaaaacagcctgggcacagcttactccaaactggtgaagctggaagtggaggtttttgcaagaatcctgcgtgctcctgaatcccacaatgtcacctttggttcctttgtaaccctacgctgcacagcaataggcatgcctgtccccaccatcagctggattgaaaacggaaatgctgtttcttcaggttccattcaagagaatgtgaaagaccgagtgattgactcaagactccagctctttatcacaaagccaggactctacacatgcatagctaccaataagcatggagagaaattcagtaccgcaaaggctgcagccactgtcagtatagcagaatggagcaaatcacagaaagaaagcaaaggctactgtgcccagtacagaggggaggtgtgtgatgccgtcctggtgaaagactctcttgtcttcttcaacacctcctatcccgaccctgaggaggcccaagagctgctgatccacactgcgtggaatgaactcaaggctgtgagcccactctgccgaccagctgccgaggctctgctgtgtaatcacctcttccaggagtgcagccctggagtgctacctactcctatgcccatttgcagagagtactgcttggcagtaaaggagctcttctgtgcaaaggaatggctggcaatggaagggaagacccaccgcggactctacagatccgggatgcatttcctcccggtcccggagtgcagcaagcttcccagcatgcaccaggaccccacagcctgcacaagactgccgtatttagattataaaaaagaaaacataacaacattcccgtccataacgtcctccaagccgagcgtggacattccaaacctgcctgcctccacgtcttccttcgccgtctcgcctgcgtactccatgactgtcatcatctccatcatgtcctgctttgcggtgtttgctctcctcaccatcactactctctattgctgccgaaggaggagagagtggaaaaataagaaaagagagtcggcagcggtgaccctcaccacattgccttccgagctcctgctggacaggctgcatcccaaccccatgtaccagaggatgccactccttctgaatcccaagttgctcagcctggagtatccgaggaataacatcgagtatgtcagagacatcggagagggagcgtttggaagggtctttcaagcgagggccccaggcttgcttccttatgaacccttcactatggtggctgtgaagatgctgaaggaggaggcctccgcagatatgcaggcagactttcagagggaggcagccctcatggcggagtttgacaaccccaacattgtgaagctcttaggtgtgtgtgctgttgggaagccaatgtgcctgctctttgaatatatggcctatggtgacctcaatgagttcctccgaagcatgtcccctcacactgtgtgcagcctcagccacagtgacctgtccacgagggctcgggtgtccagccctggtcctccacccctgtcttgtgcggaacagctctgtattgccaggcaagtggcagctggcatggcctacctgtcggagcgcaagtttgtccatcgggacttagctaccaggaactgcctggttggagagaacatggtggtgaaaattgcagactttggcctctctaggaacatctactccgcagactactacaaagctgatggaaacgatgctatacctatccgctggatgccacccgagtctatcttctacaaccgctacaccacggagtcagatgtgtgggcttatggcgtggtcctctgggagatcttctcctatggactgcagccctactatggaatggcccatgaggaggtcatttactatgtgagagatggtaacatccttgcctgccctgagaactgtcccttggaactgtacaaccttatgcgcctatgttggagcaagctgcctgcagacagacccagcttctgcagtatccaccggatcctgcagcgcatgtgcgagagagcagagggaacggtaggcgtctaaggttgaccatgctcaaacaacacccaggaggatcttttcagactgcgagctggagggatcctaaagcagagggcgnataagnncagataggaagagtttatctcaggcagcacgtncagttggttgtt

SEQ ID NO: 2870 - DNA, 1741 bp, Rattus norvegicus
gaattccatggagaagaccgggagctactgccggagtttcggctcacctgggcgctggccggggcaggagtctcaggagccatgttgtcagaagtcctgctggtgtctgctccagggaaagtcattctccatggagaacatgctgtggtccatggcaaggtagctctggcggtggccttgaacttgagaacatttctcgtgctgcgaccgcagagcaatgggaaagtgagcctcaatttaccaaacgtcggtattaagcaggtctgggatgtggccacacttcagctgctggacacaggctttcttgagcaaggcgatgtcccggcacccaccttggagcaactggagaagctgaagaaggtggcgggcctcccccgagactgtgtaggcmacgarggsctgtcycwkctkgcmyttcwswmcctktamskggctwtctgccggwrwywsaggacactcccaagcctggacatcatggtgtggtcggaactgccccctggggcgggcttgggctccagtgcagcctactcggtgtgtgtggcagccgccctcctgactgcctgtgaggaggtcaccaacccgctcaaggacaggggctccattggcagttggcccgaggaggacctgaagtcaattaacaagtgggcctacgagggggagagagtgatccatgggaacccctctggcgtggacaattccgtcagcacctggggaggagccctgcgctaccagcaagggaagatgtcatccttgaagaggctcccagctctgcagatcctgctcaccaacaccaaggtcccacgaagyaccaaggccctcgtggctggcgtcagaagcaggctaatcaagttccctgagatcatggccccgctcctgacatcaattgacgcaatctccctggagtrtgagcgcgtgctgggagagatggckkccgcaccagtcccagaacagtaccttgtcctagaagagctaatggacatgaaccagcaccatctgaatgcccttggtgtgggccacgcctccctggaccagctctgtcaggtaacrgcagcacatggactgcacagcaagctgactggcgcaggcggcggcggctgtggcatcaccctcctgaagccaggtctagagcgagcaaaagtggaggccgccaagcaggccctgaccggctgcgggtttgactgctgggagaccagcattggagcgcctggggtctccatgcactcagccacctccatagaggaccctgkccgasragccctgggsctctgacatgtcatcctgccaagaagcttccacgkatctkgggctggagttggcccctgtgctggccactaacacatttcctgctggtagtgccttgtakactctgagaggcaccacctccatggsccatctgtatcctggcactgctgaagccagacaggcatcagttgccgggtcttytgagacagcaggctgacacagtaggccttccccctgggtgattctgcctgggcctsgcctctgtcggcctcacacaaactctccggctcctagccacgcaacccttctgtcctcagaygccggcccctttggaaccgcctagccmgtggctcatgtctcctgtcctctctcggggatcatcggctraggcaaggcatgccgactgctttatccccgtgtgtacctgtggacaagctgcccatggtggggcgagggaagggggaataaaatgagctcgtmcaaamaaaaaaaaaaaaaa

SEQ ID NO: 2871 - DNA, 2978 bp, Rattus norvegicus
aagcactggtttcttgttagcgttggtgcgccctgcttggcgggggttctccggagcgatgccgatggatgtgattttagttttgtggttctgtgtatgcaccgccaggacagtgttgggctttgggatggaccctgaccttcagctggacatcatctcagagctcgacctggtgaacaccaccctgggagtcacgcaggtggctggactgcacaacgccagtaaagcatttctatttcaagatgtacagagagagatccattcggcccctcacgtgagtgagaagctgatccagctattccggaataagagcgagttcacctttttggctacagtgcagcagaaaccatccacctcaggggtgatactgtccatccgggagctggagcacagctattttgaactggagagcagtggcccaagagaagagatacgctaccattacatacatggtggaaagcccaggactgaggcccttccctaccgcatggcagacggacaatggcacaaggtcgcgctgtcagtgagcgcctctcacctcctgctccacatcgactgcaataggatttacgagcgtgtgatagaccctccggagaccaaccttcctccaggaagcaatctgtggcttgggcaacgtaaccaaaagcatggctttttcaaaggaatcatccaagatggtaagatcatcttcatgccgaatggtttcatcacacagtgtcccaacctcaatcgcacttgcccaacatgcagtgacttcctgagcctggttcaaggaataatggatttgcaagagcttttggccaagatgactgcaaaactgaattatgcagagacgagacttggtcaactggaaaattgccactgtgagaagacctgccaagtgagtgggctgctctacagggaccaagactcctgggtggatggtgacaactgtgggaactgcacgtgcaaaagtggtgccgtggagtgccgcaggatgtcctgtcccccgctcaactgttccccggactcacttcctgtgcacatttccggccagtgttgtaaagtttgcagaccaaaatgtatctatggaggaaaagttcttgctgagggccagcggattttaaccaagacctgccgggaatgtcgaggtggagtcttggtaaaaatcacagaagcttgccctcctttgaactgctcagcaaaggatcatattcttccagagaatcagtgctgcagggtctgcccaggtcataacttctgtgcagaagcacctaagtgcggagaaaactcggaatgcaaaaattggaatacaaaagcaacctgtgagtgcaagaatggatacatctctgtccagggcaactctgcatactgtgaagatattgatgagtgtgcagctaaaatgcactattgtcatgccaacaccgtgtgtgtcaacttgccggggttgtatcgctgtgactgcgtcccagggtacatccgtgtggatgacttctcttgtacggagcatgatgattgtggcagcggacaacacaactgcgacaaaaatgccatctgtaccaacacagtccagggacacagctgcacctgccagccgggttacgtgggaaatggcaccatctgcaaagcattctgtgaagagggttgcagatacggaggtacctgtgtggctcctaacaagtgtgtctgtccttctggattcacgggaagccactgtgagaaagatattgatgaatgcgcagagggattcgttgaatgccacaactactcccgctgtgttaacctgccagggtggtaccactgtgagtgcagaagcggtttccatgacgatgggacctactcactgtccggggagtcctgcattgatatcgatgaatgtgccttaagaactcacacttgttggaatgactctgcctgcatcaacttagcaggaggatttgactgcctgtgtccctctgggccctcctgctctggtgactgtccccacgaaggagggctgaagcataatgggcasgwgkggattctgagagaagacaggtgttcagtctgttcctgcaaggatgggaagatattctgccggcggacagcttgtgattgccagaatccaaatgttgaccttttttgctgcccagagtgcgataccagggtcaccagccaatgtttagatcaaagtggacagaagctctatcgaagtggagacaactggacccacagctgccagcagtgccgatgtctggaaggagaggcagactgctggcctctggcttgccctagtttgggctgtgaatacacagccatgtttgaaggggagtgttgtccccgatgygtcagtgacccytgsstggctgrtaatattgcctatgacatcagaaaaacttgmctggacagstttggtgwttcgargctgagcggakccgtgtggacaatggctgratctccttgtacaacstgcaaatgcaagaatgggagagtctgctgctytgtggatbtggmgtstattgagaataactgaagattttaaatggactcgtcacgtgmgaaaatggrcaaaatgatcatcccacctgaggaagaagagggsctgatwtcttttkcttkttaaccacagtcaattaccaamgkcwcsakctgaggaaggcgttkggattgccttwgccacttwgctcatccttgctgacctagtctagatgcctgcagtaccgtgcatttcggtcgatggtwstkgagtctcagkgttgtaaatcrcatktccctsgtcagatcatttacagatamatttaaaggggttccatgatwaatgttwatgtractttwgtkyatttygtgtactgrcataatagagacttggcaccatttatttatktkyctkgatwtttggatcmaattctaaaawtaaagttgcckgttkygrmwwwmrwmdmarwaaarmmrmrrramaggaagaaagaaatcagggggggggccaaaccatgaggtataaacaggcgttaacggtgaaa

SEQ ID NO: 2872 - DNA, 3193 bp, Rattus norvegicus
gtcctttctctcgccgggtttggagacacgctcccgatttcgaggggagggagacgatggactgagacgatgcacgccatggaatcccgggtattactgagaacgttctgcgtgatcctcgggctcgaagcggtttggggacttggtgtggacccctccctacagattgacgtcttatcagagttagaacttggggagtccacagctggagtgcgccaagtcccaggactgcataatgggacgaaagccttcctcttccaagattcccccagaagcataaaagcacccattgctacagctgagcggtttttccagaagctgaggaataaacacgagttcacaattctggtgaccctgaaacagatccacttaaattcgggagtcattctctccatccaccacttggatcacaggtacctggaactggaaagcagcggccaccggaatgagatcagactgcattaccgctctggaactcaccgcccgcacacggaagtgtttccttatattttggctgatgccaagtggcacaagctctccttagccttcagtgcctcccacttaattttacacatcgactgcaacaagatctatgaacgagtggtggaaatgccttctacagacttgcctctgggcaccacattttggttgggacagagaaataacgcacacgggtattttaagggaataatgcaagatgtgcaattacttgtcatgccccaggggttcatcgctcagtgcccggatcttaatcgaacctgtccaacatgcaacgacttccatgggcttgtgcagaaaatcatggagctgcaggacattttatcgaagacgtcagccaagttgtctagagctgaacaacgaatgaacaggctggatcagtgctactgtgagcggacgtgcaccatgaagggagccacctaccgggagttcgagtcctggacagacggctgcaagaactgcacatgcttgaatgggaccatccagtgcgagactctggtctgccctgctcccgactgcccggctaaatcggctccagcgtacgtggatggcaagtgctgtaaggagtgcaagtccacctgccagttccaggggcggagctactttgagggagaaaggagcacagtcttctcagcttccggaatgtgcgtcttgtatgaatgcaaggatcagaccatgaagcttgttgagaacgccggctgcccggctttagattgccccgagtctcatcagatcgccttgtctcacagctgctgcaaggtttgcaaaggttatgacttctgttctgagaagcatacatgcatggagaactcagtctgcaggaacctgaacgacagggcagtgtgcagctgccgggatggtttccgggccctccgggaggacaatgcctactgtgaagacattgacgagtgtgcagaggggcgccattactgccgtgagaacaccatgtgtgtgaacacaccgggctctttcctgtgtatctgccaaacagggtacatcagaatcgacgattactcgtgtacggaacatgacgagtgcctcacaaaccagcacaactgtgacgagaacgctttgtgctttaacaccgttggaggtcacaactgcgtctgcaagcctgggtacactgggaatggaaccacgtgcaaagctttctgcaaagacggctgcaaaaacggaggtgcctgcattgctgccaatgtctgtgcttgcccacaaggcttcaccggacccagctgtgagacagacattgatgagtgctctgagggctttgttcagtgtgacagccgtgccaactgcattaacctgcctgggtggtaccactgtgagtgcagagatggctaccatgacaatgggatgtttgcgccaggtggasamkmskgtgaagatattgatgaatgtgggactgggaggcacagctgtgccaatgacaccatttgcttcaacttggacggtggctacgattgccggtgtccccatggaaagaactgcacaggggactgcgtgcacgacgggaaagtcaaacacaacggccagatctgggtgctggagaacgacaggtgctctgtgtgttcctgccagactggatttgttatgtgycracggatggtctgtgactgcgaaaaccccacagttgacctctcctgctgccctgagtgcgacccaaggctgagcagccagtgcctgcatcaaaacggggaaaccgtgtacaacagcggtgacacctgggyccaggattgccgtcagtgccgctgcttgcaagragaagttgactgctggcccctggcttgcccagaggtagagtgtgaatttagtgtccttcctgagaacgagtgctgcccacgctgtgtcaccgatccttgtcaggctgacaccatccgcaatgacatcaccaaaacctgcctggacgagatgaacgtggttcgcttcactgrgkcttcckggatcaagcacggcacggagtgcaccctctgccagtgcaagaacggccacgtgtgctgctcagtggacccacagtgcctccaggagctgtgaagttaactgcctcatgggagatacctgttaaagaatgatttctcatttaaaarrrmmaaaaaamaaaaaaraaaaaaarwrawrwrmrrccagccaaatgcaactgtgtcaatggctgggcagactgatggcgattacggctctgyaragstttgaggaacatcactgaggaaaccagatggcagttccgcctttactgttcctgggatcacyttaygsaggaatggctktgaatcmcaggcyktgacwtccccagcymtggagaagragcstgagcccatcagctstggggaagtctmtccctstctccbtccytccacaggcacaggacatgtcmtagctcagactcttcytgaaccagcgaggttcctcaytgaagccatggaatgaaaggcagtgagtgagctatattttcagaatccaagaagctgacacatctgtacagtgcactccgaaccctgawacamgctattgtaatgataaaatactgcacaggcatggttatgtaacattttctaaccggagaagtcaccccacccccatttcstcgtytactgcacttaatgttatttggtytgaawwtgttcastagaagctcgttcttstgcaaawtaaaataactatttctcttmccttaaaaaaaaaaaaammwmrwrccgaattc

SEQ ID NO: 2873 - DNA, 1217 bp, Rattus norvegicus
aggtggctgattccataatgacccagwcgwcktccmkksaratagtyatacrswtgccatgkttmcttctkycacgatcttacaggtgaacaaggtgatgtccatcttgttttatgtgatatttcttgcttatctccgtggcatccaaggcaacaacatggatcaaaggagtttgccagaagactctctcaattccctcattatcaagttgatccaggcggatatcttgaaaaacaagctctccaagcagatggtagatgttaaggaaaattaccagagcaccctgcccaaagcagaggcacccagagaaccagagcagggagaggccaccaggtcagaattccagccgatgattgcaacagacacagaactactacggcaacagagacgctacaattcaccccgggtcctgctgagtgacagcacccctttggagccccctcccttatatctaatggaagattatgtgggcaacccggtggtaaccaatagaacatcaccacggaggaaacgytatgcagagcataagagtcaccgaggagagtactcagtgtgtgacagtgagagcctgtgggtgaccgacaagtcctcagccattgacattcggggacaccaggttacagtgttgggagagatcaaaaccggcaactctcctgtgaaacaatatttttatgaaacgaggtgtaaagaagccaggccagtcaaaaacggttgcagggggattgatgacaaacactggaactctcagtgcaaaacgtcgcaaacctacgtccgagcactgacttcagaaaacaacaaactcgtaggctggcgctggatacgaatagacacttcctgtgtgtgtgccttgtcaagaaaaatcggaagaacatgaattggcatctgtccccacatataaattattactttaaattatatgatatgcatgtagcatataaatgtttatattgtttttatatattataagttgacctttatttawtaaamttcagcaacccttacagtatataagcttttttcataatcgggctgctcaawaaaawwmgtgtgsttgcmwwmrmwmarrmmwmwmccatctgttaaccttgttttgtgattgggctmtcgggmmccttctgtaaamcctgtgtacaccagtatttggcattcagtattgtcaaggccatgactgtggtttcagtaaactttsttaaaatcgvaaaaaaaaaaaaaaaaaa

SEQ ID NO: 2874 - DNA, 3773 bp, Rattus norvegicus
atcaaggggagrsackaggcactgggctacagttgcctggcttacaggaactggctcttttcctcaagcctcattaagcagcccactccagttcttgatctttgtctcccagtcctgaagtcctttctctccttaggctgcatccacagcccttctaagtggctgtgagcagtttctcartatgaactgtatatcagacttcttcacctacgagactaccaagtcggtggttgtgaagagctggaccattgggatcatcaaccgagccgtccagctgctgattatctcctactttgtggggtgggttttcttgcatgagaaggcctaccaagtgagggacaccgccattgagtcctcagtagttacaaaggtgaaaggcttcgggcgctatgccaacagagtcatggacgtgtcggattatgtgaccccaccccagggcacctctgtctttgtcatcatcaccaaaatsatcgttactgaaaatcaaatgcaaggattctgtccagagaatgaagagaagtaccgctgtgtgtctgacagccagtgtgggcctgaacgcttcccaggtggggggatcctcaccggccgctgcgtgaactacagctctgttctccggacctgtgagatccagggctggtgccccactgaggtggacaccgtggagatgcctatcatgatggaggctgagaacttcaccattttcatcaagaacagcatccgtttccctctcttcaactttgagaagggaaacctcctgcctaacctcaccgacaaggacataaagaggtgccgcttccaccctgaaaaggccccattttgccccatcttgagggtaggggatgtggttaagtttgctggacaggattttgccaagctggcccgcacgggtggcgttctgggtattaagatcggctgggtgtgcgatctagacaaggcctgggaccagtgcatccctaaatattccttcactcggctggatggagtttctgagaaaagcagtgtttcccctggctacaacttcaggtttgccaaatactataagatggagaacggcagcgagtaccgcacactcctgaaggcttttggcatccgctttgatgtgctggtatatgggaacgctggcaagttcaacatcatccccaccattatcagctcggtggcggccttcacttctgtgggagtgggcactgttctctgtgacatcatcctgctcaatttcctcaaaggggctgatcactacaaagccaggaagtttgaggaggtgactgagacaacactgaagggtactgcgtcaaccaacccagtgttcgccagtgaccaggccactgtggagaagcagtctacagactcaggggcctattctattggtcactagggcctcttcccagggttccatgctcacccttaggctgcagaacctgcaaacaggccactctatctaagcagtcaggggtgggagggggagaagaaggsytgctatttctgctgttcaccccaaagactagatccagatatctaggccctcactgttcaacagataggcaatgcttcccactaagacttgaatcttgcctttaccccttgcatgcctcccacctgcttccctggatcccaggacagcagcatccacccctttccaaaggattgagaaaatggtagctaaggttacacccataggacctaccacgtaccaagcacttccacacatattatcccttttcacccttaaaataatcctataaggtagawwwmwwrrrwwrwwwrwwwrwwwwgttattaagagaagcaaaggcccagggagaccgaggcgtttgccccaggccatgtagctaggaagtgagatctacaccctggctagcccttctgcccacatctgtaatggaagaatgaactctctaggcatctammmwwmwrwrwmarwwrcctttccctgccttcccatgatgcccaacagtgagctttttcaggaatgcagccctactttaggggagcccacggaaatgcagaaggaaatagctgtgactatcagtgatttttccttgcctcaccccatatgcgaagctcaagctgagggagagacctttattctccaatgaggtcctcacacatccacacatctgggccctcactccggaatctagacagaaaacacacacatacatgaccgacaagaggcaatttctaaccctagcaccatgtcccagtacatcagctgtcttagtttatagcactgttgggaaagccatggttaggggctggggatgtagttgggtaggtagagtgtttgtctagtatgttagccctaagaccaacctgcagcacttcataaaccaggcacacttgtaatcccagcactcgggaggtaggcatggaggatcaaaagttcgagtttatccttgccaacgcaataagtgtgaaccttgcctggaacccatgaaactgtttcaaaatagaagtggggagacccagtaagacccaataccttgtgagcattcagccagggcagcaaggcctgttttcacaggatcctaacaggtgatcaggtaggagctaaaggagcctcagagaccatcatgtctaggcctcttgcttactgatcattaaccctgaggccaaaaccgaaaaatttcttgccttgtgccattgtgaggccccaagagagacacaggtgtcctgtgcattataagctgaagacaagttcacattgtctccatagcccagatgtcccatctcctttctgagcttttaaagaaaacaagagatgttgaggaagctctaaatgtagcgcacaaaactcaaggacagatcaaggtgtaggaaagaagcaggttgagaggctcttttggtttggtttgtttatttggttggttggttggttggttggttggttggttggttttgatgaaaagactttcctgtgcattcctggctggcctcaatttacagatctctctcaactcaacttttccccagtatttggatctgcaggcaagcgccattatacggcagggggcatctcttttaaaagaatatatgattaagtatcagaaaagttcatgcaaatcagtgggcctgaggtatacatttaattaatatcagggccaatctgcctcttaaacatgggcttgatgctgagagcttagaagagatgagcattcatgtggacagagggctggccctcaccggacgagatgagcattcatgtggacagagggctggccctcaccggacggtgcaaagagatgtgggagagggagagtctaggaggaccacaggagttctcacacagacccaacctcaatgatgcccaccccagggggagaagggggtaagagtccttcccactagccttgcatcaatccttttcttccctctcctttccccacagcccccatcataatgtgtgatggggtactgtctccctaacaccagtgtcaattcctgggtagtatccagagacctggccaggcttcatctctccaatagagacatcaggaaaggaaagagcacagcctccaagaaggtagcttatagcccctcattgggcaaggctgagttcaccaagatgctccctagaagaagatggagacacgtgtcctaagaggatctcataccccagactagaataattcttccccacatgcctggacctcttctgggccttcagtaagtgtgtaaactccatgctgtactctccttgtctgaaccaagtccacttcgatgtgctagatgtcagctaatcatagaaattacaacgaccagcttgtatctga

SEQ ID NO: 2875 - DNA, 3997 bp, Rattus norvegicus
cgggccgggctggaggggcgggcgggcggctacgagcatggtcctggtgttgcaccacatcctcatcgctgttgtccaattcctcaggcggggccagcaggtcttcctcaagccggacgaaccgccgccgcagccatgcgccgacagcctgcaggatgctttgctgagcctgggcgccgttatcgacatcgcgggccttcgacaggctgccaaggatgccctctcggccgtgctccccaaagtggagactgtctacacctacctggtagatggggagtccaggctggtgtgtgaggacccccctcatgagctgccacaggaaggaaaaattcgagaggctgtgatttctcggaagcggctgagctgcgatgggctgggaccttcagacctactaggaaagcccttggccaggctggtggctccactggcccctgacacgcaagtgctggtcatacccctgctggacaaggagactggaactgtggcagccgtcatcttggtgcactgtggccagctgagtgacagtgaggagcagagcctgcaggtggtggagaagcatgctctggtggccctgcagagggtgcaggccctgcagcagcgcaggcctgaagctgttcagaacacctcagcggatccctctgaagatcaaaaggatgagaagggatacaccgcccatgaccgaaagatcctgcaactgtgtggagaactctatgacttggatgccacttctctgcagctcaaagtccttcgatatcttcagcaggagacacaggccactcactgctgcctcctgctggtgtcagaggacaacctgcagctttcctgcaaggtcattggagagaaagtgctgggagaagaggtcagctttccattgaccatgggacgcctgggccaggtggtggaggacaaacagtgtatccagttgaaggacctaacctctgacgatgtgcaacagctacaaaacatgttgggctgtgagcttcgggctatgctatgtgtccctgtcatcagtcgagccactgaccaggtggtggccctggcttgcgccttcaacaagcttggaggagacttcttcacagatgaggatgaacgtgcgatccaacactgcttccactacacaggcacggtgctcaccagtaccttggccttccagaaggagcagaagctcaagtgtgagtgccaggctcttctccaagtggcaaagaacctcttcacccacctggatgacgtctctgtcctgctacaggagatcatcacagaggccagaaacctcagcaacgcagagatctgctccgtgttcctgctggatcagaatgagctggttgccaaggtgttcgatggcggtgtagtggacgatgagagttatgagatccgcatccctgcggaccaaggcatcgcgggccacgtggcgaccacgggccagatcctgaacatcccagatgcatacgcccatccgcttttctatcgcggcgtagacgacagcactggcttccgcacgcgcaacattctctgcttccctatcaagaacgagaaccaagaggtcatcggtgtggctgagctagtgaacaagatcaatgggccatggttcagcaaatttgatgaggacctggccacagccttctccatctactgtggcattagcatcgctcactctctcctatacaaaaaggtgaatgaagcccagtaccgcagccacctggccaacgagatgatgatgtaccatatgaaggtctctgacgatgaatacaccaaacttctccatgatggcatccaacctgtggccgccattgactccaactttgccaacttcacctatactcctcggtctctgcctgaggacgatacttctatggccatcctgagcatgctgcaagacatgaacttcatcaataactacaaaattgactgcccaactctggcccggttctgcctgatggtgaagaaaggctaccgggatccgccctaycacaacwggatgcaygccttctctgtctctcacttttgctacttgctctacaagaatctggagctctccaactacctcgaggacatcgagatctttgcgttgtttatttcctgcatgtgtcacgacctggaccacagaggcacaaacaactccttccaggtggcctcgaaatctgtgctggctgcactctacagctcagagggctctgtcatggagaggcaccactttgctcaggccattgctatcctcaacacccatggctgtaatatctttgaccacttctctcggaaggactatcagcgaatgctggacctgatgagggacatcatcttggcmacrgacmtggcacaccacctccgcatcttcaaggacctgcagaagatggctgaagtgggttatgaccgaaacaacaagcaacaccacaggcttcttctatgcctccttatgacctcctgtgacctctctgaccagacaaagggctggaagaccaccagaaagattgcggagctgatctacaaagagttcttctcccaaggagacttggagaaggccatgggcaaccgaccaatggagatgatggatcgggagaaggcctacatccctgaacttcagatcagctttatggagcacatcgccatgcccatctacaagctgttacaagacctgttccccaaggcagcagagctgtatgaacgcgtggcctccaatcgtgagcactggaccaaggtgtcccacaagttcaccatccgaggcctccccagtaacaactcgctggatttcctggatgaggaatatgaggtccctgatttggacgtcaccagggctcctgtcaatggctgctgcagcctcgagggctgagtgatcccctctagggaccctccctgcccggccctcctttcacaactctctaccagtctgtctgatgcattgggaaccagagccatgggtcctgggttctagaccaggatgtcccctgtgacctggcacatgccacccttcctgggcttcgtctttctcatctgcagaaggaattcgagattcgcagtctcacacagacttggccgtttgttcttcaagagcacagtagtgaccagtggcagtgggcttccttctgcacctctgactgtaccgtgcccagttctgcccaagccactccatctttgagccacagaaccttctgtgaacccattagagccccattacgtcagtatccttgttttcctggaggaatcccaggtctctggagacttcgagatcctcatggaagaaggagaggccaccgagagagcagagggtataaatcagtcaccagctagaagtcgccatagggtgaagggaccctgagggtgcctctgtgcttctggcaggactgggaccctggaggaagctgacagccaggttgctcagtgctctgcaggaggcagtgctccagcagagaaggcaggaataagggacagaaggatcctcaagctgggagacagtccctacacacccctgcccttcaggtgttgtgacctgaagtgagttcctttccctagctagccaagacaggatcattagacagcmtattctctctttagatcaaagtctccgtcattctgtggagtccgtgagtggttgtggcatgctctgccaccctgaggcacagagagcctaacctcctttcctctgagtgtatccccbtggtytgagcccctctcccattcctgccatcagagaggggcctggcctctctccacagggmttctctcctcttcaaggccatatccacacctgccccccggagggctcaggagactctcccagggctgggcctcttgggtgagtggccactagcttctccttctgttttgttctgtatgtattgtgggtgggggagggggccacctgccttacctactctgagttgcctttagagagatgcatttttctaggactctgtgcacctgttgttgtatgtrgtcctgtgggctgagtgctttgtacatgagaataaatctatttctttctmmmaaaaaaaaaaaaaaaaaa

SEQ ID NO: 2876 - DNA, 1915 bp, Rattus norvegicus
gcggccgcgcggagcagcgcaacgctgcgggggaggcgcccgcgccgactcggggctcatggccaggaccaccagccagctgtatgacgctgtgcccattcagtccagtgtggtgctatgttcctgcccatccccatcaatggtgaggtcccagactgagcccagctcgtcccctggcattcctagtggtgttagcaggcagggatccaccatggacggcaccacagctgaagcccgaccaagcaccaaccccttgcagcagcaccctgcccagctgccaccacagcctcgcaagaaacgccctgaagacttcaagtttgggaaaattcttggcgagggctctttttcgacagttgttctggcccgagaactggccacttccagagaatatgctattaaaattctggagaaacgtcatataataaaagaaaacaaagtcccgtatgtaactagagagagagatgtgatgtcacgcctggatcaccccttctttgtgaaactttactttacgtttcaggacgacgaaaagctgtattttggccttagttatgccaaaaatggagagctactcaaatacatccgcaaaatcggttcatttgatgagacctgtacccggttttacacagctgagattgtgtctgctttagagtacttgcatggcaagggcatcattcacagagaccttaaaccagaaaacatcttgttaaacgaagacatgcacatccagatcacagattttggaacagccaaagtattatccccagacagcaaacaagctagagccaattcatttgtaggaacagcgcagtatgtttctccagagctgctcacagagaagtcggcgtgtaaaagttcagacctttgggcccttggatgtataatctatcagcttgtggcaggacttccaccattcagagccggaaatgaatatcttatatttcasragrycatyrwgyyggaatatgatttcccakaaaaattcttccctaaggcaaragatcttgtggaaaaactcttggttttagatgccacaaagcgtttaggctgtgaagagatggaagggtacgggcctctcaaagctcatccattctttgagtccatcacgtgggagaatctgcaccagcagacgcctccgaagctcacagsttacttgccagccatgtcagaagatgatgaagactgytatggcaattacgacaatctcctgagccagtttggctgcatgcaggtgtcatcmtcctcctcttcccactccctgtstgcggtggatgccagcctgccccagargtcgggcagcaacatagagcagtacattcatgatttggacactaactcttttgaactagacttacagwtttcagaaratgaaaaaaggttgttattggaaaagcaagccgskggaaacccttggcaccagkttgtagaaaataatctaatattaaaaatgggcccagtggataagcgaaagggtttatttgcaagacgacggcagttattactcacagaargsccacatttatattatgtcgatcctgtcaacaargtcttaaaargtgaaattccatggtcacaagaactccgaccagaggccmaraattttaaaactktcktygkscacacgcctwacaggacgtattacctgatggatccaagcgggawtgctcacaagtggtgcasaaagatccaggmggywygrrggcaacartmccaragcagtccasatgctgctrtkcartgacstgkcctkcgkccggkctgcmtatcgctgccaggacacctgcctcagckcggctcgsccgccacscaggacgyttccagaccacstgccagccatctyaaggagaacatagatggcaaaaacyktgcagcttttttatttaamaraaaamaaaaaaaracaaaagttgtgcggccg

SEQ ID NO: 2877 - DNA, 3482 bp, Rattus norvegicus
ttactatggcatcggtagtgtcctgacagttcggaaagcaggaaagcaagcgccgagaagaaaggctcgggcccagcggactcttacatcgcaacccatcaaggaattgttattttgggtcctgcaagtggggtccggtccaacttgaggtagcgtgaaggccccttcaggcggcgccgcgggcagccccgcagccggggcctggtgcagccgccgcggccgctgtcagggaagcgcaggcggccaatggaacccgggagcggccgctgctgctgaggcggcggtgtckgcagtccgaccccraccgcctgcamcccctccgcgagggtccccckgagcttggaagctcgaagtctggctgtagccatgggagacatggtagtggagcctgccaccctgaasccaacttctgakcctactcctakcccatcarggaataacrgkggctccctactaagcgtcatcacggagggggtcggggaactgtcagtgattgaccytgaggtggcccagaaggcytgccaggaggtactggagaaagtcaakcttttgcatggaggtgtagccatctctagcaaaggcagcccactggagttggttaatggggatggtgtggacaatgagatccgttgcctagatgatccacctaccgagatcagggaggaagaagatgagatggagcctggtgtggtctctggcacagccaaaggaacaagaagaagacgacagaacaactcagccaaacagtcttggctcctgaggctgtttgaatcaaaactatttgacatctctatggccatttcatacttgtataactccaaggagccgggagtgcaagcctacattggcaaccggctcttctgctttcgcaatgaggatgtggacttctatttgccccagttgcttaacatgtatatccatatggatgaggatgtgggtgatgccattaaacccywcrtrgtccaccgttgtcgccagagcatcaacttttccctccagtgtgccctgttgcttggggcctactcttcagacatgcacatttccactcaacgacactcccgagggaccaagttacggaagctaatcctctcagatgagctgaagccagctcaccgaaagagggagctgccaactttaagcccagcccctgacacaggactgtctccctctaaaaggactcaccagcgctctaagtcagatgccacggccagcataagtctcagcagcaacctgaaacgaacagccagcaaccctaaagtggagaatgaggatgaggagctctcctccagcaccgagagtattgataattcattcagttcccctgtccggctggcccctgagcgagaattcatcaagtccttgatggcaatcggcaaacggctggccacgctccccactaaagagcaaaaaacacaaaggctgatctcagaactttccctgctcaaccataagctccctgcccgagtctggctgcccacagctggctttgaccaccacgtggtccgtgtgccccacacacaagctgttgtcctcaattccaaggataaggctccctacctgatctatgtggaagttcttgaatgtgaaaacttcgacacaactaatgttcctgcccggattcctgaaaaccgaattcggagtacgaggtctgtggagaacctgccggaatgtggtatcactcacgagcagcgggctggcagcttcagcactgtgcccaattatgacaatgacgatgaagcctggtcggtggatgacataggcgagctgcaggtggagctcccagaagtgcacaccaacagctgtgacaacatctctcagttctcggtggacagcatcaccagccaggagagcaaggagcctgtgttcattgcggcaggggacatcagacggcgcctttcagaacagctggctcacactcccacagccttcaaacgagaccctgaagacccttctgcagtcgccctcaaagagccctggcaggagaaagtgcggaggatcagagaaggttccccgtatggccatcttcccaattggcgactcctttcagtcattgtcaagtgtggagatgaccttcgccaggagctgctggctttccaggtgttgaaacaactgcagtccatttgggaacaggagcgagtgcctctttggatcaagccatataagattcttgtgatttcagctgacagtggcatgatkgmacsagtagtcaacgctgtgtccatccaccaggtgaagaaacagtcacagctctccttgctcgattacttcctgcaggagcatggcagttacaccactgaggcattcctcagtgcccagcgcaattttgtgcaaagttgtgctggctactgcttggtctgctacctattacaagtcaaggacaggcacaatgggaacatccttctggacgcagarggtcacatcatccacatcgactttggsttcaycctttccagytcaccccgaamcctgggytycgagacgtcagcctttargytgaccmcagaatttgtggwtktawtgggcggcctgaacggkgatwtgttcaaytactwtargatkstcatgctgcaagggctgatcgctgctcgcaaacacatggacaaggtggtacagattswsgagatcatgcagcaaggttctcagcttccttgcttccatggctccagcaccattcgcaacctcaaagagaggttccacatgagcatgactgaggagcagctgcagctgctggtggagcagatggtggacggcagcatgaggtccatcaccaccaaactctacgatggcttccagtacctcaccaatggcatcatgtgacaccactttcaggcccagaagtggtgggattgaaggcaccctccttaggaggacccttgcctaagaaaacctaaatcacaaaatcccacctacctaaccacctacccaagggaaatggaaggcaaaaaacacaaaggatcatgtggtaaccatgagagctggccaaagggtaggagagccaaccatggggtccagacttgctggggcttccccacctcttgctgtgtcagtattgccacctgacagatymcaggactcactgccctccagagaacagagatgatgaacatgaggaggactggaaccttcttcccctcggggatctcatcttttactwtccctgggtcccagcaagatgggaggagtgggttcttggtacttaggacttaatcctatgtttggccatgctgstgcccaactctgtccccatytgggggstracccctagcccacattcccgacaggtgggtccwgcacttgcttaggttccccatcatgggggtaaggaagggaamtgacmcgatccctctaatatattgagggtattggcttagccatggggaaatttctcaccctgatcctttcctcacacccagggaaatagctctcattttttttttttaatttttaatttttgtttgaaataaagtccttagttagccatc

SEQ ID NO: 2878 - DNA, 2615 bp, Rattus norvegicus
ctatcggggctccggcagcagcgccagcatgtcgtccggcacgatgaagttcaatggctatctgagggtccgcatcggagaggcagtggggctgcagcccacccgctggtccctgcggcactcgctcttcaaaaagggccaccagctgctggacccctacctgacggtgagcgtagaccaggtacgcgtgggccagaccagcacaaagcagaagactaacaaacccacctacaacgaggagttctgcaccaatgtctccgacggcggccacctggagctagccgtcttccacgagacgcccctgggctatgaccactttgtggccaactgcacgctgcagttccaggagctgttgcgcacggccggcacatcggacaccttcgagggctgggtggatctggagcctgaggggaaagtgttcgtggtaataaccctaacagggagcttcactgaagccactctccagagagaccgcatcttcaagcattttaccaggaagcgccaacgggctatgcgaaggagagtccatcaagtcaacggacacaagttcatggccacatacctgaggcagcccacctactgctctcactgccgggagttcatctggggagtatttgggaaacagggttatcaatgccaagtgtgcacctgcgtcgtccataaacgctgccatcacctaattgttacagcctgcacttgccaaaacaatattaacaaagtggatgccaagatcgcagagcaacggtttggcatcaacatcccacacaagttcaacgttcacaactacaaggtgcccacgttctgcgaccactgtggctccctgctctgggggataatgcgacaaggacttcagtgtaaaatatgtaagatgaacgtacatattcggtgtcaggcgaacgtggccccaaactgcggggtgaacgccgtggagcttgccaagaccctggcagggatgggtctccaacccggaaatatttctccaacctcgaaactcatttccaggtctacgctgagacggcaggggaaggagggctccaaagaaggaaatgggatcggcgttaattcttccagcagattcggcatcgacaactttgagttcatccgggtgttggggaaggggagcttcgggaaggtgatgctcgccagaataaaggagacaggagagctgtacgctgtgaaggtgctgaagaaggacgtcatcctgcaggatgacgatgtggaatgcaccatgactgagaagaggatcctctccttggcccgcaaccaccccttcctcacccagctcttctgctgctttcagactcctgaccgtctgttctttgtcatggagtttgtgaacggaggtgacctgatgttccacatccaaaagtccaggcgtttcgatgaagcccgagctcgtttctacgctgcagagatcatttctgcactcatgttcctccacgagaaaggcatcatctacagagacttgaaactggacaacgtactactggaccacgaaggccactgtaaactggccgacttcggaatgtgcaaggagggcatttgtaacggggtcaccacagccaccttctgcggcacgcctgactacattgccccagagatccttcaggagatgttgtatggacctgcagtagactggtgggccatgggcgtgttgctttatgagatgctgtgcggacatgcgcccttcgaggctgagaatgaagatgacctttttgaggccatactgaatgatgaagttgtctaccctacctggctccatgaagatgccacagggatcctcaaatctttcatgaccaagaaccccaccatgcgcttgggcagcctgactcagggaggcgagcatgagatcttgagacatcctttctttaaggaaatcgactgggtccagttgaaccatcgccagctagaaccgcctttccgacccagaatcaaatcccgagaagacgtcagcaattttgacccagacttcataaaagaagagcctgttttaactccgatcgatgagggacatcttcctatgattaaccaggatgagtttagaaacttttcctatgtgtcaccagaattgcaaccgtagccttatgggaagcaacaaagagaaagggggatctttccagagatttcttgtgtgggaagtccccagctcctgccttttaacaccaccttcaccttcacggagcaaatgttcacaactctgcgaaggcggagcctcaagagagccactctgtcaagtcccggggagccatggtacacttcggtagttgatactgaggtaagatgttacagagacgtgcaccgcccaccccggagtctccatggctttcaggcttggagtaaaggacagaagccaaaagaagagatgctgggtaacacaggaggtcctagggatcctcagccaaacaggcttcttgtttttaacttcaagagacaaatctagactttccgtggagcaccccacactgttcttcacgccaatagtgcagtctgcgaaagatcaaatgctgatgaagaagccaaaagtctctctagggaaacggacggcattctaagcagactgattcgcttcgaacaaaccgcagttgggcgtcttaagctccaactaaccagtgttg

SEQ ID NO: 2879 - DNA, 2088 bp, Rattus norvegicus
ccggcggagcagctgtttctttaaggttgagcctctgatcagctgggaacccagcagaaggcaaaggtttctgttgatgtcttctcacctgccctgggctgtgaccgcccgggagagaccatgctcacattcatggccwctgatagcgaggaagaggtgtgcgatgagcggacgtccttgatgtcagccgagagccctacatcacgttcctgccaggacagcaggccaggcccagaggatggagagaacactgcccagtggaggagccaggagaacgaggacgactgtgaggaggacccggaccactatgcctgcagtggggttcctgggcgaccatcgggcctggaggaggagctgaccctcaagtatggggcgaassacgtgatcatgctgttcgtgcctgtcacgctgtgcatgattgtggtggtggccaccatcaagtccgtgcgtttctacacggagaagaacgggcagctcatctacacgcccttcaccgaggacacaccctcygtgggccagcggctcctcaactccgtgctgaacactctgatcatgatcagcgtcattgtggtcatgactatcttcctagtggtactctacaaatatcgctgttacaagttcatccatggctggctgatcatgtcctccctgatgctcctcttcttgttcacctacatctacctcggggaagtgttcaagacctacaatgtggccatggactaccccacactgttcctggctgtctggaacttcggggcagtgggcatggtgtgcatccactggaagggtcccctggtgctccagcaggcttacctcattgtgatcagcgcactcatggccctggtgttcatcaagtacctgccggagtggtccgcttgggtcatcytgggcgccatctctgtgtacgatctcgtggctgtgctgtgccccaaagggccactgagsaygmkggtggaaactgcccaggaaagaaacgagcccatatttcctgccctcatatactcatctgccatggtgtggacggtaggcatggcgaagctggacccctcctctcagggagcactgcagctcccttacgatccagagatggaagaagactcctatgacagttttggggaaccctcataccctgaagccttcgaagctccccagcctggctacccaggggaagagccggaggaggaggaggaaaggggtgtaaagcttggtctgggagrcwysaksttctacagcgttytggtgggcaaggcagcagccacaggcaacggagactggagcacgacgytggcctgcttyatcgccatcctcattggcttgtgtctcaccctcmtgytgctcgccgtgttcaagaaggccctgcccgccctccccatctccatcaccttcgggctcatcttttacttctccacagacaacmtggtgcgtcctttcatggacacgttggcctcccaccagctctacatctgacagaagagctgcggctctgagagctgtaggacgcttcgccgaatgcaggtgtatagttttacactctagtgccatatatttttttttaaaaaaacctttctttccttacaaaaraaaaaaaaaraawaaaaaagtgttgtgtttacttcgtgacgaggaagcagaagccgcccttctgtgctagctgtcttgtcaccagactgagrmwwrmmmrwmararcatctgtggcacccgcaggtgggatgctgggccaacaagcctatcttcagggatgaggtcacgtgtgtggatcaggttggagaggacgcaggccccatccaggtctgtaatcaatccttcagggctgagcaggaggaacatgtgcgtcagtggggaccaggaggcacggtcaggaaggacgctaagcaccaacaccctgaccagaggacaaaagccagtttgtcgtcatgaatgcccccagtgctttgtttgtgatgtctgttacctttagtatcttagaagctgagtcctgttcttatttctgcagtggactgctgggaagtggcttaatgacaataccaatacatagatgtccctgctggaaaaaaaaaaaaaaaaaaaaaaaaaaaaaaaaaaaaaaa

SEQ ID NO: 2880 - DNA, 1426 bp, Rattus norvegicus
ggtccctcccctttccctgctctgtcttggagcagtggggccatcagaccctcctactgtctggtacctgcctggaggagagaccatctctcctcaacgccctccaccatggacaattctttcaatgactccaggcgagtggagaactgcgagagtcgtcagtatctcctttcggacgaaagcccagccatcagctcggtgatgttcacggccggggttctgggaaacctcatcgcgctggcactgttggcgcgccgctggcgtggggacacggggtgtagcgccggcagcaggacctctatctccttgttccacgtgctggtaacggaactggtgctcaccgacctgctggggacctgcctcataagcccggtggtgctggcttctyaykmgrgaaaccagaccctagtggccctggctcccgaaagccgcgcgtgtacctatttcgctttcactatgaccttctttagtctggccacgatgctcatgctcttcgccatggccctggaacgctacctcgccatcggacacccttacttctacaggcgccgcgtctctcgccgcgggggtttggcggtgctgcctgccatctatggggtctccttgctcttctgttctctgccgctgctcaactacggggagtacgtccagtactgtcctgggacgtggtgctttatccagcacgggaggaccgcataccttcagctgtacgccacggtgctcctgctgctcatcgtggctgtgctcggctgcaacatyagtgtgatcctcaaccttattcgcatgcagcttcggagcaaaagaagccgctgcggattgtctggcagtagcctgagaggccccgggtctcgccggagaggagaaaggacttctatggcggaggagacggaccacctcattctcctggccattatgaccatcaccttcgctgtatgctccctgcctttcacaatctttgcttatatggatgaaacctcttcccgaaaggaaaagtgggacctccgagctcttagatttttatcagtgaactccataattgatccttgggtttttgtcatccttagaccaccagtcctgagactaatgcgctcagtcctctgttgtcggacttcactgagagcaccggaagctccaggagcttcctgttcgacccagcagacggacctctgcggacagttgtgagcatgcgctgcttgagggaacctgggccaaagcctttaaatggcctcgttggaggaacgtaaagggccggaatgtaaacaaatggccttgctttgagaaaccagatgcagaagactttaacgaggtggttggggctgcacacgtgatgacgtgatgacggggccctttgtggtaagtgtcagaggatgcataaagttcacatcgggtggcctttgagggacaaccagctgcatctaagacccag

SEQ ID NO: 2881 - DNA, 1977 bp, Rattus norvegicus
ccccctcccgcagctgtcctctgtagaaggcgggaccacccagagccctcaggaccgggattcccagrctccgggcgcaggcagccagacccccgagagtcctggttgtgcctccagctgcccagcggcgcctcgctccccatcacaagtttggtccatactggataagtaagctagtctgggataccgactgcttgtgccttaggagggtttggacatgccctggctggaagctttaccctacatctgtggatggctgattctccgtagctgtctcctggttggagcgcagctggattctgatggcaccatcactatagaggagcagattgttcttgttatgaaggctaaaatgcaatgtgaactcaacatcacagctcagttccaagaaggagagggcaattgcttcccagaatgggatggactcatttgttggcctagaggaacggcggggaaaacgtcagctatgccctgtccttcatatgtttatgatttcaatcacaaaggagttgctttccggcactgcactcccaayggaacgtgggattttattcatggctcaaataaaacctgggctaactattcagactgctttctgcagcctgatatcaacataggaaagcaagagttctttgaaaacctctacatcctgtacactgtcggctattccatctcttttggctccttggcagtagccattctcatcattggctatttcaggcggttgcattgcactaggaactatatccacttgcatttgtttgtgtccttcatgctgagagccaygagcatctttgtcaaggacagagtagcccaggctcacctgggagtagaggcactgcagtctctggtgatgcagggtgaccttcagaacttcattggaggaccatctgtggacaaatctcagtatgtggggtgcaagatcgctgtcgtgatgtttatttatttcttggctacaaactattattggatcctggtggaagggctctacctgcataacttaatctttgtgtctttcttttctgacaccaaatacctgtggggcttcatcttgataggctggggatttccagcggtatttgttgtggcctgggcagtagcacgagccactctggcggataccaggtgttgggaacttagtgctggagacaggtggatttaccmggmtccaatcttggcggctattgggctgaattttattctgttcctgaatacagttagagttcttgctacyaaaatttgggagaccaatgctgttgggcatgacatgagaaagcagtacaggaaactggctaagtcaacgctggtcctggtgctggtgtttggtgtgcattacatcgtgttcatctgccagccgcactccttctcggggctctggtgggagatccgcatgcactgcgagctcttcttcaactccttccagggattcttcgtgtctattgtctattgctactgcaacggagaggtacaggctgaggtgaagaagacctggactcgttggaatctgtccatcgactggaaaaaggcgccgccttgtggcggccacaggtacggctcggtgctcaccactgtcacacacagcaccagcagccagtcacagatgggaccaagcacacgcctggtgctcatctctagcaaacccgccaagactgcctgcagacagatcgacagtcatgtgactctacctggctacgtctggagtagttctgagcaggactgtcaaccacaatctaccccggaggagactaaaaaaggtcatgggcgacaggaagatgatagtccagtgggggagtcttccaggccagtagcattcaccatagacacggaaggatgcaagggagaatcccaccctatctgaatcaccatttgcagctcttgtggattggcggatctggctgtgtgggaggacctaagttggaagactggaattctgaaataaggcgtcgcttaaacatttccagtttctatgagtgggat

SEQ ID NO: 2882 - DNA, 1046 bp, Rattus norvegicus
atggcctcagtaactgatggtaacactggaatcagagatgcctctgaccagaaytttgaytayatgttcaaactgctcatcattggcaacagcagcgtcgggaagacctccttccttttccgctatgctgatgacaccttcacccctgcctttgtcagcactgtgggtatcgacttsaaagtgaagacagtttaccgtcatgagaagcgtgtgaagctgcagatatgggacacggcrggkcargarcggtaccggaccatcaccacagcctactaccgcggggccatkkgsttcwttytywtgkakswsrksaccaacsaggagtccttsaacgctgtccwggactgggctactcagatcaagacckaskcctggsacarcgcacaggtcattctcgtggggaataaatgtgatatkgaagaggaaagggtgatcccgactgagawdkgcykkctyytarcaragcaayttgggttygayttcttkraagccagtgccaakgagaacatcagtgtgaggcaggccttcgagcgtctggtggacgccatstgcgataagatgtctgwctcaatggacacagacccctccgtgctgggcgcctccaagaccacacggmtctcggacaccccgccgctgctccagcaraactgctcttgctaggcaaggcccgccmtgctgttccccccatgtcatgcccacttstsctctgctkctctctgttactgtctgctccmcgaaccccaagccagctgagttctttgccagcccctgtggttctctgcakayggycccagctacagatactaactgcaggttactgtgtgggtgaagactcctcttacaacagawractccctcttaggaaggaggttcamcatmgwgacttggaaagaaccttttctgcccttaaaataaaattcccttcatttaccaagatacaactcccacacgcactccttaggggttgaccagtgtgtaaagtgaggcccasctgcacagctgatactattaaagaaaatgtctcaaagcataaaaaaaaaaaaaaa

SEQ ID NO: 2883 - DNA, 5588 bp, Rattus norvegicus
  misc_feature (4886)..(4886): n is a, c, g, or t
gcggtttgaatggctgtgggcccgggccctaagctcatctgaagagccgcggcctccgggtgtgccatggcatctggaggcaaccagtcgtcacctcctcctcctgctgctgcagccagctcagaggaagaggaggaggatggcgacaccgcggaccgggcgcagcccgcagggtccccaagccatcagatccaacagcggttcgaagagctgtgcagccgccttaacatggacgaggcggcacgggccgaggcctggagcagctaccgcagcatgagcgagagctacacgctggagggaaatgatctccattggttagcatgtgccttatatgtggcttgcagaaaatctgttcctactgtgagcaaagggactgctgaaggaaactatgtgtctttaactagaatccttcgatgttctgagcaaagcctaattgaattttttaacaagatgaagaagtgggaagatatggcaaatttacccccacacttccgagaacgaaccgaaagattagaaagaaacttcactgtctccgctgtgatctttaagaaatatgaacccatttttcaagacatttttaaatatccccaagaagaacaacctcgccagcaaagaggaagaaagcagaggcgacagccctgtaccacatctgaaattttccatttttgttgggtgctttttatatacgcaaaaggaaacttccccatgatcagtgatgatctggtcaattcctaccatcttctgctgtgtgcactagatttagtttatggaaatgccctacaatgctctaaccggaaagaacttgtgaaccctaattttaaaggcgtgtccgaggacggccaccccagggactctcacccgtcctctgatccaccgtgtgtcattgagaagctctgctccttacacgacggcctagtgctggaggcaaaggggataaagcagcatttctggaaaccctacattaggaagctttttgaaaagaagctcctcagggggaaggaagaaaatctcactggcttcctggagcccgggaacttcgcagagagctttaaggctgttaataaggcgtatgaagaatacgtgttagccactgggagtctggatgagcggatatttcttggcgaggatgcggaggaggaagttggaactttctcacggtgtgtaagtgctgcctcgggcacagagagtgccgaacgaacgcagatgagagacatcttgcagcagcatcttgacaagtctaaaacacttagagtctgcaacccactgactggcgtgcggtatgttcaggagaacagcccttgtgtgactcccgtctccacagcaacacacagcctgrrccgkcttcacaccatgctggccggcctcasgaatgcacccagtgagaagctasaacagatactcaggtcatgttcccgagatccgactcgggctatcgctgacaggttgagagagatgyatgaaatatattmtcagcatttccagccmgacgagaatgttagtaattgtgctmaagaaatggccaacaaacactttcsttttgcasaaatgctttactataaagtattagagtctgttattgagcaagaacagaagagattgggagacatggacttatctggtgttctggagcaagatgcattccataagtcactcctggcctgctgccttgaggtggtcgctttttcctataagcctcctggaaatttcccatttattgctgaaatatttgatgtaccacattatcatttttataaggtaatagaagtatttattagagcagaagacggtctttgcagagaagtggtcaaacacctcaatcagattgaagaacaaattttagaccacttggcatggaaaaccaagtccccactgtgggatagaattagagataatgaaaacagagtccctacatgtgaagaggttacaccacctcacaacctagagagaacagatgaaatctatattgctggctctcccttaactccgagaagggtgggtgaagttcgcactgatgctggaggacttggaagaagtgtgacatctccaaccacactgtatgacaggtacagttccccaacagtcagtactactagaaggcggctatttgagagtgacagtccctctgaaggaagcacggctgggcgcatccccccacaacccctagtcaatgctgtccctgtgcagaatgtatctggggagactgtttctgtcacaccagttcctggacagaccttggtcaccatggcaacagccactgtcacagccaacaatggacaaacagtgaccattccagtacaaggtattgccaacgaaaatggagggataacattcttcccagtccaagtgaatgttgggggccaggcacaggctgtgactggctctatccagcccctcagtgctcaagcgctggctggaagtctgagttcccaacaggtgacaggaacaactttgcaagtccccggtccggtggccattcaacaaatttcccctggaggacaacagcagaaccaaggccagccgttaaccagcagcagtatcaggcctcggaagactagctccttatcacttttctttagaaaggtttactacttagctggtgtccgccttcgagacctttgtacaaaactagatatttcagatgaactgaggaaaaaaatttggacctgctttgaattctctatagtccagtgtcctgaacttatgatggacagacatctggaccagttgttaatgtgtgccatttacgtgatggcaaaggtcacaaaagaagacaagtccttccagaatatcatgcgctgttacaggactcagccacaggcccggagccaggtatacagaagtgtcttgataaaagggaaaagaagaaattctggcagctgtgagaacagaagccatcagaattctccaacagaactaaatacagacagagccagtagagactccagtccagttatgaggtcaaacagcaccttaccagttccacagcccagcagtgcccctcctacaccaactcgactcacaggtgccaacagtgacattgaagaggaggaaagaggagacctcattcagttctacaacaacatctacaggaaacaaatccaaacgtttgccatgaagtactcacaggcaaactcccaaatggacacccctcccctgtctccctatccgtttgtaagaacgggctcccctcgccgagtacagttatctcaaagtcaccctatctacatttccccacataaaaacgaagcaatgctttctcctcgagagaagattttttactacttcagcaacagcccatcaaagagactgagagaaattaacagtatgatacggacaggagagactccaactaaaaagagagggattctcttggacgatggaagtgaatcgcctgcaaaaagaatttgcccagaaaatcattctgctctgttacgtcgtctccaagatgtagctaatgaccgaggttcacactgaggttagtgtccaggaggaaactatcttcacatgaactctttggcaggacttaatgcatgcagaattatggaaccttgctccgtaatccagcaactgattagaggcgggtataaaggggagcacctctgactcagtgtggcagtaaacgcctgctatctcatcamccaaggggtkgaggggtaagaggaccaggagtttaaggccaacctgacttacagagcatgtctgaggccaacttggactacatgtaacccttactcaaaacaaaaaatggaagggacattttggtaakwwwkwwkwyttwttyywtkwmmwwararwawwwwawwcatcccacttgcctctacctctacttagtgcttgccttcaacactgctcagaatccacacatkwwttttttttttaactctgatagacttttacaatcactgcagaaagcaaatctttagaggcctttataggtcgagccagtagaggaactgtatttaaagtcattcccgcttggcatgtggctaggtccaaccatgtgytttaggatgaaaacacccgagaagtttacaatcagaacacaggatggccaacctggaagtgtccgggcactggcctaaggctcctatgcctttgagcattatcctgtcccaaggaggtgcggacagtgtgaaagccgtgcatgtctgagtgaacctgtgtacttggtggcactttagagctgtgagatgcatagcattgtgacccagattttgctgtatatttatggtggcactttctacagtgtgaactttagccagtacaagccttctaggcttagattaaacagctaatcttttctttcatgcttttctaaaggactgctgatgtagctmcwcgtkmtgggcasgtgtaggacyctcccatttatggtagtggcattacatagggatcatttagmtaaataaagatttttaaatcaagttgaattgataagtatttgaaaaattatgaccccttcctttcggaagtagctatccagaagaaagtatctttgagggtacycctggcagttaaaagaayasgwtggagaatttaggtttttattagtacatggtaccattgacacaaattwkwwkwtttwwtwkytawtgatwatctacacatatctttattaatcattattatcargtaattttttaagttggattaataatcytaaggagaaaattcwatttaaattggmtcwctgtaawcaaagytmytaggtgacttcataccgytccaaagayccagctgasaacytacagcctggcactggccaccagaktgctgtgcaaagtacgtadaaacctyktcgymcygctmctgtaattttatatgaaaatatgtgtatttttcmataaagcacttataaatyarwmwhwdwwwwdwwdhrkykmddnbddbhwtwwtttyyykkywywwwtgacaatcaaycatttattggttcatytcatctccmctaacacatcgtcattcaccatttaaatacctgacwtcgtcagaaaccgtwtgaacactttttcttcttcctgccataaaaatamagtaatttgccttttawaaaaaaaaccwaaacccactctgaccaarcatcctggycyctactcycctcacgcttctgaracaratgtttacagcaggtcagcaggcggaagctgaraagccagtcttctacttgaaagggctgcactctggagtctgttctctacscyskksckcacggsctaacttatgtacagctgaaactaccaactgcagactactacacagtactcattcctctctgttctgttagtttacgtaaacacaactcacttctaacatagtcagaaaaacacttaagcctcaaggtccccagtgatttggagtactgaactagctctgccctggcacttccgacagaagtagcgctttactcagagagaggtctccgtgagctgctgtgaggacctacgcacacacaacactgataccagtcactgttcacgcggtttactcttcaggccgtcctttgccatcagtcagctttaactaggcagagtccagcagraaagtgcacggtgcccagatccaccacctttaggttgctactgttttctctt

SEQ ID NO: 2884 - DNA, 2157 bp, Rattus norvegicus
cctggccattcggtgggatcccaagcaccctggccacggccgtgtgcctccctttgtcccacaagggcaggaacaggccataggccaagggcaccaggtcaagcctgctttggctgctggtgccttgagcttgacttcagcttatgggtcttaacacttgaagtggacacagggcatcagcaggatggatttcgggtccttggaaaccgtggtggccaactctgccttcattgcggcccgaggcagctttgacggaagcagcaccccctcttcccgagacaagaagtatctggccaagctccggttgcccccactgtccaagtgtgagggtctccgtgacagcatcagcctagagtttgacaacctgtgctcggagcagcccattggcaagaggctcttccagcagttcctgaagacagacgagaggcatgtgccggctctggagctctggaaggacatcgaggactatgacactgccgatgacgacctacggccacagaaggctcaggccatcctggctgagtacctggacccacagggcacactcttctgcaacttcctggaccagggcatggtggcaagagtgaaggaagggccaactgggagccaggatgggctcttccagcctctgctgcaggccacactggagcacttgagtcagggccccttccaggagtacctgggaagcctatatttcctgcggtttcttcagtggaagtggttggaagcccagcccataggtgaagactggtttttggacttcagggtcctggggaaggggggctttggggaagtgtccgcctgccaaatgaaggcgaccggcaagatgtacgcttgcaagaagctgaacaagaagcggctgaagaagaggaaggggtaccagggcgccatcgttgagaagaggattctagctaaagtacacagcaggttcatcgtgtctctggcctatgcattcgaaaccaagaccgacctctgtctggtgatgaccatcatgaatggaggtgacgtaaggtaccacatctacaatgtggatgaggagaaccccggctttccggagccacgagccatctactacacagcacagatcatcagtggcctggagcacctgcatcagagacgcattgtctaccgtgacctcaagccagagaacgtgctgctggacaacgatggcaacatccgaatttctgaccttggactggccgtcgagttgaaggaagggcagaataagaccaagggctatgcagggaccccaggtttcatggcccccgagctcctgcgaggcgaagagtacgacttctctgtggactactttgccctgggggtcacattgtacgagatgatcgcagccagaggacccttccgagcccgaggagagaaggtggagaacaaggagcttaaacagcgcatcatctcagagcccgtgaagtacccagagaagttcagccaggccagcaaggacttctgtgagcagctgttagagaaggacccggagaagcgcctgggtttccgggatggaacctgtgacgccctaagggcgaatgtcctcttcaaagatatcagctggagacagctcgaagccggaatgctcatcccyccgttcatcccagactctaggactgtctatgccaagaacattcaggatgtgggtgccttttccacagtcaagggtgtggtttttgacaaagcagacacagaattcttccaagaattcgcctccggcaactgctccattccctggcaggaggagatgattgagactgggktcttcggggacctcaacgtgtggcgcccagacggtcaaatgcccgatgacatgaagggaatcaccgtggaggaggcagcccctacagccaaatcagggatgtgtctcatctcctagcctagtgtytgggggaagcctggggctggctgtatagagagagggaaggatacagagctcaggggaggagagtgaccctggtgtcagcctgtgcccactccatccaggtcaccatgcaactgtgtcttcacaaggagccagcaagamtcccggtytagaccctagargcatggcagtccatttyttttgtcctgattcattcaaaaaagacaaaaaaaggccacagattgamcawtaaaaaaaaaaaaaaaaaaaaaaaaaaaaaaaaaaaaaaaaaa

SEQ ID NO: 2885 - DNA, 4501 bp, Rattus norvegicus
cccaggttccggctcctctgccccgcggctacaaaccccaccgcggaggaagttggttgaacttgctttccgctgcgggtacgaaggtatcgtcacaagtagcagcatcatgtcgactggggacagttttgagactcggtttgaaaaaatcgacaacctgctgcgggatcccaaatcggaagtgaattcagattgtttgctggatggattggatgctttggtttatgatttggattttcctgccttaagaaaaaacaaaaatattgacaactttctaagcagatataaagacacaataaataaaattagagatttacggatgaaagctgaagattatgaagtagtaaaggtaatcggcagaggtgcatttggagaagttcaattggtaaggcataaatccaccaggaaggtttatgctatgaagcttctcagcaaatttgaaatgattaagagatctgattctgcttttttctgggaagaaagggacatcatggcatttgccaatagtccttgggttgttcagcttttttatgcattccaagatgaccgatatctctatatggtgatggagtacatgcctggtggagaccttgtaaacctgatgagcaactacgatgtgcctgaaaagtgggcacgattctatactgcagaagtagttctcgcattggatgcratccattccatgggttttattcatagagatgtgaagcctgacaacatgctgctggataagtctggacatttgaagttagccgactttggtacttgtatgaagatgaataaggaaggtatggtacgatgtgatacagcagttggaacacctgattatatttcacctgaagtattaaaatcacaaggcggtgatggctattatggacgagagtgtgactggtggtcagttggtgtatttttatatgaaatgcttgtaggtgatacacctttttatgcagattctttggttgggacgtacagtaaaattatgaaccataaaaattcacttactttccctgatgataatgacatatcaaaagaggcgaaaaatctcatttgtgccttccttacggacagagaagtgagattgggcagaaatggtgtagaggaaatcaaacgtcatctcttcttcaaaaatgatcagtgggcttgggaaacgctccgagacactgtagcaccagttgtgcctgatttaagtagtgacattgatactagtaattttgatgacttagaagaagataaaggagatgaagaaacatttcctattccaaaagcttttgttggcaatcagctaccttttgtaggatttacatattatagcaatcgtagatacttaccttcagcaaatcccagtgagaacagatctagctccaatgtggataaaaacgtgcaggaaagtttacagaaaacaatctacaagcttgaagaacaactgcataatgaaatgcaattaaaagatgaaatggagcaaaagtgcagaacttcaaacataaaactagacaagataatgaaagaattggatgaagaggggaatcaaagaagaaatctagaatctgcggtgtctcaaattgagaaagaaaagatgttgctacaacatagaattaatgagtaccaaagaaaagtggaacaggaaaawraraaaaraaraaatgtagaaaatgaagtttctacactaaaggaccagttggaagacttacggaaagcaagtcagagctcacagcttgctaatgagaagctgacacagttacagaagcagttagaagaagcgaatgacttacttaggacagaatcagacacagctgtaagattaaggaagagtcacacagagatgagcaagtcagttagtcagctggagtctctgaacagagagttacaggagagaaacagaatgttagagaattccaagtcacaagcagacaaggattactaccagctgcaagctgtattggaagctgagcgaagagacagaggccatgattctgagatgattggagaccttcaagcacgaattacgtctttacaagaagaggtgaagcatctcaaacataatcttgaaagagtagaaggagaaagaaaagaggctcaagacatgctcaatcattcagaaaaggaaaaaaataatttggagattgatttgaactacaagctcaagtctattcagcagaggttagaacaagaagtaaatgaacacaaagtaaccaaagcgcggctaactgacaagcatcagtctattgaagaggcaaagtctgttgccatgtgtgaaatggaaaaaaagctgaaggaagagagagaagctcgagagaaggctgaaaatagagttgttgagactgagaagcaatgttctatgctagatgttgacctgaaacagtctcagcagaagctagaacatttgaccgaaaataaagaaaggctggaggatgcagttaagagtctcaccctgcagctggaacaggaatccaataagcggatcttgctacagagtgaactgaagactcaagcgtttgaagcagacaatttaaaagggttagaaaaacagatgaaacaggaaataaatactttattggaagctaaaagattkttwkwwtttgagttagctcagcttacaaagcaatacagaggaaatgaasggcamrwgsgggagtwacaagatcagcttgaagctgagcaatatttctctacactttataaaacccaggtaaaggaacttaaagaagaaattgaagaaaaaaacagagaaaatttaaggaaaatacargarytgsmamgwgraaaagaaactctttcgactcagttggatttagcagaaacaaaagctgagtctgagcagttggctcgaggaattctggaagaacagtattttgagttgactcaagaaagcaagaaagctgcttcaagaaatagacaagagattacagataaagatcataccgttagtcggcttgaagaagcaaacaatgcgctaaycaaagatattgaactactaagaaaaraaaawraaragctaaatgaaaggatgagaacagcagaagaagaatataaattgaagaaggaggaagaaataagtaatcttaaggctgcctttgaaaagaatatcagtaccgaacggacccttaaaacacagkctgttaacaagttggcagaaataatgaatcgcaaagattttaaaattgataggaagaaagctaatactcaagatttgwgaaaaaaaraaaarraaaatagaaagctccaactagaacttaaccaagaaagagaaaaatttaaccaaatggtggtgaaacaccagaaggagctgaatgacatgcaagcgcaattggtagaagaatgtacacatagaaatgaacttcaaatgcagttggctagcaaagagagtgatattgagcagttgcgtgcaaaacttttggacctttcggattcaactagtgttgctagttttcccagtgctgatgagactgacggaaatcttccagttggttctgcctgcattccttatttatttatcttctactcttctagttcaagaattgaaggttggctttctgtaccaaatagaggaaatatcaaaagatatggctggaagaaacagtatgttgtggtgagcagcaaaaaaatgttgttctataatgatgagcaagataaggaacaatccagtccatctatggtgttggacatagataaattgttccatgtccgacctgtaacccaaggagatgtgtacagagctgaaactgaagaaattcctaaaatattccagatactgtatgcaaatgaaggtgaatgtagaaaagatatagaagtggaaccagttcaacaaggtgaaaaaactaatttccagaatcacaaaggccatgaattcattcctaccctctaccactttccagccaactgcgaggcctgtgccaaacctttgtggcatgtttttaagccaccgcctgccctagagtgtcgaagatgccatgttaagtcccacagggaccatctagacaagaaagaggacttgattcccccatgcaaagtaagttatgatgtaacatcagcaagagatatgttgctgttagcatgtcctcaggatgaacaaaagaaatgggtaactcatctggtaaagaagattcctaagaaggcaccttctggctttgtccgtgcctctcctcgaacgctgtcgacaagatctactgcaaatcagtctttccggaaagtagtcaaaaatacatctggaaaaactagttaaccatgtgacctactgctgtgttggaatcatatggatgctacctgatcaccaggctgtttaacatgtggaacagacaggctgtttcttttgacacaaataccaccaggcttttcagggttaagattgctgttgttctgtcttgttgggcacaaaagcacactgaggattgttttgtttcttgcgggtttgcctacggtagttagattaattattactatgcatcaggtacatgggaagctgctaggttttttaggtggctctttggataaggaatccttacac

SEQ ID NO: 2886 - DNA, 1248 bp, Rattus norvegicus
  misc_feature (31)..(34): n is a, c, g, or t
  misc_feature (37)..(37): n is a, c, g, or t
  misc_feature (914)..(914): n is a, c, g, or t
  misc_feature (1069)..(1069): n is a, c, g, or t
  misc_feature (1228)..(1228): n is a, c, g, or t
tgtgttggttgtctccagtctatcttgcgannnnaanagccacttttggagcagggccgggagtctggcacccccctcttttagggtgccctgagtcttcattccttactatctctctccttctcgcgcccttgagtctcgtccctttattcccttccaagggttgcacagcataatggaacgcgggttccatccacctgtatccgcgccgtattgatccactctatagggcattggtaccgccccccctgggtttctgtgttgtgtgtttgtctcttttgttgtttgtttttatgtgttcwkkcytkggwkyststcttttcctctggcrcvcsakcgacgwtcctagttgtcatcatggsmcgccgccccgcccggtgttatcgctattgtaagaacaagccatacccaaagtctcgtywcwskmgkgktgtccctgatgctaagayccgcatctytracttgggacggaagamagcaaaagyggaygadktyccactttgtggccacatggtgtmagmtgaatatgaacaactctcttctgaagcwctggaggctgcycgtatttktgccaacaaatacatgstaaagagytgtggcaasgatggcyttcatatccgsrygargckccamcmtttccatgtcatccgtatcaacaagatgttgtcytgtgctgkggmtgacaggcyccagacagktatgcgtggtgcctttgggaarcccmagggvamagtagvcagggttcacaktgvccrmgtmatcatgtmtatccgaaccaagstgcrgaataaggaacatktgattkaggctytgcgyargsccaarttcaarttccstkvccsscagaaratccacatywcaaagaaatggggttttwccaagttcamkgcagakgrrtwwramsmcatkgtykntgagawgyggmtcattcctgryggctgtggtgycaaatatatcsscamkmgtgstyctcttracmartggagarccytgcattcmtgraggsttccacagkgskytcctatrcbctawyamatsakgttcaatawtaaagtctcrcvttcmawwnwrhwddwrwwarwaaraaraaaaarwmacgtacatggtgcgaaaagagaaataaaaaaaaagtgggatgataagcatgacaaaggtgagggggataattcccgggggtatatgaaaagacgtgaggatgtaatagttttcttttttttttattttttgnggataaaaaggagagagaaa

SEQ ID NO: 2887 - DNA, 3144 bp, Rattus norvegicus
  misc_feature (3139)..(3140): n is a, c, g, or t
cggcgcggcggacggcccagccagagcgcgaggggctggggggcgtgcgggggtatcggtgcagcagcaaggaccccggggcccagaggcggcacagcccggggccgcccggaggagcgcgggcggtccggcggcggcgcgatgccgctcgcccagctcaaggaaccctggccgctcatggagctggtgccgctggacccggagaatggacaggcttcaggggaagaagctggacttcagccatccaaggatgagggcatcctcaaggagatctctatcacacaccacgtcaaggcaggctctgagaaggctgatccatcccattttgagctcctcaaggttctgggccaaggatcctttggcaaagtcttcctggtacgcaaggtcacccggcctgacaatgggcacttgtatgccatgaaagtattaaagaaggccacgctgaaagtgcgtgaccgtgttcggaccaagatggagagagacatcctagctgacgtgaaccaccccttcgtagtgaaactgcactatgccttccagaccgagggcaagctctatcttattctggactttctgcgtggtggagacctgttcacacgactctcaaaggaggttatgtttacagaggaggatgtgaagttttacctggctgagctggcactgggcctggaccacctgcacagcttgggcatcatttacagagacctcaagcctgagaatatccttttggatgaggagggccacatcaaactcactgactttggcctgagcaaggaggccattgaccacgaaaagaaggcctattccttctgcgggaccgtggagtacatggcgcccgaggttgtcaaccgccagggccacacccacagtgcagattggtggtcctatggggtgttgatgtttgagatgctgacgggctccctgcccttccaggggaaggaccggaaggagaccatgaccttgattttgaaggcaaagctaggcatgccccagtttctgagcacggaagcccagagcctcctgcgggccctgttcaagaggaatcctgccaaccggcttggctcaggccccgatggggctgaggaaattaagagacatatcttctactctaccattgactggaataagctctaccgccgtgagatcaagccacctttcaagcccgctgtggcccagccggatgacaccttctactttgataccgagttcacgtcacgcacacccagggattcgccgggcatcccccccagtgctggtgcccatcagctcttccgtggcttcagcttcgtggccaccggtctgatggaggatgacagcaagcctcgggccacccaggctccgctgcactcggtggtacagcaactccacgggaagaacttggttttcagcgatggctacatagtaaaggagacgatcggcgtgggctcctactctgtgtgtaagcgctgtgtccacaaggccaccaacatggagtacgcagtcaaagtaatcgacaaaagcaaaagagatccctccgaagagatcgagattcttctgcggtatggacagcaccccaacatcatcaccctgaaagatgtgtatgacgacagtaagcacgtatacctggtgacagagctgatgaggggcggggagctgctggataagatcctacggcagaaattcttctcagagcgggaggccagcttcgtcctgtacaccatcagcaagactgtggaatacttgcactcccaaggggtcgtccacagggacctcaaacccagtaacatcctgtatgtggatgagtctgggaaccccgaatgcctacgaatatgcgactttggctttgccaagcagctacgggctgagaacgggcttctcatgacaccttgctacacagccaactttgtggcacctgaggtgctgaagsgtcagggctacgatgaaggctgtgacatatggagcctgggcgttctgctgtacacgatgctggcaggatacactccatttgccaatgggccsagtgataccccaraggagatcctcacccggatcagcagtgggaagttcaccctcarygggggaaactggaacacggtttcagagacasccaaggacttagtatctaagatgctgcatgtggacccccaccagcgcctcacagccaaacaggttytgcagcacccgtggatcacccagaaagacaagctcccccagagccagttgtcccaccaagacctgcagcttgtgaaggggsscatggcagctacatattctgcactcagtagctccaaacccaccccccagctcaagccaatcgagtcgtccatcctggcccagcggcgggtgaggaagctgccatccaccaccctgtgaacsrcagygcgagcaaactcctykgaggcagagtccttccagagggagcaagcctgagtcacagaccaagtggaatggagtcctaaaggaagcaactagcccagctcacccgtgcgggtgtgaagtgccttcctccccaggacgggctcttctgggctcaggctccattgtgtgaaatmsamtyackgyacrarswwtttttwaraaarraaaaaraaaaaatgacatcatttaccatggattttttttttacaagatccatttgsctttttggccattgcagtcccaggaggaacacccagtcccatgtgtggccragrctcccgtgatagctttgggactccgcccctctgttggtcaagsmsccaycwgcrcccrcmkccrarcasgttckgcgywscctmtcasmswkrwmgacwrgctcctcagcagaacttggtgtcmccagccatctctttttccattctgttctggggttctcgaaccactttytgctaagagcccgrgacyccaccctgtgcagctyttggctcaggcamcagcatccacagygccccatgcgcagttgggcccctgcagtcagaacgggcagccccgtggarakgagacggmgagcactttttgggagacttcctgttctgccactggacagagttcacaggagaccagggaggtagtccacgggggatgagggctttttccctttcctcctcagctggtaactcagggttcatctgtccaaggcctttytaataaacctacagtccagtcaaaaaaaaaaaaaaaaaannaaaa

SEQ ID NO: 2888 - DNA, 708 bp, Rattus norvegicus
  misc_feature (162)..(162): n is a, c, g, or t
caaaagctggagctccaccgcggtggcggccgctctagaactagtggatcccccgggctgcaggttggtgagtgtgtgckctgtggcccggctctggctagtggctctaccggtcgctctcactggtgtggtcgggtctmwtcckbbyydwkbcgvcrkcgndggtkgagcagccgyyacgatgcagatttttgtgaasaccsttacagggragaccatcacgctcgagrttgaaccyyyrgacastatakaaaatgtaaagsscaagatccaggrtaaggaaggaattcytcctgatcagcagaggttgatctttgctggtaagcagktggamgatkgccgtactttgtctgrstacrrcattcrarrggagtscactctccatctmgtgctgagacttcgyggtggcrctaaramamsgaagargaagycttacmccmccccwawgawgaacaagchtaagagaawgaaggtcaagttggctgtgctgaaatactataasgwsgatgaaaatkgcaaaatcagccgacttyktcgggaatgtccttmtgatgaatgtggwgctkgarktttcatgggtagccactttgacaggcmttactkkggsaagtgtkgtctgacttactksttcaacaaaccmgaagacawkkagttgtgtwtgagtkrrtammgrgaasgaactgrwrwwamaaaaaaaaaaaaaaaaaa

SEQ ID NO: 2889 - DNA, 720 bp, Rattus norvegicus
cacsmrgctcttccaaagaytgcagcgcctcaggscccakgtttymacagattcttcaaaakgccakycsrmaygrrgcatgccaygsaaaccatgatgcttacatttcacaggttyscaggkdmaamaraytacttsamaawgsassammtgagmrtgctcatggaaassrwgwtscytrbrtttywsgaraatcaaaaggaccytctggctgtggacaaaataatgaaagmcytgkaccagtsccgagatggaaaagtgggcttccagagctttctatcamtagtggcgkrgytcatcattgcatgcaatgactatwttgtagtacacatgawgcakaagaagtaggccawctggagcmctkgtacccacaccttgatgcgtcctctcccatggggtcaactgargaatctgccccactgcttcctgtgagcagatcaggacccttaggaaatgtgcmmmtaacatycaactccaattcgacaarcmgagaargaaaasttaatccaatgmcmgaggagctttcgagttttatattkdttgcatccggwtgccytcaataaagaaagycywtttytttaarwwmmraaaaaaaamaawamwawmaawtmmtmwwmawamaaaaaaatttgagggggggacccgggaccccaattccccttatcatgaggtcgaattacaatttcccttggccgccgatataaccatgttcgagactgg

SEQ ID NO: 2890 - DNA, 1815 bp, Rattus norvegicus
tttgttaacagtcttgccacctccttcagggagcagcagcctcaagcctggctgtggatctgatcggactgggtaggtccagccatggtctctctgggcttggaggtcgcccagggtcctggaccacgtgcaggtcgctgagctggacgcagaaccggccaccaagctcctgaaggggccagaacgcaaaggggagcaacagtgggcggagcatgctcagcaccatgagaccccggctgtccctgcttctgctgaggctgttgctgctcaccaaagcagcgcacaccgttggagttccgccccgactgtgtgacgtgcggcgtgtgctgcttgaggaacgggcccactgcctacagcaactctccaaagagaagaaaggagcactgggcccggagacagcatcaggctgtgaggggctttgggacaacatgagctgctggccctcctctgcaccagcacggacagtggaagtgcagtgtccgaagttcctcctgatgctctcaaacaaaaatgggtctctgttccggaactgcacacaagatggatggtcagaaaccttccccaggcctgacctggcctgtggggtcaacataaacaactcctttaatgagagacggcatgcgtacctgctgaaactcaaggtcatgtacactgtaggctacagttcctccttggccatgctcctggtcgccctcagcatcctgtgctctttccggaggctgcactgcactcgcaactacatccacatgcacctgttcgtgtccttcatcctgcgcgccctgtccaacttcatcaaggacgccgtactcttctcctcggacgacgtcacctactgtgatgcccataaggtgggctgcaagctggtcatgatcttcttccagtactgcatcatggccaactacgcatggctgytggtggagggcctctaccttcacacactccttgccatctccttcttctcagaaaggaagtacctgcaggcctttgtgctcctcggatggggttctccagccatttttgttgctttgtgggctatcaccaggcactttctagaaaatactggatgctgggacatcaacgccaatgcttccgtctggtgggtcattcgagggcctgtgattctgtccatcctgatcaatttcatcttcttcataaacattctaagaatcctgatgaggaaacttagaacacaagaaacaagaggaagtgaaacaaaccattataagcgcctggccaagtccaccctcctgctgatcccgctctttggcatccactacattgtcttcgccttctccccagaggacgccatggaggtccagctgttcttcgaactggccctgggctccttccagggtctggtggtagctgtcctttactgcttcctcaatggtgaggtgcagttggaagttcagaaaaaatggcgccagtggcaccttcaagagttcccgctgcgccctgtggccttcaataactccttcagcaacgccaccaacggccccacccacagcaccaaggctagcactgagcaaagccggagcatccccagggccagtatcatctgaggctgcagcaaggcgccagcggacgaagggttggatattcggtaggacggacatctgtctgatagccatctcgtgctcgactggctgaacaggcttgtctctcgggtccgagcttcctcggagatcaagcaagaggagactactaggtcatcgcggagcaggaaacggacccatgacttggtttttcttgttcttctaagaagagcaattcagcaactccagaaggggcaggggaataaaatgacacccagag

SEQ ID NO: 2891 - DNA, 2063 bp, Rattus norvegicus
gcgaagggacaccctaacgcagcgaccctcccgcggccgcccagcctaccgcctagaccgctgcagctgtyctcgggtcgcaggaagctccatggtgggagaagaaaygtctctgagaaaccggstgtcaagatctgctgagaatcctgagcaagatgaagcccagaaaaatctcttggacacacacagaaatggtcacattaccatgaaacagttgatagccaagaagaggcagttggcggcagaggcagaggagctgaagccmctsktkcygaaggaagttgggtgtcactttgatgactttgtgaccrrtctcattgacaagtctgcatctctggacaatggcgggtgtgsgctcacgaccttctscattcttgargaaatgaaaaacaaccacagagccaaagatctgagagcacctscagaacaagggaagatatttattycaaggcggtctstkttagacragctgtttgaagtggaccacatcagaacaatttaccacatgttcattgccctcctcatcatcttcatccttagcacgctcgtggtggattacatcgatgaasgaaggctggtccttgagttcagtctcctggcttatgcttttggccaatttcctattgttatttggacatggtgggccatgttcctgtctacactggcaatcccctatttcctgttccagcgttgggcccatggttacagcaagagttcccacccactcatctattcccttatccatggcgcattcttcttggtctttcaacttggaatcctcggttttataccaacatatgttgtcttagcatacacgctgcccccagcctcccggttcattctgatacttgagcagattcgtttggtaatgaaggctcactcatatgtcagagagaatgtgccacgagttctaagtgcagccaaggagaaatcgagcacggttccagtacccacagtcaaccagtacctgtacttcctgtttgctcctacacttatttaccgagacagctaccccaggactcctactgtaagatggggttatgttgctatgcagtttttacaggtttttggttgcctgttttatgtgtactacatctttgagagactctgtgcccctctgttccggaatatcaaacaggagccctttagtgctcgtgtcctggtcctgtgtgtatttaactccatcttgccaggtgtgctgatgctgttcctttcgttctttgcctttttgcactgctggctcaatgcctttgctgaaatgttacgctttggtgacaggatgttttataaggactggtggaactctacatcgtactccaactactacaggacctggaatgtggtggtccacgactggctctactactatgtttacaaggacctcctctggtttttctcgaagaggttcaggcctgccgccatgttggccgtgttcgccctgtcagcagtggtgcmcgagtacgccctcgctgtctgcctgagctacttctacccagtgctcttcgtgctcttcatgttctttggaatggcttttaacttcatcgttaacgacagtcggaaaaggccagtctggaacatcatggttygggcttccctcttcctcggccatggagtcattctgtgcttttactctcaagagtggtatgctcgacagcrctgtcctctgaagaaccctacatttctggattatgtccggscacgrrsctkgacttgtmgbtasstgkyytwgaasccctgsctctgcctcctktctctgaagtgctaggattacagaagacatctccatgtctggccaagatttttttaaaaaaacttttaggttataacttctttgaagttacttagaagtatcctttggtacaattcctttgtctaatgtgtagtgactttccttgttctagactagtgagtccatagtagaagtactgatctctactgataatactaaaatggccactaaggatccagaagctggcttctgaaacgtctgctcagtcattatactttaacagtatatttttagatgaaataaattactatgtgatcawwwaaaaaaaaaaaaa

SEQ ID NO: 2892 - DNA, 843 bp, Rattus norvegicus
cacgaggggccgatacgcggctggggcggacgtagacgcggccttctgagtcttccctgtctccctgctcccatcctcaagtcttttsstccgcaatggctcccaaaggcggctccaagcagcagtccgaggaggacctgctccttcaggatttcagccgcaacctgtccgccaaatcgtcggcgctgttcttcgggaatgcgttcatcgtgtctgccattcccatctggttgtactggagaatatggcatatggatcttatccagtctgctgttctgtacagcgtgatgacgttagtaagcacttacttggtagcctttgcatacaagaatgtaaaatttgttctcaagcacaaagtagcacagaagagggaagatgctgtttccaaagaagtgacccgcaaactttytgaagctgataatagaaagrtgtcccggaaggagaargatgaaagaatcctgtggargaagaatgaagttsccgmttatgaagstacaacattcwccatcttstataacaacactctgttcctggttctgrtwaktgttgcctccttctttatactgaagaacttcaaccccasagtgaactacattctgtccawargtgcttcatctggactcatcgccctcttgtctactggctccaaatagactgtgtagcttggccccatgcctttgtatctaggggtggcctgtggtatatgagaaagcatcagggtggccaggttgggagacacataacatgtttttatagtctggagtttgagggtttaaaaatgcagtagaatgtaattcagtgtttgtttattggctgcctttctttgaaaaaaaaaaaaaaaaa

SEQ ID NO: 2893 - DNA, 1110 bp, Rattus norvegicus
cggccgccgcccgcctccgcccgtgctagcgctgctctctcgccctggccggcacccccgcagttgctccaggccgctcacttgggacgcgcttacctgagacaaggcgcctgccaccctcacctggrccaggatgaaggaccgactggagcagctgaaggccaagcagctgacgcaggatgatgacacggacgaggttgagattgctattgataatacagcgttcatggatgagttcttttctgagattgaggaaacgaggctcaacatcgacaagatctcagagcatgtggaggaagctaagaaactctacagtatcattctctctgcaccgattccagagccaaaaaccaaagacgaccttgaacagctcacaactgagatcaagaaaagggccaacaacgtccggaacaaactgaagagcatggagaagcatattgaggaagaygaggtccggtcatcagcagaccttcggatacgaaagtcccagcactccgtcctctcccggaagtttgtggaggtgatgacaaagtacaatgaggcacaggtggacttccgtgaacgcagcaaagggcgcatccaacggcagcttgaaattactggcaagaaaacaacagatgaggagctggaagaaatgttggagagtggcaacccagccatcttcacttctgggatcattgactcccagatttccaagcaagccctcagcgagattgagggtcggcacaaggacatcgtgaggctggagagcagcatcaaggagctccatgacatgtttatggacatcgccatgctggtggagaatcagggtgagatgttagataacatagagttgaatgtcatgcacacggtggaccatgtggagaaggcacgggatgaaactaaaagagccatgaagtatcagggtcaggctcgaaagaaattgataattatcattgtgatagtagttgtgttgctgggcattttagcgttgattattggattgtccgttgggctgaaataagagtggcctaaggggctgctgcactgaaatcttggcctgaccactcttgtctccagatgggaacaaagattaaatggccttcctgagaatgaggggtactgttcttt

SEQ ID NO: 2894 - DNA, 1196 bp, Rattus norvegicus
tttgggctcaggtccaggcactccggccaccatgcgcgacaggacccatgagttgaggcagggggataacatctcagacgatgaagatgaggttcgagtcgcgttggtggtgcactcaggtgccgcccggctgagcagcccggacgacgagttcttccagaaggtgcagacaattcggcagactatggccaaactggagagtaaagtccgggagttggagaaacagcaggtcaccattctggccacgcctcttcccgaggagagcatgaagcagggcctgcagaacctgcgagaggagatcaaacagctggggagagaagtccgggcacagctaaaagccatagagccccagaaggaagaagctgatgagaattataattcagtcaacacaagaatgaagaaaacccagcatggggtcctgtcccagcagtttgtggagctcatcaacaagtgtaactcaatgcagtccgagtaccgagagaagaacgtggagcgcattcggcggcagctgaagatcaccaatgctggaatggtgtctgacgaggaactggagcagatgctggacagtgggcagagtgaggtgtttgtgtctaatatactgaaggacacacaggtgacccggcaggccctgaatgagatctctgcgcgacacagtgagatccagcagttggagcgcassatccgtgaactccatgagatctkcacttktstagctaccgaggtggagwtscagggagagatgatcaatcgtatcgaaaagaacwtkctgagctcwgcagactatgtggaacgtgggcaagaacatgtcavgrtrrckytmsakrwycvkamswvksssmsgaagaaaaaggtcatgattsccakctgkstttckgtcactsttykcathttgrckgtcmtcaktggcatcwccatawccgttggawartgtcacatstthttgscmctgggagaaacararacycmgcawttgtggaggcagggsaggcctccagstggacccaccytcacaytggcccttgtgcaraagggmawatggctyttytggkktggcagctgstygttcatggagtccttcccytcagbccmcaawksmtgggaraaagttyccaatgtcctgtktgtytgggacawatggttwtrtaaaraattamaaaarcawraaamcmaaarvmmrraaaaaaaaaaaaaaaaaa

SEQ ID NO: 2895 - DNA, 2139 bp, Rattus norvegicus
cacgagggcgctactccttaggggaagatggcgcccttggggctgaaggcggtggtggkggaaaaaattctaagtggagtcatccggagcgttaagaaggatggcgagtggaaggtactcatcatggatcatccgagcatgcgaatcttgtcatcctgttgtaaaatgtcagatatcttggcggagggcatcaccattgtggaagacatcaacaaacggagagaacccattcccagcttggaggcaatttatttgctgagtcccacagagaagtcggttcaggctctgattgcggacttccaggggacaccaaccttcacctacaaagcagcccatatcttcttcacggacacgtgccccgagcccttgttcagtgaactgggccgctctcgcctggcgaaggtggtgaagacactgaaagagatccacctcgccttcctcccctatgaggcccaggtgttctctctggatgccccgcacagcacctacaacctttattgcccatttcgggcaggggagcgggggcggcagctcgatgtgctggcccagcagatagccacactgtgtgccactcttcaggaatacccatccattcgctaccgcaagggcccagaagacacagcccagctggcccatgctgtcctggccaagctgaacgccttcaaggcagacactcccagtctgggcgagggcccagagaaaacacgctcacagttgctcataatggaccgggcagcagaccccgtgtccccgctattacatgaactcacattccaagccatggcctatgatcttctgcacatcgagcaggacacatacaggtatgagaccacaggactgagcgagtcccgggagaaggctgtgctcctggatgaagacgatgacctgtgggtggaactccggcacatgcacatagcggatgtgtccaagaaggtcacggagctcctgaagacattctgtgagagcaagcggctgaccacagacaaggccaacatcaaagacctgtcccacatcctgaaaaagatgccacagtatcagaaggagttgaacaagtactccacgcacctgcacttggcagatgactgcatgaagcacttcaagggctcggtggagaagctgtgcggtgtggagcaggacctggccatgggctctgatgcagagggtgagaagatcaaggacaccatgaaactgattgtcccggtgctgttggatgcctccgtgccaccctatgacaagatccgggttctgctgctctacatccttctgcggaacggtgtgagtgaggaaaatctggccaagctgatccagcatgctaatgtgcagtcctacagcaacctcatccggaacctggagcagctggggggcactgtcaccaactctgcgggctcagggacctctagccggctggagcggagagaacgcatggagcccacctaccagctgtctcgctggtccccagtcatcaaggacgtgatggaggatgtggtggaggaccggctagaccgaaagctgtggcccttcgtgtctgaccctgcccctgtgtctagctcccaagcagctgtcagcagtgctcgctttggccactggcataaaaacaaagctggtatagaggctcgggctggacccaggctcatcgtgtacattgtgggtggtgtcgccatgtctgaaatgagggctgcttatgaggtgaccagagccactgaaggcaagtgggaggtacttataggctcttcccacatcctcactccaacccgcttcctcgatgacctcaggaccctggatcagaagctggaggacatagccctgccctgactcagctgcttgctctgccctctcctcctgttccagagaaataaactcttcccttcatctttccatcagggctcacctcactttcttcccagagagagctgtataaaccagacccatgctgccggcctccccttatgttactgttctgcctgaaccttcccttggcccccagaagcagctttagcttccatgaacgttgggaacctgggctctggctctctggctgggtccctccatccaaaccctgatcttagcagacaaactgcagaggagacagagagctgccaatcagggaatggcagggctgcaaccccattgtcactagaa

SEQ ID NO: 2896 - DNA, 2515 bp, Rattus norvegicus
  misc_feature (1419)..(1447): n is a, c, g, or t
cgccgcctgtgccatttctgattttgcaacttggggaagaagaaaaaagcgagagaagggagctcgctcgccggggggtggggaggggggagagagagcgcggcccccccaggaacggagcgcgggggggagcgggcgaggggagcaggggtgttgggggggagcctgagagcctgggggggctgcaaaaagagagaaagaaaacagcaggaaccacaacaaaactccagcagggcgggcgggctccgcagcagcagcggggcggccgaggcagtacggcagcggcggcggcggcggaggcagcggccggtgtccggctcgggctcggctcctgcgaccccggggcgcccggcgggccccccgccccctccccctccccccttccccttccccttcccctcccagcgcgcccgcgcgccccgccgccctcggcgagcagctcggctccccccagcgctccccgggcccaaagatatggcaatggtagttagcagctggcgagatccgcaggacgacgtggccgggggcaaccccggcggccccaaccccgcagcgcaggcagcccgcggcggcggcggcggcgagcaacagcaggcgggctccggcgcgccgcacacgccgcagaccccgggccagcccggagcgcccgccacccccggcacggcaggggacaagggccagggcccgcccggttcaggccagagccagcagcacatcgagtgcgtggtgtgcggggacaagtcgagcggcaagcactacggccaattcacctgcgagggctgcaaaagtttcttcaagaggagcgtccgcaggaacttaacttacacatgccgtgccaacaggaactgtcccatcgaccagcaccaccgcaaccagtgccaatactgccgcctcaagaagtgcctcaaagtgggcatgaggcgggaagcggttcagcgaggaagaatgcctccaacccagcccaatccaggccagtacgcactcacaaacggggatcccctcaatggccactgctacctgtccggctacatctccctgctgctgcgagcagagccctaccccacgtcgcgttatggcagccagtgcatgcagcccaacaacatcatgggcatcgagaacatctgcgagytggcmgcccgcctcctcttcagcgccgtcgagtgggcccgcaacatcccgttcttcccggatctgcagatcaccgaccaggtgtccctcctacgcctcacctggagcgagctgttcgtgctcaacgcggcccagtgctccatgcccctgcacgtggccgtgctggcagcagccggcctacacgcctcgcccatgtccgcggaccgggtcgtggccttcatggaccacatccgcatctttcaggaacaggtggagaagctcaaggcgctgcacgtcgactctgccgagtannnnnnnnnnnnnnnnnnnnnnnnnnnnncgtcagatgcttgtggcctgtcggatgctgcacacatcgaaagcctgcaggagaaatcgcagtgtgcactggaggaatacgtgaggagccagtaccccaaccagcccagccgctttggcaaactgctgctgcgattgccctctcttcgcacagtgtcctcttctgtcatagagcagctcttcttcgtccgtttggtaggtaaaacccccatcgaaactctcatccgagacatgttgttgtcagggagcagtttcaactggccttacatgtccatccagtgctcctagaccttgggtgtttcccacctgcccctgcaccccctaacgccctagagactaagcggactcaccctgtaccaaggactcaaaagcctttggggatgctggtatcagggcaggcagggcggaggggaggagggccgaggagaggcccactctgcagaaatacaatccgagctacaaagcatgggaaaaagagactcttttaggatcagatctgtgagcacgttggcgaggaaaaacaaaacaaacaaaaaaaagaaccttgtgtctgtctggtgaaaaaaagaaaaacaaattggaagagaggaccatgagaattttaataaaacagaaggaaactaatggaccttccaggatttaytgtggayggatgtggatatattctgtacagraacwacmcatatggaagtggactgaakcctatgtagaracacacacacactgaacattgttattcattttgtaaaatactagtctttattttgcatttttcgtaaaatttaaacmtcgtatgcgcataaacaaaaatgaacaagaattaggsggaaataacatttyccaaataatwataaaatatttgtcctgtgtstatgtatmwatatctgttttgtatttttttctggttccaaaccagatttcctgtgattctatactaataattwttgatmtaaccctttgcttcttmtaatgagtgcgatatatsttgtcgaggctgttcttcaagaattaaaattgaagtgaaaatttaaacaaaaataaaagaatttagcaaaaaaaaaaaaaaaaa

SEQ ID NO: 2897 - DNA, 2880 bp, Rattus norvegicus
tcagagccctcaccctctcccttccaggagaaaaaacaaacctttcttactccttaaagtgagagatccccctcctgcctccctagcatcgcatattaatatctccacgttgggaacgcgttgcattttcttttttaaaggaatcctagccagggacgtttttctattgggcattgactttcaactgctttgcaaaagtttcgtattaaaaacaactctacctgacccgctctgagaattactagtttctttttwtwtttttttcytactttaaacaacaacaacaacgtttcctccttttaaaaacatgcactactgtgtgctgagaacctttttgctcctgcatctggtcccggtggcgctcagtctgtctacctgcagcaccctcgacatggaccagtttatgcgcaagaggatcgaggccawycgcgggcagatcctgagcaagctgaagctcaccagccccccggaagactatccggagccggatgaggtccccccggaggtgatttccatctacaacagtaccagggacttactgcaggagaaggcaagccggagggcarccgcctgcgagcgcgagcgaagcgacgaggagtactacgccaaggaggtttataaaatcgacatgccgtcccacttcccctccgaaamtgtcygcccasttkytacarcaycctctkgctcagtgggcagcttttgctccatacagtcccaggtgctctgtgggtaccttgatgccatcccgcccactttctacagaccctacttcagaatcgtccgcttcgatgtctcaacaatggagaagaatgcttcaaatctggtgaaggcagagttcagggtctttcgcttgcagaaccccaaggccagagtggctgaacaacggattgaactgtatcagatccttaaatccaaagacctaacatctccaacccagcgctacattgatagcaaggttgtgaaaaccagagccgagggggaatggctctccttcgacgtgacagacgccgtgcacgagtggcttcaccacaaagacaggaacctgggatttaaaataagtttacactgcccctgctgtaccttcataccgtctaataattacatcatcccaaataagagccaagagctggaggcgagattcgcaggtatcgatggcacctccacatatgccagtggtgatcagaaaactataaagtccactaggaaaaaaagcagtgggaagaccccgcatctcctgctaatgttgttgccctcctacagactggagtcccagcagtccagccggcgacggaagcgggctttggatgccgcctattgctttaggaatgtgcaggataattgctgccttcgccctctttacattgattttaagagggatcttggatggaaatggatccatgaacccaaaggatacaatgctaacttctgtgctggggcatgcccttatctgtggagttcagacacacaacacaccaaagtcctcagccwgtacaacaccataaaccccgaagcttctgcttccccttgctgtgtgtcccaggatctggaaccactgaccatcctctactacattggcaatacgcccaagatcgaacarctttccaacatgatcgtcaagtcttgtaaatgcagctaaagtcctcgggaaagccaggatgaaaatcacggtgacaatgacgtatgacgacaatgacgatgataatgttcgtgacgtgagggagttttgattcatcagtgttgaaaaaaaaawwrrasswmrwraaaatcggtactagttcaaacactttgcaagcttgtgttctgtttgttaaaactggcatctgggattacagcaacaacagccacaaaaatggaaggcgytagtctgcatctcacctacttcctgagagacmcaaaaagaaaacatcttttttttttaaaggaaaaaataaacactggaagaatttgttagtgttaattatgtgaaaraaaawacaaaacaaaacaggaaaatccgttcagtggagttgtatgtattgtttccaccccattcttcaccccacgcctctcttgtttcctctgtattgctctgcaatgggcgccctccccatcccttcctctgagttaacagtgggttatttattgtgttactatataatgaacctttcattgcccttggaaaataaaacaggtgtataagtggagaccaaatactttgccacaaactcatggatggcttaaggaatttggactcaaataagccagggggaaggaggtcatactggatgaccccctgtgagccgttatagaactgagcaagtctgagaaaaaaaaatcaaagccccagaaaacatgtgctgtgcactgcctgccgaagcttcatgagcagccatctgtccagaaggcctgttaacaagaaaacttggaatcagtgggaatctggaagattggttttttttccttctaattgtaaatggttctttgccagtttaagcaagccggtgaaatggtgacctgcttggatgtgtattgtcagacttttgaccgtgaagtggctgttgatctacaatacaggttttttttttccctttgtctcggtatacggtaattacatggatattattaaaatagacgggtctagaagccagcatgatgaaaacacactgcaaatctgttttacaaactattaaatcgaaacagtaactactttacatgtaatgtgtagatcttaccacatttttaaatattctgtaataatgattatgatttagattgaacttaaatttgaactctctctctttttttaatgatcattcagactgtatgtttgcctcctttagctggccagtacctttgaataaaacccctagattttgacttgcactacaaaaaaaaaaaaaa

SEQ ID NO: 2898 - DNA, 2338 bp, Rattus norvegicus
cgcgcgcgcacacgctcgcctgggggacggagccccagcctcctgcgcagctctcctcggccgccgggggcctcctccgggcctccgagctccggggatcgccggccacatctggcccgcacctctgcccagcgcgctccgggcggcgcaggcatcctgagagggcgaggaataaaggcgcagcccggggtccccgaggctcggttcgcggcgccccaggggccggtctatgacgagcgacgggggctgccatgggtcgggggctgctccggggcctgtggccgctgcacatcgtcctgtggacgcgcatcgccagcacgatcccgccgcacgttcccaagtcggttaacagcgatctgatggcgggtgacaacagcggtgcggtcaagcttccacagctgtgcaagttttgcgacgtgacactgtccacttgtgacaaccagaagtcttgcatgagcaactgcagcgtcacctccatctgtgagaagccgcaggaagtctgcgtgsccgtgtggaggaagaacgacaagaacattactctggagaccgtttgccacgaccccaagttcacctaccacggcttcactctggaagatgccacttctcccacgtgcgtcatgaaggaaaagaaaagggcgggcgagaccttcttcatgtgctcctgtaacacagaggagtgtaacgattacatcatctttaatgaagaatacaccaccagcagtcctgacctgttgctggtcattatccaagtgacgggcgtcagcctcctgcctccgctggggattgccatagctgtcattgccatcttctactgttaccgtgtccaccggcagcagaagttgagcccctcctgggagagcagcaagccccggaagctcatggatttcagcgacaactgcgccatcatcctggaggacgaccgctctgacatcagctctacgtgcgcsrmcracatcaaccacaatacggaactgctgcccatcgagctggacacgctggtggggaagggccgcttcgccgaggtctacaaggccaagctgaagcagaacacttcagagcagtttgagaccgtggctgtcaagatcttcccctacgaggaatactcctcgtggaaaacggagaaggacatcttctctgacatcaacctgaaacacgagaacatcctgcagttcctgacggccgaggagcggaagacggagatgggcaagcagtactggctgatcacggcgtttcatgctaagggcaacctgcaggagtacctcactaggcacgtcatcagctgggaggacctgcggaagctgggcagctccctggcccggggcatcgcccatctgcacagtgaccacactccttgtgggaggcccaagatgcccattgttcacagggacctcaagagctctaacatcctagtaagaagcgatytracctgttgcctgtgtgacttcgggytgtccttgsgcctgrrccctactctgtctgtggatgacctggccaacagcgggcaggtgggaacagcgagatacatggccccggaagttctagaatccaggatgaatttggagaacatggagtccttcaagcagacggatgtctactccatggctctrgtactctgggaaatgacgtckcgctgcaacgctgtgggagaagtgaaagattatgagcccccrtttggttccarrgtgcgggagcacccctgtgtggagagcatgaaagacaacgtgctgagagaccgaggacggcctgaaatccccagcttctggctcaaccaccagggcatccagatcgtgtgtgagacactgaccgagtgctgggaccacgaccccgaggcccgtctcacagcccagtgtgtggcagagcgcttcagtgaactggagcacccagatagactctccgggaggagctgctcccaggagaagattccagaagacggctccctgaacactaccaaatagctttttctgggcaggctgggcaagactccggaagtccgtcctctarccaaagaccagaggtcagcaggattgctttcctgactgatgcttctggaaamccaaggacttgctcccttcttccytagtagctgctccatgttcagaagcagcagtggcagcggtggcagcagcaaccatagcagaagcggtgggggaacgagtgacagaaggcatcctatgccttgggtgttgtcctggcataagctgtgctagcacctcctcaggaaatgagattgattttttttacaacagccaawaamrwwwrmamwwwawwaawrmmwrwrwrwaaatacgaatagctatgttttatatatatctwtawmwmwaaaaaaaaaaaaaaaaaa

SEQ ID NO: 2899 - DNA, 1407 bp, Rattus norvegicus
ggtgtacctgggtcctgaagcccttcttcacctggatagattccttggcccacctgtccccaccccactctgtgcagaggtacaaaagctcaagccgtctccatggccccaggaaagattcaggggagaggccccacacagggagccactgcagtcagacaccctgggcagaatggagctgactgatttgctcctggtggccatacttctcctcaccgcaagactaactctgtccagcccagttcctcccgcctgtgaccccagactcctaaataaactgcttcgtgactcctacctccttcacagccgactgagtcagtgtcctgacgtcaaccctttgtctatccctgtcctgctgcctgctgtggactttagcctgggagaatggaaaacccagacggaacagagcaaggcacaggacattctaggggcagtgtcccttctactggagggggtgatggcagcacgaggacagttggaaccctcctgcctctcatccctcctgggacagctttctggtcaggttcgcctcctcttgggagccctgcagggcctcctaggaacccagcttcctccacagggcaggaccacagctcacaaggaccccagtgccctcttcttgagcttgcaacaactgcttcggggaaaggtgcgcttcctgctgctggtagaaggtcccgccctctgtgtcagacggacccttcccaccacagctgtcccaagcagaacctctcaactcctcacactaaacaagttcccaaacaggacttctggattgttggagacgaacttcagtgttgtagccagaactgctggccctggacttctgaacaggcttcaaggattcagagccaagattattcctggtcagctaaatcaaacctccgggtccttagaccaaatccctggatacctgaacgggacacacgaacctgtgaatggaactcatgggctctttgctgggacctcactacagaccctggaagccccagacgttgtgccaggagctttcaacaaaggctccttgccactcaacctccagagtggacttcctcctatcccaagccttgctgctgatggatacacacttttccctccttcacctaccttccccacccctgggtctccaccccagctcccccccgtttcctgacccctccaccaccatacctaactctaccaaccctcatccaggacttggtctcagtaagcgtcccgtgcactggcacggagagcgatcgtctgcaacatctctcaggggcaagcttcctcaggaaggctctgaggcagctcactagacatcctgctctcgcctaacgggccctgggaaagggatacacaggccaggacactgtacaaccttaggagcgatttttttcttaacctatcaacaatattcatcagagc

SEQ ID NO: 2900 - DNA, 3273 bp, Rattus norvegicus
ggagggaacacggtgcctcgggttgtgtacacgctccactgacagagcttcttgcagccgggcagccgctgatcacgcgtggccccgccagcccattggctgaggcctcacacacctttgccgctgattggtcgataccacgccccgccttccaccccgcccgcggcgcggggcaggcagagcggctacctgcatggggagggggggcagacagcgcggagcgcggtggcgtcgacgtctagtgtctcagtgctccgtctgtggctaggcagccagcagccaagcagctcgcgacctacggccaggcagccaaccatgcttaacttcggcgcttctctccagcaagcttcggaggggaaaatggaactaatttctgaaaagtccaaagagggagcacatccctgggacaaagctgaacagagtgactttgaagctgtggaagcgctcatgtccatgagctgcgactggaagtctcacttcaagaaataccttgaaaacaggcctgtcacaccagtgtctgatacctcagaggaagacagtttgcttccagggacgcctgaccttcagaccgtcccagcattctgtttgactccaccttacagcccctctgacttcgaaccctcgcaggggtcaaatctgacggcaccagcgccacctactggtcacttcagatcgctctccgatgctgccaagcctcccagcatcgctccttttaaagaggaggaaaagagcccattagctgcccctcccctccctaaggctcaagccaccagtgtcatccgtcacacagctgatgcccaactctgtaaccaccagtcctgccctgtgaaagcagctagcatcctcaactaccaggacaattctttccggagaagaacccacataaatgtcgaggctactcgaaagaacataccctgtgctgctgtgtcaccaaacagacccaagyctgagcccagcacagcggcgaatggcgctgagaaggccggcactgcgccgtatgactttgctgtgccttcctcagagacagtcatctgtaggtcttctcagccagctcccacgtccccagtacagaastcagtactgatgtcttcacctacagtgtccactgggggagtgccacccttgcctgtcatctgccagatggttccccttccagcaaacaactctctcgttaccacagttgtccccagcagtccgcccagccagccacccgctgtctgctcacccgtgttgttcatgggcactcaggtgcccaagggcacggtcatgtttgtggtaccccagcccgttgtacagagcccaaagcctccagtggtgagccccaatggcaccagactgtctcccattgcccctgcgcctggattctctccttcagcagcaagggttactccccagattgattcgtccagagtaagwwgtcacatctgtagccacccaggatgtggcaagacttactttaaaagttcccatctgaaggcccacgtgagaacacacacaggggaaaaacctttcagctgcagctggaaaggctgtgaaaggaggtttgctcgttccgatgaactgtccagacaccggcggacacacacaggtgagaagaaatttgcctgtcccatgtgtgaccgtcggttcatgagaagtgaccatttaaccaaacatgcccggcgacacctatcagccaagaagctgccaaactggcaaatggaagtgagcaagttaaatgacatcgctctgcctccggccacagcgtcggcacagtgacggccagaagatggagactcagaataaactttggtcagagtcgagccggtgaccgygtcaaatgcttctgcaagtctgcggccstccaacagggcctaaagcagaagcccctggcctggggggaggcccagcctgggttagatgacgagaagtgcttcagccacaggcagttcacagaagggcggggttcatttcttaccacgtagagagatgagaacactcgtgtcccttgagtagttttggaaggtttcggatgagatgagcacagcamagrttykgmaysacatacayatcaggtactttgtttttgccatttatacttgagaccagctttgcagtgtgattcttttaaagcgttggtttcgagaatatagaggctgaaattacggtacagaaatgcagctagaaagtgagtttgtgtcatcttctmctagagwtatcytgcttattattcctagtctttacagtcaactccgtggacgtggctaagtatagaaaactatcatttcttccactgtyrwwggtwtttgaggttgaacagctgtacattgctaaggggagcccaaggattggaactctcattaatttaattgcttggaagtgcagctaaagttcttttttttggccttttgttttgaaaswtkarsyakwwywctctaccttagatattagtttgcttgcagttttttgtgtagatttgaaaactgtacacyaawstgttymmwawaramwwaarawacgctgcgctttgtttagaaaacaatctggcagtgaaaatatgtgtcgtaaagaagagatgtcaagaatttgagatgactccttgagaaagatggcttatgtcatcagcaaaggacacttacgtcagacgtacactgtttctatcaaatcaggaagttagtgmccatcacagatggacaggtgtccttttatttatargarttygkcasgakgtctgagtagataggtaggaaattgttactagaacattcacttccgacttgacaaggatattcatggtgcagatacgttcttcctgccgytgcagtgtctgggtgtccgggmaactccgagactttaaagtgtcataatgtggtcacacckgcagttctgggratccaragccttgcttgtgttctgtaagctctgtcaccragttgtatccccacctgaaascagtgacttttgctamcagtatttstgttctgttgtaaagtggatagaagacacacttggtagtaamggtaaattattcaaagtccmcagtgaaaaactcmccatmccttcccatttaaaccgtttstgtatctcataggtttytgacatgcaaacttgaacccttgaaaaaaagagttttyttaaaaattataaaaaaaatcrcgagttwcaatttgcmcaatattttttgttgyactttayaccttgtttacaataaagrcttttstttggtahmaaaaaaaaaaaaaaaaaaaaaaaaaaaaactcgagggggggcccggtacccaattcgcccgatag

SEQ ID NO: 2901 - DNA, 2051 bp, Rattus norvegicus
  misc_feature (1832)..(1832): n is a, c, g, or t
  misc_feature (1836)..(1836): n is a, c, g, or t
  misc_feature (1838)..(1838): n is a, c, g, or t
ctcttgctcctggaccccccagagaccccagcgctcctacggttcacagccactgcgccctcgctctcttcttgcagatcttgcagccgcagcaagccaggccacctcgtccttcgaagccatgtccaccaggtccgtgtcctcgtcctcctaccgcaggatgttcggtggctccggcacatcgagccggcccagctccaaccggagctatgtgaccacatccacccgcacctacagcctaggcagcgcgctgcgccccagcactagccgcagcctctattcctcgtccccgggtggcgcctatgtgacccggtcctccgccgtgcgcctgcggagmrrmatgcccggcgtgcggctgctgcaggactccgtggacttctcgctggccgacgccatcaacaccgagttcaagaacacccgcaccaacgagaaggtggaattgcaggagctgaatgaccgcttcgccaactacatcgacaaggtgcgcttcctcgagcagcagaacaaaatcctgctggccgagctcgagcagcttaagggccagggcaagtcgcgcctgggcgacctctacgaggaggagatgagggagttgcgccggcaggtggatcagctcaccaatgacaaggcccgtgtcgaggtggagagggacaacctggccgaggacatcatgcggctgcgagaaaaattgcaggaggagatgctccagagggaggaagccgagagcaccctgcagksattcagacaggatgttgacaatgcttctctggcacgtcttgaccttgmacgkraagtggaatccttgcaggaagaaattgcctttttgaagaagctgcacgatgaagagatccaggagctgcaggcccagattcaggaacagcatgtccagatcgatgtgsacgwkkccaagcctgacctcaccgctgscctgcgtgatgtccgccagcagtatgraagtgtggctgccaagaacctccaggaggscgaggaatggtacaagtccaastttgctgacctcyctgaggctgccaaccggvacaacgatgccctgcgccaggcaaagcaggagtcaaacgrataccggagrcaggtgcmgtcactcacctgcgaagtggatgcccttaaaggcactaatgagtccctggagcgccagatgcgtgamaysrragagaattttgcccttgaagctgctaactaccaggacactattgsccgsctgcaggatgagatccagaacatgaaggaagagatggctcgycaccttcgtgaataccaggmcytgctcaatgtaaagatggctcttgacattgagatcgccacbwrsaggaagctgctggaaggsgaggagagcaggatttctctgsywyktccaaacttttcttccstgaacbtgagagaaactaacctggagtmacttcctstggktgacacccaytccaaaagamcactcmtghttaagacggttgaaaccrgagacggacaggtgatcartrrgayktcycagcaccvcgatgacyttkratraaaactgcacaggmtcagtgcaacggygcagtmccagcmaraagdaaaaarrrmwhgtatcttagraaaaagagctttcaagtgcmtttrytgcagttttcaggagcgcaagawagatytgggatagamacgagctcakmacatamcaactgacwcccccaaaaggcgtagaaaaggkttacaaaataatctagttttmcgaagaaatcttgtgctagaatactttttaaagkatttytgaataccattaaaactgctttmtttttccagaaaatatctgrccaacttgktmctgsttcaataaaamttcnswhntnmwmamaamammhraaaaaaamwmragggggggcccggtacccaattcgccctatagtgagtcgtattacaattcactggccggtgtttacaacgtcgtgactgggaaaacctggggttaccaatttatcgcttggagcaatcccctttgccgcggcgtatacgaagagccgtccgatgccttccaaagtggcgctgatgggatggcatgtacg

SEQ ID NO: 2902 - DNA, 1693 bp, Rattus norvegicus
gagagctgcgagtgttccgcagctgtgagcgactccccagcggcgatgcctcacaactcgatcagatccggccacggagggctgaatcagttaggaggggcttttgtgaatggcaggcctctgccagaagttgtccggcaacgcattgtggacttggcccaccagggagtgagaccctgtgatatctctcgccagcttcgtgtcagccatggctgtgtaagcaagatccttggcaggtactacgagactggcagcatccggcctggagtgatagggggctccaagcccaaggtggccacccccaaggtggtggagaagataggggactacaagcggcagaaccctaccatgtttgcttgggagatccgggaccggctcttggcagaaggcgtttgtgacaatgacactgtgcccagtgtcagctccatcaacagaatcatccggaccaaagtgcagcagccattcaacctccccatggacagctgcgtggccaccaaatctctgagcccaggacacacactgatccccagctcagctgtcacacccccagagtcaccccagtcggattccttgggctctacctactctatccacgggctcctagggattgctcaggctggcagtgacacacacagaggaagatgtgatgatagtgaccagggacagtgtcgactgagcatcgattcccagagcagcagtagtggtcctcgaaagcatcttcgtacagacaccttcgggcagcaccacctcgagccgctcgagtgcccgtttgagcggcagcattacccggaggcctatgcctcccccagccacaccaaaggcgagcaggggctatacccactgcccttactcaacagtaccctggatgacggaaaggccaccctgacaccttccaatacacctctgggacgcaacctctcaactcaccagacctaccctgtggtggcagatcctcattcaccctacgccataaagcaggaaaccccagagctctccagttctagctccaccccttcctctttatctagctccgcctttttggatctgcagcaagtcggctctgggggcccagcaggtgcctcggtcccacccttcaatgccttttcccatgctgcctccgtgtatgggcagttcacgggccaggccctcctctcagggcgagagatggtggggccatcgctgcctggatacccaccccacatccccaccagtggacagggcagctatgcctcttccgctattgcaggcatggtggcaggaagtgagtattctggcaatgcctacagccacaccccgtacgcctcctacagtgaggcctggcgcttccccaactccagcctgctgagttccccatattattacagctctacaacaaggccaagcgcaccgcccacctctgccacggcctttgaccatctgtagttgtcatggggacagtgggaacaaccaggcaacaggaggacttggcctgagacgggccccagagagtcacacaaaggaatctttatttattacatgaaaaataaccacaattccagcattgccgctcactccctgtgtggtcaattaaatgaaccatgaaagtcaggatgaccttggggaaggccaaactgtcctccaagagtcatttcgtgatgtgacaggagttccaggaaccaagaaccatccatttcaaaagagcacggaggagaaa

SEQ ID NO: 2903 - DNA, 1800 bp, Rattus norvegicus
gccgccgccgagcaggcagcagccgcgtcagggccgtccgggggccacaccggcgatgcccgcagcccccgcagcgccccgcgggacccgctgacttacccccgggccggggtcataccgggccgggccgggccgcgagcggcggcgctgcctgcatgaccctccggaggcgcggggagaaggcgaccatcagcatccaagagcatatggccatcgacgtgtgtcccgggcccatccggcctatcaagcagatctccgattacttcccccgcttcccgcggggcctcccccccaccgccgcgccccgcgcctccgcgcccccggacgcccccgcgcgctcgcccgcagccaccgccggcccccgcagcccctccgacggcgcccgcgacgacgacgaagatgtggaccagctcttcggagcctacggtgccagcccaggccccagccccggacccagccccgtgaggccgccggccaagccccccgaggacgaaccggacgccgacggctacgagtcagacgactgcaccgccctgggtacactggacttcagtctgctctatgaccaggagaacaacgcactgcactgcaccatcagcaaagccaagggcctgaagccgatggatcacaatggactggctgatccctacgtcaaactacacttgctgcctggagccagcaaggcaaataagctcagaacaaaaaccctacggaacactctgaacccctcctggaacgagaccctcacctattacgggatcacggatgaggacatgatccgaaagaccctgaggatctccgtgtgtgacgaggacaaattccgccacaacgagttcatcggagagactcgagtgcccctgaagaagctgaaacccaaccacaccaagacattcagcatctgcctggagaagcagctgccggtggacaaggcagaggacaagtccctggaggagcgtggccgcatcctcatctctctcaagtacagctcacagaagcagggcctgctggtgggcatcgttcgctgcgcacacctggcggccatggatgctaacggctactcagacccctacgtgaaaacatatctgaaaccagatgtagacaagaaatccaagcataagaccgcagtcaagaagaaaacactaaaccctgaattcaatgaggagttctgttacgagatcaagcatggagacctagccaaaaagaccctggaggtcactgtctgggactatgatattggaaaatccaatgatttcatcggtggggtggttctgggcatcaatgccaagggtgagcgcctgaagcactggtttgactgtctgaagaacaaggacaagaggattgagcgttggcacacgctcaccaatgagatcccaggggctgtactcagcgactgactgtcccatctgctgccacccacccttgccacccagcccacacaggtccaaccctgggctttctcagctgccaccaagggctgtggccctcacaatgggcaagatccaggttgtctgctcggacatagccactgcagcccctgctaggaggctaggaggccaagagcacccagcctctcgcagagggacaggaaaacacaacatgaaacctgtttcagctcccctggcaccccaaagggccagagctgggagaaatcctcagcctcagctctgtccagtggaagggctatctacagtgaggacctatcagaggtgaggggtggaaccctgctgcaagcacagaaatgggggtactctggctacctggagaccacagagggaggactatgggcaggcagagcccagg

SEQ ID NO: 2904 - DNA, 3569 bp, Rattus norvegicus
ggagcggaggctgcttccccggcacctgggagtgggtcgcggggacgcgaaggcacagggcgggcggacgcgccttcgccatgagcttggcggcggtgcggaccgggcgtgctgagctccggccgccggcccggcatgggcgtctcccgcgagcccgctgccggccggggctagggccggatggagccgcgggaccccagccccgaggcccggagcagcgactcggagtcggcctccgcctcgtccagcggctccgagcgcgacgcggatccggagccggacaaggctccgcggcgcttaaccaagaggcgcttcccggggctgcggctctttgggcacaggaaagccatcaccaagtcgggcctccagcacctggcaccccctcctcccacgcctggggccccgtgcggtgaatctgagcggcagatccggagtactgtggactggagtgagtcagcagcgtatggggagcacatctggtttgagaccaacgtgtccggagatttctgctatgtcggggagcagtactgtgtagctaagatgctgccgaagtcagcgcccagaagaaagtgtgcagcctgtaagatcgtggtgcataccccttgcatcgggcagctggaaaagatcaatttccgctgtaagccatccttccgtgaatcaggctccaggaatgtccgtgagccaaccttcgtaagacaccactgggtccacaggcgacgccaggatggcaagtgtcggcactgtgggaagggcttccagcagaagttcaccttccacagcaaagagatcgtagctatcagctgttcctggtgcaaacaggcgtaccacagcaaggtgtcctgcttcatgctgcagcagattgaggagccctgttccctaggggtgcatgcagccgtggtcatcccacccacctggatcctacgggcccggaggccccagaacaccctcaaggccagcaagaagaaaaagagagcatccttcaaaaggagatccagtaagaaaggacctgaggaaggccgctggagacccttcatcatcaggcccaccccgtcccccctcatgaagcccctgctagtgtttgtaaaccccaagagtgggggtaaccagggcgctaagatcatccagtcttttctgtggtatctgaacccccggcaagtcttcgatctgagccagggaggacccagggaagcgctggaaatgtaccgcaaagtccataatttgaggattctggcttgcgggggtgatggcacggttggctggattctttccaccctagaccagctgcgcttaaaaccaccacctcctgtggccatcctgcccctgggcactggcaatgacctggcccgaactctcaactggggtgggggttacacagatgagccagtgtcaaagatcctttcccatgtagaggaggggaacgtggtacagctggaccgttgggacctccgagcagagcccaaccctgaggcagggcctgaggagcgagatgacggagccactgaccggctgcccctggatgtcttcaacaactacttcagtctgggctttgatgcccacgtcaccctggagtttcatgagtctcgagaagccaacccagagaagttcaacagccgctttcggaataagatgttctatgctgggacagccttctctgacttcctgatgggcagctccaaggacttagccaagcacatccgagtagtgtgtgacggaatggacctaacccccaagattcaggacctgaaaccgcagtgcatagtctttctgaatatccccaggtactgtgcaggcaccatgccctggggccaccctggggagcaccatgacttcgagccccagaggcacgatgatggctacctcgaggtcatcggcttcaccatgacatccttggccgcattgcaggtgggtggacacggcgagcggctgacccagtgccgagaagtgctgctcaccactgccaaggccatccctgtgcaggtggatggtgaaccctgcaagcttgcagcatcgcggattcgaattgccctgcgcaaccaggccactatggtgcagaaggccaagcgccggagtactgccccactgcacagcgatcagcagccagttcctgagcagctgaggatccaagtgagcagggtcagcatgcacgactacgaggctctccattatgacaaggagcagctcaaggaggcctctgtgcctctgggtactgtggtggtccccggagacagtgacctagagctctgccgagcccacattgagagactccagcaggagcccgatggggctggagccaagtcccccatgtgccaccmactgtcctccaagtggtgtttcctggacgccaccactgccagccgcttctacaggatcgacagggcccaggagcacctcaactatgtgacggagattgcccaggmtragatttatatcctagacccagagctgctgggtgcatcagcccgacctgacctccctacccctacctccccgmtccctgcctccccctgctccmctacacccgggtcactgcagggggatgcsgcactgccccaaggtgaagagctgattgaagctgccaagaggaatgacttctgcaagctccaggaactacaccgagcaggaggtgacctcatgcaccgcgaccatcagagccgcacactcctgcaccacgcagtcagcactggcagtaaggaagtggtccgctatctgctcgatcatgcaccaccagagatcctcgatgctgtggaggagaacggggagacctgtctacaccaggcagccgccctaggtcagcgcaccatctgccactacattgtggaagccggggcctccctcatgaagacagatcagcagggcgacactcccaggcagcgagctgagaaggctcaagacacagagmwwkckgcayrmstggagaacagacaacattaccagatgatccaacgtgaggaccaggagacagctgtgtagttaagggrmccatggatcaacgagggacactaccagaggactagagctctccttgcccatctcactgccacattcctgtcagatggctatggggggaccctgtcacagggaaggagccccgtgccaccccctgagaagccgttcagatctagggctggactctaaggagctggactctcacctgtccctggtttcatggggmacaggaracaagctgggctgactgggtccytyccttcaggcggcmtccccctcaccacagctgatggmayggvtggacagctcmgkcasggagrcstgcwstcagcaggacttthwaaarccacctsatcchttgggctctttggarggttytgggtrchtarccctccthtmtgayccacmcaccytgggcatcccagaaactcaagagcctgmtgtattyrcytgcccrytgccmtgyttggcacctaccbtggtswtcctcctcatgyaccmagycatttcattycsgactgtatggcctggggtgggggstggggctcccacggtgacttgtttacagctgggtgtgactcagtaaagtgaakktktkttcvwwhhwwrwwrmraaaaaaaaa

SEQ ID NO: 2905 - DNA, 848 bp, Rattus norvegicus
  misc_feature (741)..(741): n is a, c, g, or t
ccacgcgtccggttggccgagctgtgcgcgcaccgcggcgatgggaggttcgggcagtcgcctgtctaaggagcygmkggccgagtaccaggacctgacgttcctgaccaagcaggagatcctccttgcccacagacgcttttgcgagttgcttcccccagagcatcggaccgtggaagagtcactgcatacccgagtatcttttgagcagatcctcagccttccagagctcaaggccaaccccttcaaggagcgaatctgcatggtcttctccacgtcgcctaccagagacagchtgagctttgaggacttcctggacctcytgagtgtcttcastgasrcagcaaccccagacatcaagtcacabtatgccttccgcatctttgactttgatgatgatggaaccctggacagagaagacytgagccggcttgtgaactgcctcacgggagagggcgaggacactcggctcagtgcttctgagmkgamgmrgctcatsgacaatatcctggaagagtcggacattgacagggatgggacyatcaatctctccgagttccagcacgtcatctctcgctcaccagactttgccagctccwwtaagawtgtcctgtgatkgctttcaagtaccaacatcmtgtccaagacyttyccaytghtgagatgtgrccaasgttatgchtgcggtgtcagggccaragccggcccagcmtggagaggkcgytgcagartytsgccccntggcaggggaggactctcccchktgtcactgstgttrccatcastgtktttaytaattggtartaaaggtttagaaatgttwramwwmmaaaaaaaaaaaaaaaaaa

SEQ ID NO: 2906 - DNA, 1324 bp, Rattus norvegicus
gggatgccggcggtccctgccgaaagagggaagatggcgcttgatgggccagagcagatggaactggaagaggggaaggcaggcagtggactccgtcaatattatctgtccaagattgaagaactccagttgattgtgaatgacaagagtcagaacctccggagactgcaggcccagaggaatgagctcaatgcaaaagttcgtctgttgcgggaggaactgcagctgctgcaggaacagggctcctacgttggagaagtcgtgagggccatggataagaaaaaagtgttggtcaaggtccatcctgagggcaaatttgttgttgatswsgasragaacattgatatcaatgatgtgacacccaattgtcgggtggctctaagaaatgacagctacactctgcataagatcctgcctaacaaagtggaccctttggtatcactaatgatggtggaaaaggtgccagactcaacctacgagatgattggcgggctagacaagcagatcaaggagatcaaagaagtgattgagctgcctgtgaagcaccctgagctctttgaagccctgggcattgcacagccaaagggagtcctgctatatggacccccgggcactgggaagacgttgttggcccgggctgtggctcatcatacggactgkacctttattcgtgtctctggctctgaactggtacasaaattcattggggaagggsmaagaatggtgagggagctgtttgtcatggcccgagaacatgctccctccatcatcttcatggacgagatcgactctatcggttcttcacggctggagggaggctctggaggcgacagtgaggtacagcgcacaatgctggaactgctcaaccagctggatggctttgaggccactaagaatatcaaggttdtcatggytactaataggattgatatcskgsackmkgccbkgcyyygkcytgggaggaywgacaggmdwabkgmwttcyywcytccywrtsmskaggcccggctggacattttgaaaatccactctcggaaaatgaacttgaccagggggatcaacctgaggaaaattgytkagttratgccaggagcytcagggrctraartgaaggrcgtgtgcacaragrccggcatgtatdctytgcgggaacggcgtgtccacgttactcaggaggayyktkagatggcagtagccaaggtcatgcaaaaggatrgtgagaaaaacatgtccrtcaaraagctttggaagtragggtgtgtccwytgtgtggaycccwcaaataaaggtctgtgcgdtaaamwmmaraaaaaaaaaaaaaaaa

SEQ ID NO: 2907 - DNA, 997 bp, Rattus norvegicus
cagcgacgccccctggtcccgccgccgttaccaccgccgmtcmcgcccmtmagytmctcggccrcgmsrtgggcacccgcgacgacgagtacgactacctctttaaagytgtycttattggagattctggtgytgrgaagagtaacctcctgtctcgatttactcggaatgagtktaatctggwaagcamkagtaccattggagtagwatttgcaacaagaagcatccaggytgatgggaaaacaataaaggcacagatatgggacacagcasggcakgagckgkacagggctataacgtctgcatactawcgwggagcagtaggygccttattggwttatgacattgytawgcatctyacatwtgamaatgtakmwcgayksskgwaagaactgagagatcatgctgatagtaacawygktatcatgcttgtgggcaatawgagtgatytacswyatctbargscwgktmctacagatgmagcamgagcakttgcwgagaagaatggktwgbyghwsawtkmgrcayswgstctagawtctacraatgdtgaagctgsttttyagacaattctaacagagatataccgcattgkttctcagaagcaaatgtyagacagacgtgaaaatgacatgtctycaagcaacaatgkggktcctattcatgtsccmcccaccactgagaacaagccaaaggtgcagtgctgtcagaacatmtaaggcgcctctctyccytagacggstgtgtatakkscatttyccaggtctgagatttaaatatatttgkaattcttgkggkcamwwwmwrdrdwwwawwacttccttacacttaagaatcttcccatgtyttaagtctttgatttggctttataaaatcctcaactttgtmmwraawramwvvardwctttttcatgctatggcttctctagccytagtttaataaactgaatgkttgragkcctctagctattggttactcttcaatatgggagcctgg

SEQ ID NO: 2908 - DNA, 5989 bp, Rattus norvegicus
  misc_feature (46)..(46): n is a, c, g, or t
cgggcagcggcggaggcctcggggcgccccgccgtgcgcctcctcntgccgcctgcgcgcggtgctgtgcgcccagccctctgctgctcctcctccctgcctcgccgtcccctcctcggagtcccgactaagcgctagcgccacacggccccgggccgccgccgagcgcgccaagacgccgagacgccgaacaggtggccggaggctgcaggcgcccgggcggggacaggcgagggcaagtgaaggcggccgggctggacatggtagccgggcagctctgtgcggccgcctgctcgcgcccctagccgccggcgcgccggcgcagcggycccaccgcgccctgcstacagtctcycggcccarcggcgctcgggccacggacggcgagggacggcggcatgaaagtgaccgtgtgcttcgggaggacccgggtggtcstgccgtgcggagatggccgcatgaaagttttcagccttatccagcakgcggtgacccgctaccggaaggccgtggccaasgatccaaactactggatacaggtacatcgcttggagcatggkgacggtgggattctagacctggatgacatcctctgtgacgttgccgatgacaragacagactggtagcagtgtttgatgagcaggatccccaccatggwggagatggtacgagtgccagctccacgggaacccagagtccagagatattcggcagtgagctgggcaccaacaatgtttctgcttttcsgccttatcaaaccacawgtgaaattgaggtcacgccttcagtccttcgggcawatatgcctcttcacgtccgacggagcagtgacccagctttaactggcctatccacttccgtcagtgataacaacttttcctcagaggagccctccaggaaaaaccccacccgctggtccacgacagctggctttctcaagcagaacaccactggaagtcccaaaacctgcgacaggaagaaagatgaaaactacaggagcctcccacgggatcccagtagctggtccaaccagttccagagagacaacgcccgctcctctctgagtgccagccacccaatggtagaccggtggctggagaagcaagaacaggacgaggaaggcacagaagaagacagcagccgagtggagccggttggacatgctgatactggactggagaatatgcccaacttttccctcgatgatatggtaaagctcgtacaagtccccaacgatggagggcccctgggaatccatgtagtgcctttcagtgctcgaggcggcagaacactggggttgttagtgaagcggttggagaaaggtgggaaggctgaacaagaaaaccttttccacgagaatgactgcattgtgaggattaacgatggagatcttcgaaacagaagatttgagcaagcacagcatatgttccgccaagccatgcgtgcgcgagtcatttggttccacgtggtccctgcagcgaacaaggagcagtatgaacagctctcccaacgagagatgaacaactattcccctggccgcttcagccccgacagccactgtgtgsccaacaggagtgtggccaacaatgcgcctcaggcgttgcccagagcacccagactgagccagccacctgagcagctggatgctcacccccgactacctcatagtgctcatgcctcaaccaaaccgcccacagccccagccttggctccaccgaatgtgcttagtaccagtgtcggcagtgtgtacaacacgaagagagtaggcaagaggctcaacattcagcttaaaaaaggtacagaaggactgggatttagcatcacttcccgagacgtaactataggyggcysagctcccatttatgtcaagaacattcttcctcgaggggctgccattcaggatggcaggctcaaggcgggagaccggctaatagaggtcaatggagtagatttagcgggcaagtcccaggaggaagttgtttccctgttgagaagcaccaagatggaggggaccgtgagccttctggtctttcgtcaagaagaggctttccacccaagggaaatgaatgccgaacccagccagatgcagagtccaaaagaaacgaaagccgaagacgaggacattgttctcacacctgacggtaccagggagtttctgactttcgaagttccactgaatgactcagggtctgcagggcttggtgtcagcgtcaaggggaaccgctccaaagagaaccatgcagatttggggatcttcgttaagtccatcattaacgggggagctgcatctaaagatgggaggctgagggtaaatgaccagctgatagctgtgaacggagagtctctgctgggcaaagccaaccaggaagccatggagactctgaggaggtccatgtccaccgagggcaacaagcgtggcatgatccagctcatcgtggcgaggcggatcagcagatgtaacgagttgcggtctcctgggagccccgctgcacccgagctgcccatagaaacagagttggatgacagagaacgcaggatctcacactccctctacagtgggatcgaggggctggatgagtctcccaccaggaatgccgcactcagcaggataatgggtgagtcaggtaaatgccagctctccccaaccgtgaacatgccacatgatgacactgtcatgattgaagatgacaggctgcctgtgctccctcctcacctctctgaccagtcctcctccagctcccatgatgacgtgggattcataatgacagaagcaggcacgtgggccaaggctaccatcagtgactcagccgactgctcattgagtccagatgttgatccggttctcgcttttcaacgagaaggatttggacgccagagtatgtcagaaaaacgcacaaagcaattttcaaatgccagtcaattggatttcgttaaaacacgaaaatcaaaaagcatggatttaggtatagctgacgagactaaactcaatacagtggatgaccagagagcaggctcccccaatagagatgtgggaccctccttgggtctgaagaaatccagctctttagaaagtctgcagacggctgttgctgaggtgaccctgaatgggaacattcctttccaccgcccacggccacgaatcatccgaggaaggggctgcaacgagagcttcagagccgccattgacaagtcctacgataagcccatggtggatgacgacgacgaaggcatggagaccttggaagaagacacagaagaaagttcaaggtcagggagggagtccgtgtccacgtccagtgatcagccttcctattctctggagagacaaatgaatggagacccagagaagagggacaaggcagagaagaaaaaggacaaagccggaaaggataagaagaaagaccgagagaaggagaaggataaactgaaagccaagaaggggatgctgaaaggcttgggggacatgttcaggtttggcaaacatcgaaaagatgacaagatggaaaaaatgggtcgaataaaaatccaggactctttcacctcagaagaggacagggtgcggatgaaggaggaacaggagaggattcaagccaaaactcgagaatttagggagcggcaagctcgagagcgcgactatgctgaaatccaagatttccatcgaacatttggctgtgatgacgagttgctgtatgggggcatgtcatcctatgatggctgcctggctctcaatgccagaccccagagcccaagagaaggtcacctgatggacactttgtatgcacaagtaaagaaacctcggagctccaaacctggggacagcaatcgatccacccctagcaaccatgaccggatacaacgtctacggcaagaattccagcaagccaaacaggatgaggacgtggaagaccggcgccgtacctacagctttgagcaatcttggtccagctcacggccagcatcgcagagtggtcggcactcggtgtcagtggaggttcaagtgcagcggcagcgccaggaggagcgagagagcttccagcaggmcyarckycagtwyagctymytgccaagacaaagcaggaagaatkccagctctgtmtcacaggattcctgggaacagaaytacgcccctggtgaaggcttccagagtsccaaggagaaccccaggtattccagttmccagggctmcaggaacggctatctaggtgrccatggctttaatsccagggtcatgctggagacccaggagcttctccgacaggagcagaggcgaaaagagcagcaaytgaagaagcagccmccagcggatggagtcagagggcccttccggcaagatgtacccccgtctccatctcaggtggmcaggctgaacagactgcagacacccgagaaagggcggcccttytactcctgagctcaatggaggatggcagcattwtgtgtcatgcartaaaggacatttccccgtgaaramwwrwrmwmmwrragtttattttttacaaaaaccctccatttggtggtactacagaacacttctgtcactggtatcagtgcctttaagcagcaggagcaaagaaatggaaggccttaatgtctttgccacgcgtatatctcgtggaaggaccccatccccaccccaccccaacctcaagttcaaggcatctactccctgcttctcagcagtaccggaaacttcagctccatataaggtgcctgtggacgtcacagcttcatcttagagaggggaccccccctccccccgccacgtgttgccgacacccgttccctgtggacgtgacatctcggtctctggaggacggaagtggctgcagcatgcaccagagcgagggctttccagaacttcgcagcagggctacccatgttctcccactcggtctggggttccctttctttcctcaratcctcggagcgtgaaggctctakggtggtagtgaagaagctaarccataggccagtgccgtttggttctggggggtgagggtaactttccaactgccttataactycaccacccatatcacagcgattctagtcagtgtttataagtacatgcsttcagtttcagtcactcatgacactygggaacaaggggcatgggagtggcccatgtgtwcgcaccccgmggaagkagataggakctgwgggaagactctctggrggagcttassccggyctatmcaktccttactttacttcgtgtcaccgtaggttgtcaagggaggcacagagtgggacaaggaaaaaggtcagtcacttgggattctgagaatcaacctcaacacagcttttgaggttgcagtcaggatttggtctcctatatcctcataccatgtmccgacctgacgaggccaacattactgagtgactctgctgtttattcacaaacagaaggagagccatcccactcgaggacctgtcgatgtccctctgagcaccgggagtcccattctccgtgcatgcctgtggcacgaggccctccgtgttcccgccgttcatctgttggtctgaacatcctgtattgtaaaccaaggctgggttgctaaagtgcctgagaatctcgatataaaaaacaaaaaacaaaaaatccttgggcaaaaagctcagagtaccatgtattaamaaaaaaaaaaaaaaaraaagaaagaaagaaaaagacatgtattgatatgcctatgttttttttaccggcacattgtattttttgtgtagactcgtttttggaaaataacgcaagtgtccaccggcacgccgccgtgtgtctctgcatctgtgtgtaatggctttatctgttaacgactctcggtggtgtttaagtggtgtttccagtgtaagtaagcgcagtgaccctggaaggcagtggtttttctcgcagcctccctaagctgtgagggacagctgtcccctgtccctgtacatataagccttctaataaaagacatatttcttcctrwwmaaaaaaaaaaaaaaaaa

SEQ ID NO: 2909 - DNA, 2184 bp, Rattus norvegicus
ctctgggcgaagcgcggatataagtagctggtggctctgccaccccaccctgcccggatcgcgacggttttcagggttctggaatcagcagggttcctctgaggcctksrcgagtsgcwgatcygctcsgytyywkcmmaaggcgcctgtgtctggcagagccggtgtgagaagaagagagaatccttcccsgccgccgggataatcaagagttttggccggacctttgagtacacatcgggatagtgagaagcccggcgaaaagcacagactatggcgctgaaacggattaataaggaacttagtgatttggcccgtgaccctycagcacaatgttctgcaggtccagttggagatgacatgtttcattggcaagccacaattatgggacytaatgacagcccatatcaaggtggtgtattctttttgacaattcattttcctacagactaccccttcaaaccacctaaggttgcatttacaacaagaatttatcatccaaatattaacagtaatggcagcatttgtcttgatattytwwkwtywywkyrrwcwcmtgctttaactatttctaaagktcttttatccatttgttcactgcyaygwgrtccaaasccagatgaccccctagtgccagagattgcacggatctathaaacagacagagacmmgtvcmacagaatatctcgggaatggactcagaagtatgccatgtgatgctaccttmaagtcagaataacctgcattatagctggaataaamyttamawtactgktmmwwwhwwvmddwdmhdatycggctgstyccctatcagamctcatcttwttwddtttwdttywdwkkwtccctccctccattcattcacatgctcatctgagaagacctaagttcttccagctttggacaataactgcttttagaaactgtaaagtagttacaagagaacagttgcccaasattcakaaattttttwwwaactggagcatgtgtattatgtggccmatgtcttcactctaacttggttatgagactaaaccaatcctcaytgctctaacatgctgaagaagccatctgagggggagggggatggatgctgagctgtcacatcaaaggaaacagcattattccagcagcatccattcttgtmtaaacctkccactgttagagatttgaggttacatgatatactttatgctcataactgatgtggctggagaattggkattgaattatagcatcagcagaacagaaaatgtgatgtattttatgcatgtcaataaaggaatgacctgttcwtgttctamararaawrraaawwrrrarwmaaamaccctttgtattccaaaatasrskmksaaaacattttgtaattttcatttaamwygwkrggcttggagctattagttaatctatctwccaatactgtttaatatagcactgaatwaatgatgcgagttgtcaatggatgagtgatcaactaatagctctcctagtaattgatttatttttcttcaataaagttgcataamccamtgwgtyarmwrmmwrrawwaawmmstwtgsgmmwcrwkcctttgtataaatgcaaagctgtttttgtatawactgttgggatttgcttcattgtttgacatcaaakgayrakgtaaagttcaaaagagtgaatatattgccatgttcagttaaagtgcacagtctgttaacaggttgacacattgcttgacctgatttatgcrgaattaataagctattcamatagtgtagctttaatacgctgcacatgattytggcagccctagagttcataaatggacttgggactcagcagttttgaaacgtgtatatggagtttaagaaatttattttccaggtgcatccccttvtaamtaaaattttcttcatcttgtacmcttawcrgcwsrarragatatatatatatatataacttgggagtgataatgggtcaaaatttacaaaataaagtactgttttggtgtgggarwwrwmawrarvmwrwgttraagtracttaamtrtgggatgttggtatccattgagatggatttgttcasccatttacattaatgagcatttaaatgcamcagatcatttsgggtgmctttaacatgaatgaataaaaaagtcaatgctaaaaaaaaaaaaaaaaaaaatctcgcggccgcaa

SEQ ID NO: 2910 - DNA, 1981 bp, Rattus norvegicus
gtgcggagctcagactgctggagcctagccacgatgctgtggggttcagtgctaggggccctgctcatggctgtcggttgcctctgcctctccttgctgcccaggcaccgcagsccctgggagccacctctggacaaggggtttgtgccctggctgggtcacaccatggccttccggaagaatatgtttgaattcctgaagggaatgcgggccaagcacggggacgtgttcacactgcagctgggaggccagtacttcacctttgtcatggatcccctctcctttggccccatcattaagagcacgcagaaagtgctagacttcgtgacgtacsctcgggaactggtgttcaaggtgtttgggtaccagtccatggatgwggrccaccagatgctgcacgtagccagtaccaagcatctgatgggacaaggcttggaggacctcaascgggccatgctggacagcctgtccttggtgatgctaggacccaaaggccggagtctgggtgcmaggtcctggtgtgaggacggcctcttccacttctgctacagcatcttgtttaaggctggcttcctgagcttgtttggctgcaccaaggacaaggagcaggacctggatgaggccgatgagctgttcaggaagttccgcagatttgacctacttttccccaggtttgtctactccctgctggggcccctggagtgggtagaagtgagccagctgcagcgtctcttccaccagagactctctgtggagcaaaacctggagaaagacggcataagtaactggttgggcttcatgcttcggtttctgagggagcgagggatggcttcatccatgcaggacaaatttaactttatgatgctctgggcctcccaggggaacacggggcccacctgtttctgggccctcctgttcctgctgaagcatcaggacgcgatgaaggctgtgcgagaggaagccactcgggtcctgggtgaggccaggttggaagccgagacatccttcgctttcactctcagtgccctgaaatgcactccagtgctggacagcgtgatggaagagactcttcgtctctgtgccacccccaccctcctcrgggtggtgcaggaggattatgtcctaaagatggccagtgggcaagagtaccagatccgccgtggagataaggtggctctcttcccctatctctcagtacacatggaccccgacatccatcccgagcccacgaccttcaagtacaatcggttcctcaaccctgatggcacccggaaagtggacttctacaagtcaggcaagaagatccaccactacaacatgccctgggggtcgggtgtctccatatgtcccggcaggttctttgcccycagtgagatgaagacctttgtcctccttatggtcatgtactttgactttgaactggtggaccctgacatgcctgtgccccctatcgacccaaggcgstggggcttcggcacctcccagcccagccatgaggtacgytttcgsyacmgsctgaagcccatgcagtgagcttagacctgagcacaccytgcagcccagagcggcactgaacacccatcctctggctccaaagcacccctacctctccccggcatccctgccatcttgcctcctagacatctcagaggtctgccatgctccctgtaagatgccatccccccagtggtttctgcctgacccacctctcaggaggaaaacctgtggtcagttcgatttacagctggttacccacccaagtttgactcatcccggaggacagtaccagctcccatgagtcaaacagtatcttgcaaatgctgcctcagcccatcctacctgccttacttgatgcccttactccaaatcctatcgattcagactccagaratgttactcaatggaatcaagccatgtgtgcaattgttaagttcttaatagatatgcactaaaagaaaaggattrcaaaaaaaaaaaaaaa

SEQ ID NO: 2911 - DNA, 5210 bp, Rattus norvegicus
cccagaccgaatcctcacctctgccggccacccacagggacccgagagcgctccgtacctgggcaccgtgagtgatgcgcagcggggcagcgccagccccacggatggagctgctgccgccgccgcccggcgcgccccgctccgcccgcgccccgtgcgcctgagcgccgcgcccgcccctcctccgcgccaactccgccgcccgccccccaggccgcccgcgcgcctcctcgggctcctcgtgtcccgccgcgccaagcagcctcctctgggtgctggcgcctgtacaccatggcccccgggcggaccggggccggcgccgctgtgcgcgcccgcctggcgctggccttggcgctggcgagcatcctgagcggaccccccgctgctgcctgccccaccaagtgtacctgctccgccgctagcgtggactgccacgggctgggcctgcgcgccgttccccggggcatcccccgcaacgctgagcgccttgacctggacagaaataacatcaccaggatcaccaaaatggacttcaccggcttgaagaatctccgagtcttgcatctggaagacaatcaggtcagcgtcatcgagagaggcgccttccaggatctgaagcagctggagcgattacgtctgaacaagaacaagctccaggtccttccagaattacttttccagagcacaccgaagctcaccagactagatctgagcgaaaaccagatccagggcatcccgaggaaggcgttcaggggcgtcacgggcgtgaagaacctgcaactggacaataaccacatcagctgcattgaagatggagccttccgagcgctgcgcgatttggagatcctcacccttaacaacaacaacatcagccgtatcctggtcaccagcttcaaccacatgccgaagatccggaccctgcgtctccactccaaccacctgtactgtgattgtcacttggcctggctctcagactggctgcgacagcggcggaccattggccagttcaccctctgcatggcgcccgtgcacctgagaggcttcagtgtagcagacgtgcagaagaaggagtatgtgtgtccaggtccccactcagaggctccagcctgcaatgccaactccctctcctgcccttctgcctgctcatgcagtaataacattgtagactgccgtgggaagggactgactgagatccctgccaacctgccggagggcatcgtggaaatacgcctagaacagaactccatcaaatccattcctgcaggagctttcatccagtacaaaaaactgaagcgaatagacatcagcaagaatcagatatcggacattgctccagatgccttccagggcctgaaatcactcacgtcgctggtgctctatgggaacaagatcacagagattcccaaaggactgtttgacgggctggtgtccctgcagctgctcctcctcaatgccaacaagatcaactgcctgcgggtaaacaccttccaggacckasrgaacctcaatctgctctctctgtatgacaacaagttgcagactatcagcaaagggctctttgctccgctgcagtccatccagaccctccacttagctcaaaacccgtttgtttgcgactgccacttgaagtggttggccgactacctccaggacaaccccattgagacgagcggggcccgctgcagcagcccacgccggctggccaacaagcgcatcagccagatcaaaagcaagaagttccgctgctcaggctcggaggattatcgcaacagattcagcagcgagtgcttcatggacctagtgtgcccygagaagtgccgttgtgagggcaccattgtggactgctccaaccagaagctctcmcgcatcccgagccacctccctgaatataccactgacctgcgactgaacgacaatgacatckctgtgctggakgccactgggwtcywcmmkmagttgcyyaamcwrakgamaataaamwtsagcaataawarrawmaarrarrwgcgggagggtgcgtttgatggagcggcaggcgtgcaggaactgatgctgacggggaaccagctggagaccatgcacggacgcatgttccggggcctcagcggcctgaagacactgatgttaaggagcaacctgatcagctgcgtaaacaatgacaccttcgctggcctaagctctgtgagactgctgtccctctatgacaatcggatcaccaccatcagccctggagccttcaccacgctcgtctccctgtccaccataaacctcttgtctaaccctttcaactgcaactgtcacatggcctggctcggccggtggctgaggaaacgccgcatcgtaagcgggaaccccagatgtcagaagccctttttcctcaaggagattcctatccaagatgtggccatccaggacttcacctgtgaaggcaatgaagagaacagctgtcagctgagtccacgctgccccgagcagtgtacctgtgtggagacagtggtgcgatgcagcaacaggggtctccacaccctccccaagggcatgccaaaggacgtgactgaactgtacctggaaggaaatcatttaacggcggtgcccaaagaattgtccaccttccgacagctgacactaattgacctgagcaacaacagcatcagtatgctgaccaatcacaccttcagcaacatgtcccacctctccacactgatcctgagctacaaccggctgagatgcatcccggtccatgccttcaacgggctaaggtcactccgagtgctaaccctccatggcaatgacatttccagtgttcctgaaggctccttcaatgatctgacgtccctctcccacctggccctgggaatcaaccctctccactgtgactgcagtctgcgttggttatcagagtggataaaggctgggtacaaggagcctggcattgccagatgcagtagccccgagtccatggcagacagactcctgctcaccacccccacccacaggttccagtgcaaagggccagtggacattaacatcgtggccaagtgcaacgcctgcctctctagcccatgcaagaacaacggcacttgcagccaggatccggtggagcagtaccgctgtacctgcccttacagctacaagggcaaggactgcaccgtgcccatcaacacctgcgtccagaacccctgtcagcacggaggcacctgtcacctcagtgagagccacagagatgggttcagctgctcctgccccctgggctttgagggacagcggtgtgagatcaacccagatgactgtgaggataacgactgtgaaaacagcgccacctgtgtggacgggatcaacaactacgcatgcgtgtgcccgccgaactacacaggggagctgtgtgatgaggtgattgactactgcgtgcccgagatgaacctctgtcagcacgaggccaagtgcatctccctggacaaaggattcaggtgcgaatgtgtccctggctacagtggaaagctgtgcgagacagacaacgatgactgtgtggctcacaagtgtcgccacggagcccagtgtgtggacgcggtcaatggctacacgtgcatctgcccccagggcttcagcgggctcttctgtgagcaccccccacccatggttctgctacagaccagcccctgtgaccagtacgagtgccagaatggggcgcagtgcatcgtggtacagcaggagcccacttgccgctgtcccccaggcttcgctgggcccaggtgtgagaagctcatcactgtgaatttcgtgggcaaggactcctatgtggaactggcctctgccaaggtccggccccaggccaacatctccctgcaggtggccactgacaaggacaacggcatccttctttacaagggagacaacgaccccctggcactggagctgtaccagggtcacgtgaggctggtgtatgacagcctgagctcccctccgaccacggtgtacagtgtggagacggtgaatgatggccagtttcacagtgtggagctggtgatgctaaaccagaccctgaacctggtggtagacaaaggagcccccaagagcctggggaagctccagaagcagccagcagtgggcatcaacagtcccctctatcttggaggcatccccacgtctacaggcctctcagccttacgccagggtgcagacaggccgctgggcggcttccacggctgtatacacgaagtgcgcatcaacaacgagttgcaggatttcaaagccctcccaccccagtccctgggggtctctcccggctgcaaatcctgcactgtgtgtcgtcacggcctgtgtcgttccgtggagaaggacagcgtagtgtgtgagtgccatccgggatggactggtccactgtgtgatcaggaagcccaggacccctgccttggtcacagctgcagccatgggacatgcgtggcgactggcaactcatatgtgtgcaagtgtgccgagggctatgagggacctttgtgtgaccagaagaatgactctgccaatgcctgctcagccttcaagtgccaccacgggcagtgccacatctcagatcgaggggagccctattgcctgtgccagcctggcwysagkggcaatcactgtgagcaagagaatccatgtttgggagagatagtccgtgaagccatccgccgccagaaagattatgcctcctgtgccacagcatccaaggtgcccatcatggtatgccgcgggggctgcgggagccaatgctgccagccgattcsgagcaagcgsyggaamtacgtcttccagtgcactgacggctcytcgttsrtggaagagstggagagacacttggaatgtggctstcgtgagtgttcckgmrcsmskccccctctgccgcccactcatcctccgccttcgggactccacgtggaacctctttgagattcagaatgaaggagagaaagcttggagaccaagaggcaaaagagagaatattaagtatattgtaaaataaacaaaaaawtrgaacttawwwwwawwawrraaartgactattttcatcttttattatataaatatatcacaccgtctgagtatatggactatacagtgagttatttttaccaagttttgttttgtgttgtgtatttgttgtgtttttataaacagctgtttaaaattttaagacaaaaaaaaaacactaataaaaatgttttaaacacaag

SEQ ID NO: 2912 - DNA, 2009 bp, Rattus norvegicus
gtgagcgagagcgccctagagaagcgcctgcaatctctgcgcctcctccgccagcacctcgagagaaggacacccgccgcctcggccctcatctcaccgcactccgggcgcattcgatccggctgctcgcccgctysttggttcygtgtcgccrcgctcgccccggctcctcctgcgcgccacaatgagctccagcaccatcaagacgctcgctgtcgccgtcacccttctccacttgaccaggctggcactctccacctgccctgcckcctgccactgccctctggaggcgcccaagtgcgccccgggagtcggcttggtccgggacggctgcggctgctgtaaggtctgcgcgaagcaactcaacgaggactgcagcaaaacgcarccctgcgaccacaccaaggggctggaatgcaatttcggcgccarttccaccgctctgaaagggatctgcagagctcagtcagaaggcagaccytgtgaatataactccaggatctaccagaacggggagagcttccaacccaactgtaaacatcagtgcacatgtattgacggtgctgtgggctgcattcctctgtgtccccaagaactgtctctccccaatctgggctgtcccaacccccggctggtgaaagtcagcgggcagtgctgtgaggaatgggtctgtgatgaagacagcattaaggactccctggacgaccaggacgacctccttggattcgatgcctcggaggtggagttaacaagaaacaatgagttaatcgcaaytggcaaaggcagctcactgaagaggcttcctgtctttggcacggaacctcgagtcctttacaaccccctgcatgcccatggccagaaatgcatcgttcagactacgtcctggtcccagtgctccaagagctgcggaactggcatctccacacgagttaccaatgacaacycggagtgccgcctggtgaaagagacccggatctgtgaagtgcgtccttgtggacaaccagtgtacagcagcctaaaaaagggcaagaaatgcagcaagmccargaaatccccagaaccrgtccgatttacttatgcaggatgctccagtgtgaagaaataccggcccaaatactgcggctcctgcgtggacggccggtgctgcacacctctgcagaccaggaccgtgaagatgcggttccggtgcgaagatggcgagatgttctccaagaacgtcatgatgattcagtcctgcaagtgtaactacaactgcccgcatcccaaygaggcgtcgtttcgcctctacagtctgttcaacgatatccacaagttcagggactaaaggtctcctgggtttctagtgtgggtcggacagaggtgttgagcatcgtggagacgtgggcagacggtgggcgaacagtgccttgctcatcatcaagtaggattaaggtgtttcaaaactgccgtaggggctgctgytatggatggacagtaacgcagtcgcagttggagaatacttcgcttcatagtactggagcccgggttacgtacgcttcawattggagcatgtttawarawgatgttctgttttytktttgtaaawtattttgcwaagkgtttttttttcyttyyttttktttttttttttttgcyccatttytccccctccccccttggttctacaattgkaatagagatwaaataagactagttgggtcaagtkwaagccccgyttgtcctttgacagaagtaaaatgaaaggcctytcctgcctyccccartgraggsrggggacmctctgtgagtgcccttraggmtacwacctgcaytytaaactgcaaacagaaaccaggtgttytaagattgamtgtttttatttatcaaaatgwasctttcggsgarggatggggaaatgtaawmstggratamtttgtaaatgattttaattttawatcagtgaagrgaatttakttatraamytmrtcmkttaataaagaaatatttmcytmrhrmaaaaaaaaaaaaaa

SEQ ID NO: 2913 - DNA, 2366 bp, Rattus norvegicus
gaattccggccgctggaatgttgtgtgaactttgctctccgtctattctctgatttgtcaagaaaagccaatcaaccaatagctgaggagagaagagctggacttctgattctagggaggggaggagcaaagagagaagattcaccatgcagaaaggacccaggagctgccatgggcacacacctgggaaggtcgaaaatgctgcaacagtataaggaaatgttcccggaagaactcttaaacactttggcaccagcaatttcggtgagcggttcttctgtgtatgacagattctgttctgcaaaaaattcccgaatcccaatttcactgatttctacaccaactacagtgtggccccggtctgcgaaccatttcatctcaatggcttttccacagagcgggaaaaacactctcagtccactctgccctttaagaaatgtatcgaaatgcttctttaatagctgatgcccttgctcctgatggaatgcgatgtgacgggtctcccacttgtcttgggagccttgacatcttgttcatcataaagatcaggtgaccagtgacatcagccatgtctgtgaggccttttgagagtccacctccttacaggccggatgaattcaaacccaatcattatgcaccaagcaatgacatgtatggcggagagatgcacgttcgaccaatgctctctcagccggcatactctttttacccggaagacgaaattcttcacttctacaagtggacgtcgcctccaggggtgattcggatcctgtctatgctcgtcatcgtgatgtgcatcgctgtattcgcctgcgtggcttccacacttgcttgggacagagcctatggaacgggcatctttggaggaagtatgaactacccttacggcagcggcttcggtagctatggaggtggcttcggaggttacggttacggctacggttacggttatggaggktacacagaccccagagcggcaaagggtttcctgctggccatggcggccttttgcttcatcgcttccttggtgatctttgttaccagcgtcattagatcgggaatgtcmagaacgagaagatactacttgatcgtgatcatagtcagcgcaatcctgggcatcatggtgttcattgccacgatcgtgtacataatgggagtcaacccgactgcccaggcttctggatctatgtacggttcacagatctataccatctgcagccagttttatactcctggaggcactggtctctacgtggaccaatatttgtatcactactgtgtggtggatccccaggaggctatagccattgtcctggggttcatgattattgtggcttttgctttaatcattgtttttgctgtgaaaacccgaagaaagatggaccggtatgataggtctaatattttgtgggataaggaacacatttatgatgaacagccccctaatgtggaagagtgggttaaaaatgtgtctgcaggcacacaagacatgcctccacccccatctgattatgcggaaagagtcgacagtccaatggcatactcctccaacggcaaagtgaatggcaagagatcctacccagactctttgtataagtcaccgcctctggtacctgaagtagcccaggagattcctctgaccttgtccgtggatgacttcaggcagcctcggtacagcagcaacgataacctagagacaccttctaaaaggactcccacgaaggggaaagcagggaaggcgaagaggacagacccagaccactatgaaaccgactacacgacaggtggcgagtcctgcgatgagctggaggaggactggctcagggaatatccacctatcacttcagatcaacagagacaactgtacaagagaaattttgatgcaggtttacaggagtataagagtttactggcagaactcgacgaggtcaacaaagagctctctcgtctcgacagagaactggatgactacagagaggagagcgaagagtacatggctgctgctgatgaatataacagactaaagcaagttaagggatctgcagattataaaagcaagaagaattactgcaagcagttaaagagcaaattatcacacatcaagaggatggtgggagactatgacagacggaaaacctagacagatgctggttgctggagaagtgagatagaggtgcatctatctacctgcccagtgtctgcagttctccccagaggcaaactgactttggactctcgtctgggaagttaaaactttgtgatcattacaaagtttccatagctttaataccatccgtttcctgtctccagtattgaagcattttataaatggcttttgataattgactgggctgaacactccaatt

SEQ ID NO: 2914 - DNA, 3209 bp, Rattus norvegicus
cgcccgggcaggtgcgggaaaaatgttcgttggtggtctgagctgaggtcttcctactcactgggctcgagcggccgcccgggcaggtctgtggacccgggacaagccctaggggggtccgagtgtgaccgcggccaagcccgctcgccttctgcggcgagtagggcctcgcggcgtcatcggcggcgaggagccgctgcggcctggccgaccatgtcggacgcggctgmrgagcarcccatggagacgacggrcgccaccgagaacggacacgaggmcgmccmcgaaggcgaggccccggtcgagcctagccctggcagcggccccgcgactccggmggggtctgkgggcgggaccacggccgccccgagcgggaaccagaacggcgccgaaggcgaccagatcaacgccagcaagaacgaggaggacgcgrgaaaaatgwtcgttggtggtctgagctgggataccagcaaaaaagatctaaaggattattttactaagtttggagaggwcgytgactgtacaataaraatggatccgaacactggtcgatcaagagggytkgggkttattctmttcaaagaktcttctagwgyggagaaggtctyagatcagraggagcacagactggatgskcgtgtcaywgaccstaraaaggctatggctatgaagamrgaccctgygaagaaaatctttgtgggaggtctaaaccctgaagccacagaggaaaagatcagagaatactttggccagtttggggagattgaggccattgaacttccaatagatcccaagttgaacaaaagacggggttttgtttttattacatttaaagaggaagaccctgtgaagaaagttctggagaaaaaattccatactgtcagtggtagcaagtgtgaaatcaaggttgcccagcccaaagaggtgtaccagcaacagcagtatggctctgggggccgaggaaatcgcaatcgagggaaccgaggcagtggtggaggtcagagtcagagttggaatcagggctacggcaactactggaaccagggctacggctaccagcagggctacgggccgggctatggcggctacgactactcgccctatggctattacggctasggmmccggshrbkrstrsagtcagggtagtacaaattacgggaagagccagcgacgtggtggtcatcagaataactacaagccatactgagaggcagcaggagcggccgagtgacgacgcacacgctttgtttggacgcggagtgamcacaattatgtaccaaatttaacttggcaaaswwttmtgscmhsdvssatgtgcatcttatttaaaatttcccccggrmaysaskctcctgtttactattccagagctctagttkktgtargcagcgtgtggcgtctcadargtcagagcggcattagggggstgattttattaccaggttaccctgytctagattggagggtytgcttcmtkctbvcgctcwkcagcctrgacctgtggaccctkgwtgtaaagagtaamctgtatcttaggaaaccagtgtcacctttttcacctyttaattttatatyatttgtgtcatacatttycagkaatggaartgttaawtttactgtactytttggbaccytttgggaatctaatgtatkgkarggtattttacacgtgtcytgattttsccacgasctkgatawtgragctayccaagctyttgaaatwaaaatyhmhsavarhmhvrwmmamwaamwmmarrdamwgtgggacagaggaacaaacaagaaagaactcgaggcctcgctgagtggcrcgcttgctgagtgctgccacatcccgcaagctgagcaggtatcccaactctgttcctgcccggtagaccacccgaggtgtgagtgtggtcttgtcttccagattcgtaggacagaagctccaggaggaggacccgcccaacatggcatcggagagygkgwagctatggggtggccgatttgcaggctcggtcgaccccaccatggacaagttcaactcatctatcgcctatgaccggcatctgtggaatgtggacctgcagggaagcaaggcctacagcaggggcctggagaaggcagggcttcttcaccaaagctgagatgcagcagatactgcaaggcctggacaaggtggctgaagagtgggcccaaggcatcttcaaattgtaccctaatgatgaagacatccaccttcctcaaggtgctcattgaagccatggtagaccgggcagaggcggagtgtgaagtcctcttccctgggtacacacacttgcagagagctcagcccatccgctggagccactggatcctgagtcacgccgttgcgctgacacgagatttagagagactgaaggaggtgcagaagcggatcaatgtcctgccactgggcagtggggccattgcaggcaaccctctaggtgtggaccgggagttcctctgtgcagaactgaactttggagccattacgctcaacagtatggatgccaccagcswgwgwsmcttcswggctgagttcctgttttgggcttctctgtgcatgacccatctcagcaggatggcagaagacctgattctctacggtaccaaggaattcaactttgtgcagctctccgatgcctacagswmmggaagcagcttgatgccccagaagaaaaacccagacagcttggagctgatccggagcaaggmgggcygagtgtttgamgtktctgayaccatgacwgmtgtcctccaagtagccactggagtcatctmtacactgcagattcatcgtgagaacatggcacaggcactcagccctgacatgctggctaccgaccttgcctactacctgstmygyamakrgatgccattccgccagcccacgaggcctcagggaaagctgtggtcgtggcagagatgaaaggggtggctctcaaccagctgtcacttcaggmsmtgcagaccgtcagtmysstgttctcgagtgacgtgaatctcgtgtgggactacagccacagcgtggagcagtacacagcsttgggtsgcacagcacagtccagtgttgagtggcagatcagccaggtgcgggccytgctgcagatgtagcagccctagrttccacccagtcaaagctgcgccccaataaagtggakccytggwgaggscgccwtwrammwmaaaaaaaaaaaaaaaaaa

SEQ ID NO: 2915 - DNA, 1348 bp, Rattus norvegicus
gagcgccaggccaatcggaggtgctgttgtttgtcagtcccggagccggtccgcaaaggaaaggtggcaagatggtgttggagagcactatggtttgtgtggacaacagtgagtacatgcggaatggagacttccttcccacccggctgcaggcccagcaggatgctgtcaacattgtatgtcactcaaagacccgaagcaaccctgagaataacgtgggcttgatcacgctggccaatgactgtgaggtgctgaccacactcacccctgacactggccgaatcctctccaagctccacactgtccagcccaaaggcaagatcaccttctgcactggcatccgcgtggcccatctggctctgaagcaccggcagggcaagaatcacaagatgcgcatcatcgccttcgtgggtagccctgtggaggacaacgagaaggatctggtgaaactagctaaacgccttaagaaagaaaaagtgaatgttgacatcatcaattttggggaagaggaggtgaacacagagaagctgacagcctttgtgaacacattaaacggcaaggacggaactggatcacatctagtgacagtgcctcctgggcccagcctggccgatgctctcatcagttctcctattctagctggggaaggcggcgccatgctgggtcttggtgccagtgactttgagtttggagtagatcccagtgctgatcctgaattggccctgscccttcgtgtctctatggaagagcagcggcagcgscaggaggaggaggcacgacgggytgytscagcctmtgcasstgaggytggaattgccacamctrggaytgaaggtgaacgagaytcagatgatgccmtmctgaagatgaccatcarccwgcaggagtttkrcmgtgcggggmttchtgacmtaagcagcatgacagaggaagagcagattgcstatrccatgcagatstcchtgcagggagcagastktgkccaagcagaatcaggkgacwtcgatgccagmtcagccatggacacathtgagccakycawggaggaggwtgaytatgacrtgatgcaggacccagmgttccttcagagcgtcvtagagaacsttcccggtgtggatcccaacaatgaagccattcgaaatgcaatsggctythtggcctcycaggccaccaaggatggcaagaaggacaaraaararraararaagamgtgrggccggagggmggggtagccgagtytgccctggggmctgtaaggrtggggwtggataaagasttagatgtrmtstgcgrccktgacaacrgaataaagmttggagtkttmmmwwwrvwwmaaaaaaaaaaaaaa

SEQ ID NO: 2916 - DNA, 2240 bp, Rattus norvegicus
ctgagctgtcctaccacagcagccgccggaccctaggacagagcacgggccaccgccgcatccacctccagtccaactggatccagctccaaccaccagttttggttcatcttgcctggtgccatgaccttctccgagattctggaccgtgtcggaagcatgggccccttccagtacctgcatgtgaccttgctggccctcccagtcctcggaatagccaaccacaacttgctacagatcttcacagccaccacccctgtccaccactgtcgcccgccccccaacgcctctatagggccctgggtactccccttggacccaaatgggaagcctgagaagtgtctccgcttcgtacatctgccaaatgccagtcttcccaatgacacccagagggccaccgagccgtgcttggatggctggatctacaacagcaccagagacaccattgtgatagagtgggacttggtgtgcagctccaacaaactgaaggagatggcccagtcgatcttcatggcaggcatactggttggaggacctgtgattggagaactgtcagacaggtttggccgcaagcctatcctgacctggagttatctcatgctggcagccagcggctctggtgctgccttcagtcccagcctccctgtctatatgatcttccgattcctgtgtggctgcagcatctcgggcatttctctgagcaccgttatcttgaatgtggaatgggtacccacctcgatgcgggccatctcatcaacatctattgggtactgctacaccattggtcagttcattctgtccggcctggcctatgccattcctcagtggcgctggctacagttaacctcgtctgctcccttcttcatcttctccttgttgtcctggtgggtaccagagtccatacgctggctggttctatctggaaaatactcaaaggccctgaagacactccaacgggtggctaccttcaacggcaagaaggaggaagggaaaaagctcaccatagaggagctgaagttcaacttgcagaaggacatcacctcagccaaggtcaaatatggcttatctgacttgttccgggtgtccatccttcgtcgtgtgaccttctgtctctctctggcctggttttctactggttttgcctactacagtttggctatgggggtagaagaatttggagtcaacatctacatactccagattatctttggtggggttgacatcccagccaagttcatcacaatcctctccttaagttatctgggccggcgcatcactcagagcttcctcctgctcctagcaggaggggccattttggccctcatctttgtgccttcagaaatgcagctcttgagaacagcactggctgtgtttggaaagggatgcctatctggctccttcagctgcctcttcctctacacgagtgagctctaccctacagtcctcaggcaaacaggtatgggtatcagtaacgkswsgrskcgagtaggaagtatgakrrccycactggtgaaaatcaygggtgaactgcrgccyttyatscctaatgwcatctttgggaccacggycctactgggaggcagygctgccttctttytgctygagaccctcaatcsgccyttaccggagactatcgaggacatacwaaactggcacaagcaagtcmagaaaayaaagcaskagtckgmagcasaaaaggcatcccaaataatcccgctgargactggtggataggaccctagctgagaacarcagartcytctttyctggycacragagactgatccyaagcagwaccctwctggagttccttgggcaccttgggggttggrgaaagycctargtgggcccatgctcttggmacaaaarcttctgagagtwcagymmaggtgttctaccctmayyacctmcaccawagccyacaacccagacsyggcctgctcacagctytagccatasgcttcccatactcctgcactcatccwccctgcagyccagccctgcywttcttctgtcaacccttgccatattggccattkcctccattgtcccacctccatttkccttgagatcccctagcrgttctrakggtttcttmttaccttgcccaractmtytcctkggkgggaaatttcaataaaccmcratgaagaaytywmwwwwwrammrawarrgggaaaaacccctttgggggccccagtctattttccttttagggaggggggaaatttatccttggg

SEQ ID NO: 2917 - DNA, 4712 bp, Rattus norvegicus
cggccgcagccggagaacagtctccaagtggcctgggaacagggaaagggacgccgcggaggcctggccagcgggaccgtcgccctttgtgggcgcaacgcgcacggccgcgagcgcccttcccggaggcgctctacccccggaagctttgtcgcaccactcggccccggcgaggacgtccagggaaagggaaaagcgggggctcgaaagctcgcgtgggggagctgctgagagcgccacccgcccagccgccacctccgtatcctccatccgccgcatctctagggctgcctccgcactcccggccggagcccagccgcctgcgctgcggcccgcacacacgcacacrcryrcacwcacwcacwcacacmcryacrcacacacwcrcgcacrcacacacacttctcggcgcgcacgcacgcccgcccttctccccgccccctccccagctccttgatctcccgtctcttttattactcctggtgcgagtccggcggactccgaggcccgctatttgttaccagctcgctctcattggcggggagcgcagagcagcggagaagggggtggggaggggaggggaagggaaggggtggccactgcccggagccgtctccgcgctgctgttggtgccgctgccgccgccgcctccggctcctcgctcggcccctctccgcctccatgtgccggatagcgggagsgccgcggaccctgctgccgcttctggcggccttgcttcaggcatctctggaggcttctggtgaacttgcattatgcaagactggatttcctgaagatgtttacagcgcrgtcttaccgaaggacgtgcacgaaggccagcctcttctcaatgtgaaattcagcaactgcaatagaaaaaggaaagttcagtatgaaagcagtgaaccagcagatttyaaggtggatgaggacggcacagtgtacgctgtgagaagcttccctctctctgcagagcaggcaaagttcctgatatatgcccaagacaaagaaacccaggaaaagtggcaggtagctgttaacctgagcctggagcccagcctgactgaggagccgatgaaggaaccacatgaaattgaagaaatagtattccctagacaactcgccaagcacagcggasstctacaaaggcagaagagagactgggtcatccctccgatcaacttgccagaaaactccagaggaccctttccgcaagagcttgtcagaatcaggtctgatagagataagaacctatctctgagatacagtgtcactgggccaggagctgaccagcctccaacgggcatcttcatcatcaaccccatctctggacaactgtcagtcacaaagcctctggacagagaactgatagcccggtttcacctgagggcacatgcagttgacatcaatggcaatcaagtggagaaccccattgacatcgtcatcaatgtcatcgacatgaatgataacagacctgagtttctgcaccaggtttggaatgggtctgttccagagggatcaaagcctgggacgtatgtgatgactgtcactgccattgatgcagatgacccaaatgccctgaatgggatgctgaggtacaggatcctctcccaggcacccagcaccccttctcccaacatgtttacaatcaacaacgagaccggggacatcatcactgtggcagctggtctggaccgagagaaagtgcaacagtatacgttaataattcaagccactgacatggaaggcaatcccacttacggcctttcaaacacagccacagccgtcatcacagtgacagatgtcaatgacaatcctccagagtttactgccatgacyttctacggagaagtccctgagaacagagtggatgtcattgtagccaacctgactgtcaccgacaaggaccagccccacacaccagcctggaatgcggcatacagaatcagtggtggagaccccacgggaaggttygccatcctgacagaccccaacagcaatgatgggctagtcacagtggtaaaaccaattgactttgaaacgaataggatgtttgtcctyactgttgctgcagaaaaccaagtgccattagctaaggggatccagcacccacctcagtcgacagccacggtgtctgtgacagttattgatgtcaatgaaaatccttattttgccccaaatcctaaaatcattcgccaagaggaaggcctccacgcaggtaccatgctgaccactctcactgctcaggaccccgatcgatatatgcaacagaatatcagatacacaaagttatctgaccctgccaactggctgaaaatagaccctgtgaacgggcagatcaccactatcgctgttctggacagagagtcgccaaatgtcaaaaacaacatctataatgctaccttccttgcttctgacaatggaatccctcctatgagtggaacaggaacgctgcaaatctatttacttgatatcaatgacaacgcccctcaggtgttacctcaagaggccgagacttgtgaaactccagaacccaattcaattaacatcacagcgcttgattatgacatagaccccaatgcagggccctttgcatttgaccttcccttatccccagygaccattaaaagaaactggaccatcacccggcttaakggtgattttgctcagctcaatttaaagatcaagtttttggaagctggcatctatgaagttcccatcgttatcacagattcagggaatccccccaagtccaatatttcsatcctgcgtgtgaaagtttgccaatgtgactccaatggagactgcaccgacgtagacaggatcgtgggtgcagggcttggcacgggcrccatcatcgcgatacttctgtgtatcatcatcctgctgatccttgtcctcatgttcgtggtatggatgaaacgccgggataaagagcgccaggccaagcagcttttaatagacccagaagatgatgtaagagataacatattgaaatatgatgaagaaggtggaggagaggaagaccaggactatgacttgagccagctccagcaaccagataccgtggagcctgatgccatcaaacctgtgggaatcagacggctagacgagaggcctatccacgctgagccacartatccagtccgatccgcagccccacaccctggggatattggggacttcattaatgagggccttaaagctgctgacaatgaccccacggcgccaccatatgactccmybwkrgtcttcgactatgagggcagcggctccacggctggctccttgagctcwckmrrctcctccagcagcggcggggaccaggactatgactacctgaatgactggggaccccgcttcaagaagctggccgacatgtatggtggtggtgatgactgaacggcaggacggacttggcttttggacacgtatgaacagtttcacytgatattcccaaaaagcatacagaagctaggctttaactctgtagtccactagcaccgtgcttgctggaggctttggcgtaggctgcgaaccagtttgggctcccakggaatatcagtgatccgatactgtytggaaaacaccgagctcagctacacttgaattttacagtacagaagcactgggattttatgtgcctttttgtacctttttcagattggaattagttttctgtttaaggctttaatggtactgatttctgaaactataaggaaaagacaaaatattttgtggcgggagcagraagttaaatgtgatacgcttcaacccacttttgttacaatgcatttgcttttgttaagatacagaatgaaacaacaagattaaaaaaaawwaamwmawrrarwrawwwwrwwammwwrgggtgggggggtgggggatgagaccacgagataggaaaatgtacattacttctagttttagactttagattttgtttttcactaaaatcttaaaacttacgcagctggttgcagataaagggagttttcatatcaccaatttgtagcaaaattgaattttttcataaactagaatgttagacacattttggtcttaatccatgtacacyttttttattttctgtattttttccacctcgctgtaaaaatggtgtgtgtacataatgtttcatcagcatagactgtggaggagtgcagagaactcggaacatgtgtatgtattatttggactttggattcaggttttttgcatgtwaatatctttcgttatgggtaaagtatttacaaaacaaagtgacatttgattcaaccgttgagctgtwgttagaatactywwtkkytwwtkwyttaatktwktaaatttwtwttaattytcytkytgtytgwywtgttttggggagggatwaaagttcttagcacaaatgttttacataatttgtaccaaaaaaaattwcacacacamrcacacwcacamacasacacrcacacwcwwawaaaarraaarwaaagtwaaaggggtggcctggtastggcarcamtarcaagtgtgtgtttttwaaaaacaaaacawwcaamcawaaaaaattaataaagagraaaaaaaraaaaaaaagcytykwrmctggagagacttytgaaacagctttgcctctgtgktgtgkaccagaatacaaacaatacacccctgaccccagcgttstgaataaaaagctaattttggatctggaaaaaaaaaaaaaaaaa

SEQ ID NO: 2918 - DNA, 4414 bp, Rattus norvegicus
ctggtgtgggagccgcggcgcactactgagttctcaagaacttctgctagacttcagcccggcctaacccggctctgcccgaccgcacccgagctcagtgtttgctcggcgtttgcccggccagccatgggagcccggtgccgcagcttctccgcgctcctgctcctgctgcaggtctcctcgtggctttgtcagcagccggagtcggagtctgactcctgccgtcccggcttcagttccgaggtctacaccttcctggtgccggagaggcacctggagagaggccacatcctgggcagagtgaaatttgaaggatgcaccggccgtccaaggacagccttcttttctgaagactcccgattcaaagtgtctacagatggcgtcatcacagtcaaacggcatctaaagcttcacaagctggagaccagttttctcgtccatgcctgggactccagttacaggaagctttctaccaaagtgacactgaagtccctgggccaccaccaccaccggcatcaccacagagaccctgtctctgaatccaacccagagctgctcacgtttcccagctttcaccagggtctgagaagacagaaacgagactgggtcatccctcccatcaactgcccggaaaatcaaaagggcgaattcccccagcgactggttcagatcaaatccaacagggacaaagagacaacggttttctacagcatcaccggcccaggagctgacaaaccccctgttggcgttttcatcattgagagggagacaggctggctgaaagtgacgcagcctctggacagagaagccattgacaagtaccttctctactctcatgctgtgtcatcaaatggggaagccgtggaggatcccatggagatagtggtcacagtcacagatcagaatgacaacaggccagagtttatccaggaggtctttgagggatctgttgcagaaggcgctcttccaggaacctccgtgatgcaggtctcagccactgatgcagacgatgacataaacacctacaatgctgccatcgcctacaccatcctcagccaagatcctgagctgcctcacaaaaacatgttcactgtcaaccgggacactggggtcatcagtgtggtcacctccggactggaccgagagagttaccctacatatactctggtggttcaggctgccgaccttcaaggcgaaggcctaagcacaacagcaaaagctgtgatcactgtcaaggatattaatgacaacgctcccatcttcaacccaagcacgtaccagggtcaagtgcttgagaatgaggtcggtgcccgtattgccacactcaaggtgactgatgatgatgcccccaacactccagcgtggaatgctgtgtacaccgtagtcaatgatcctgatcatcagttcactgtcatcacagaccccaagaccaacgagggcattctgaaaacagccaagggcttggattttgaggccaagcagcagtacattctgcacgtgacagtggaaaatgaggagccctttgaggggtctcttgtcccttccacagccactgtcaccgtggatgtggtagacgtgaatgaagcccccatttttgtgcctgcggagaagagagtcgaggtgcctgaggactttggtgtgggtctggagatcgcatcttacactgcgcgagagccagacacattcatggaacagaagatcacgtatcggatttggagggacactgccaattggctggagattaacccagagactggggtcatttccactcgggctgagatggacagagaagattcggagcatgtgaagaacagcacgtatacagctctcatcattgccacagatgatggttcacccattgccactggcacagggactcttctcctggtcctgtcagacgtcaacgacaatgctcccatcccagaacctcgaaatatgcagttctgccagagaaacccgaagccccatgtcatcaccatcttggatccagaccttcccccaaacacatcccccttcactgcagagctcacccatggggccagcgtcaactggaccattgagtacaatgacgcagaacaagaatctctcattttgcaaccaagaaaggacttagagattggcgaatacaaaatcaatctcaagctctcggataaccrkwrkarmgrccrsgtgaccacgttggaggtccacgtgtgtgactgtgaagggaccgtcaacaactgcatgaaggcgatctccctggaagcaggattacaagttcccgccatccttggaatcctgggagggatcctggccctcctgattctgatcctcctgctcctactgtttctacggaggagaacggtggtcaaagagcccttgctgccaccagatgacgatacccgggacaatgtgtattactatgatgaagagggaggtggagaagaagaccaggactttgatttgagccagctgcacaggggccttgatgccagaccggaagtgattcgaaatgatgtggctcccaccctcatgagcatgccccagtatcgtccccgtccagccaatcctgatgaaatcgggaacttcatcgatgaaaacctgaaggcagcggacagtgaccccacagcgccccsttacgactctctgttggtgtttgactatgaggsgagtggttctgaagctgcctmcmtgagctcgctgaactcctctgagtcagatcaggaccaggactacgattatctgaacgaatggggcaaccggttcaagaagctggccgatatgtatggtggcggcgaagaagactagagagtcgttcctgtgtggcaccatgggagatgcagaatcatgatgtcagtggtctttcagctccttccctgactttgtagaagagagactgatctgagaagtatgcagattgcatactggtcccactctacctaccagtctgtctgtgttaggagggttttcactggttgttggaatctttttctaaaatgtttttgtttttacagtgctgtgatgtgatgaactgtaccctctttttgtttttgttttgagctatgttctgctccggacacacagcccccaagcccttcacccctcactaatttttttacattgtatactttcactcaattaccatgtttatgttctgtattctaatagccactaagttcctgaattctgttgcctggcccaggtgctattctgtgacacagtagtgcctgggcccttttatggtaagagacaggtttcttggtgtgggtgcaactgagctggatagtgtatgtttcaaacacctttcctgtgttctctccccacctccagagtgtctttacttattcagctgtgtgtttggggcagaacaaaaaaataatgggaccactatgcaagctgcgaagattctaaggtgcacacctgattcttaggcagatgccatagtgagatatgttgctttggttctctatccaatgctgtgaccgggacctgcagcgaggttttcggacaccgtggtttcttgcgtttctttcaaaccagcagtaaaaaatggttttttctgagagagactggagtgccaccaccaaagatagaggagagaagccaagcttggggacagcaagcatgccagtgaacctgaccactgtcatgagtcatgtgggtggccacatgtccgtgaacctggccagttggcacactgatggtgagggtacaaggaggctagacctcgtcccacaaaatttctggaagaattagggttgtctcagccaatgtttccwagctggaatcctgtccatgtatgtgttcctraagcccaggaaatacacccctytagtgcctgcttttgatggtagttatagaaaagaccggctgatttggacywgagttgcccaatcttaagtacaaatrgmamrmkgagactatgctgggtgtgttggtgcacgcctttaatcccggcactcgggaggcagagacagtctcagatctctctgagttcaaggtcagcmtggtatrrtaagtgaattccaggacasccagggytacacagaawctctgtcttggaaavccaaaaargaaaactgagaatattagagaktgtgcattttctcagaaagcaggaagaawwchmmaykcwrwtsksarmwkkkwgryaasgcmctkgagamttttcattgaaaktkctgtactyacmtaaytttggaagmaawtgatgmcyrcaatcarctgtgaraactgttgrtttctckgtagtttartyrtstaatgttgmtagmgtgmcctttgtatgtagtttgagtgtatatgtgtgtgggtgctgataattttgtattttgtggggrgtggaaaagkyaagcmatygraacygttctstaagatgcrttttyaykmmyywwrwwaaaragttytgttaaamwrwaaaaaaaawaaraarama

SEQ ID NO: 2919 - DNA, 2382 bp, Rattus norvegicus
gcggcacctgcctgccgaggtacgtggcgcagcccccagtcagcagagcggacctcggggaacccaggcagcagcgatccgcctttgcccactcataccccaggcccagcagctcctccccagccctgagacgccggacgcgcctgcgaggggacgccggcggagggtcgcgaccccgggccgcctatatgggcgcccccggcgcagcctgtcgaggtgtgaacgcggtgctgtggcaatgccaaatgagttcacctctgcaaagctgagaagtgattgctcaaggacctccctgcaatggtacacccagacccagcacaagatgagaagacccagcttgttattaaaagacatcctcaagtgcatgttggttgtgtttggagtgtggctcctgtacatcctcaagttaaattacactgctgaagaatgtgacatgaaaaaactgaattatgtagaccctgcccgaataaagagagctcatagaaacactcaggaagtctttcagaaggaatgtcgtcctgggcacgcgaagaaaactatggatctgttatttaagggcaagtacagcatggacttggagcctttcgtgcagaagatccccacagccagtgaagctgagctcaagtatgacccgccttttggattccggaagttctccagtaaagtccagagcctcttggatatgctgcctgagcacgactttcctgaacacttgagagccaagcactgcaagcgctgtgtggttattgggaacgggggcatccttcacggactagagctgggccacgcactcaaccagttcgatgtggtaataaggttaaacagcgcaccaattgagggttattctgaacatgttggaaataaaactactataaggatgacttacccagagggtgctccactgtcggacgctgaatactacgctaatgacttgttcgttgctgttttatttaagagtgttgatttcaaatggcttcaagcaatggtgaaaaatgaaagcctgccattttggattcgtctcttcttttggaagcaggtggcagaaaaaatcccactccagccaaagcatttcaggattttgaacccagttatcatcaaagaaactgccttcgacatccttcagtactcagagcctcagtcaagattctggggccatgataagaatatccccacgatcggcaysakkgccattgtcttggccacgcatctgtgtgatgaagttagcctggcaggctttggatatgacctcagtcaaccmaggacccctctgcactactttgacagtcagtgcatgggcgccatgaactggcaagtcatgcacaacgtgaccacagagacccagttcctccagaagctcatcaaggagggcgtggtgcaggacctcagcgggggcatccactgagaactttgaacaccgcagacctcacttagcaatgcagctgagagctgtggtgagcagcctccccagggagtttaccctgcagctgctttggcctacagctagtgtttttaaactcagttttaaaagaaaaggaaagaacaacagcaacaacaaaagttcagccctttacacctctttgtcctatttatttgaagtcagtgttgggttttgcacaattttgtaagttaattttaagaatggggatggaaagacttttcaaagagaatcgtatggtttattgtattttaaagaagtaatttaatttgcaaaaactgtacacatgtactctccccaggtgttgaggtgggaggagaggggcttctgcaccttcgatgatggcctcgatacctgactgcgggttctgcagctctgtttggtagcactgctggcagggaaacttcctgcctcctggatgaaggaagggtttactcatcaycactggcagctgcaggaagtcgggggcctgataaacaagttcataacccctttctgstagtccgtctgccagaagactcagaggacccaagcagggcagctgtyccacaggcgagccactgtcagctgagtaccgtgatgctgccccaggatgggagaagccatgtcgtccwacactgtcagggcacttttcagcttctggagaagtgtctgttctctctrccctcccaaagcacttggtgttatttaaggcgtgmggctgtctgtctgmgatggttcatcagaattgtgacasccatggggagcaagacctctgcagatgaccacattgctaaagcactggagtgaaccccccctgttgtaacttaagacccatcctgaagtgccctgaagtgcccmccaaccaatgtgaaaggagaatgaggaaggggagggaaaagaacagaaagaaagaaagaaaawwawwaaaagcttttgaggagccmmwrwaaaaaaaaaaaaaaaaa

SEQ ID NO: 2920 - DNA, 2145 bp, Rattus norvegicus
ccggaccgagtcgagccgagccaagccgagccgggggcgcagagcgcgggaggcggcggcgcggagcccaggcagctctactgctgatggaagtgctccggcctggccgatgaagttggtacacacaccatgtcatcatgtgtctctagccagcccaccagcgaccgggcggccccccaggatgagctgggaagcgggggtgtcagccgggaaagccagaagccctgcgaggcactgcggggactctcatccttaagcatccacttgggcatggaatccttcatcgtggtcaccgagtgtgaaccaggccggggcgtggacctcagcctggccagagaccaacctctggaggccgatggccaggaactccctctggatgcctcggaacctgagtcacggtccctgctttctggtggcaagatgtccctccaggagcggtcccagggcgggccggcgtccagcagcagcctggacatgaatggacgctgcatctgcccatccctgtcctactcaccagccagctccccacagtcctctccccggatgccccggcggcccacagtggagtcgcaccacgtctccatcacgggtttgcaggactgtgtgcagctgaatcagtacacgctgaaggatgaaattggaaagggctcctatggcgttgtcaagctggcctacaatgaaaatgacaatacttattatgcaatgaaagtgctgtccaaaaagaagctgatccgacaggccggctttccacgtcgccccccacctcgaggtactcgcccagctccagggggctgcatccagcccaggggccccatcgagcaggtgtatcaggaaattgccatcctcaagaagctggatcaccccaacgtggtgaagctggtggaggtcctggatgaccctaacgaggaccatctgtacatggtgtttgaactggtcaaccaagggcctgtgatggaagttcccaccctcaagccactgtctgaagaccaggcccggttctacttccaagatctgatcaaaggcattgagtacttacactaccagaagatcattcaccgggacatcaaaccctccaacctcctagtgggggaggacgggcacatcaagatagccgacttcggcgtgagcaatgagttcaagggcagcgacgccttgctgtctaacaccgtgggcacgcctgccttcatggcgcccgagtcgctctcagagacccggaagatcttctccggaaaggccttggatgtttgggccatgggtgtgacactatactgctttgtttttggccagtgccctttcatggatgaacgaatcatgtgtttgcacagtaagatcaagagtcaggccctggagtttccagaccagcctgacatagccgaagacttgaaagatctkatcacccggatgttggacaagaacccagagtycaggattgtggtkcctgaaatcaagctgcacccttgggtcacgaggcacggggcygakccactgccgtcggaggacgagaactgcacaytggtygaggtgaccgaagaggaggtcgagaattcagtcaaacacattcccagcctggcaactgtgatcctagtgaagaccatgattcggaaacggtcttttgggwacccatttgaaggtakccggcgggaggagcgttccttgtcagcacccggaaacctgctcwccaaaaaaccaaccagggagtgggagccyttgtctgagcccaaggrrrcaargmarmraaramarmctccggggcccagagccagcccctgtgggggaggaggaagtgctcttgtgaaaggtggtccctgcgtggaaagttgcggggctccggcccctggctccccgccacgcacgcctccacagcagcccgaggaggccatggagccggagtagctgcgcggaccacctgacctcgcatgcctggctgtgtggccctgcacggggctgctgcaccctgcgtttccatagcagcatgtcctacggaaaccaagcacgtgtgtagagccttgactgtcatctctggttatcagttttttgtttttgtttttgtttctttttgttgttgctgttgtttttcttgtggtttttcttttctttttttttctctycctttgttgtctaaggggacaaagaaaaaaaaaaaaa

SEQ ID NO: 2921 - DNA, 2300 bp, Rattus norvegicus
  misc_feature (1793)..(1793): n is a, c, g, or t
ttttttttttttgtctgggtttcccttttactgctggaggaaggaggagctgtcagaccactgttcttggagggtgtgtgtgcctctttgtctcagagactgcgcctggccattgctgtgggaacctccttatatccagaggcagggaagggcgatgcaagggagctggtgaagacttgccttctctccgccatggtcrmcagcaccaagtatgaagtggccgctcagaacgaggcagacgaggcagatggctctgctcagggggatggggcaggccctgcggctgagcaggtaaaactgaagaaggagatctcgctgcttaatggcgtgtgcctgatagtggggaacatgatcggctccgggatctttgtctcccccaagggcgtactcatgtacagtgcctcttttggcctctcgctggtcatctgggctgttgggggcattttctccgtctttggggccctgtgttatgccgaactgggtaccaccattaagaaatccggggccagctatgcgtacatcctggaggccttcgggggatttctcgccttcatccgcctctggacttctctgctcatcattgaacccaccagccaggccgtcattgccatcacctttgccaactacatggtgcagcccctcttcccgagctgtggcgctccctatgctgctggccgcctgctggccgctgcctgcatctgtctcttaaccttcattaactgtgcctatgtcaagtggggaaccctggtccaagatattttcacctacgctaaagtgttggcgctgattgcggtcatcattgcgggaattgttagacttggccagggagccacaactaactttgaggactcctttgagggctcatcgtttgcaatgggtgacattgccctggcactatactcagctttgttctcctactcgggctgggacacccttaactatgtcactgaagagatcaggaatcccgagaggaacttgcccctctccattggcatttccatgcccatcgtcaccatcatctacctcttgaccaatgtggcctattacagtgtgctagacataaaggacatcttggccagcgacgcggttgctgtgacctttgcagatcagatttttggaatattcaactggacaattccattagcagttgcattatcctgctttggtggcctcaatgcttccattgtggctgcttctaggcttttatttgtgggctcgagagaaggccacctcccggatgccatctgtatgattcatgttgaacggttcacaccagtgccttctctactcttcaatggtatcttggcactgswckasktgtgtgtggaggacatcttccagctcattaactactacagcttcagctactggttctttgtgggactttctattgtgggtcagctttacctacgctggaaggaacctgaccggccccgccctctcaagctcagcctgttcttccccatcgtcttctgcctctgtaccatcttcctggtggctgtcccgctttatagcgataccatcaactccctcatcggcatcggcatcgcgctctcgggcctgcccttctatttcctcatcatcagagtgcccgagcacaaacgacctctgtgccttcgcaggatcgyagcgwskaccacacggtacctccagatcatctgtatgtcagttgctgcagaaatggacttggaagatggagagttgcccaaacaaggtcccaagtctaaatagagcrtggrakkbtgagatgcgggcaaactcggcgtttctcatctcccattggccagaacctntggaggccccacccagagcmcaggcttggcagcttcawytykkwwyttkyttttgagggatgaagagtaatttatttgttttgctacgtgttgtttcggactttmtaagtggataatgcagaytgtggyggaagcaggccatttytraggcttggttytggcagcacccggggtgcctacccactcctctcttcctttaccagggccaacaatgctccaaatttgtctcctttagagggacacaaaactgtcmcagatgcaaaacaataaaaagattatgttcctwarrwmwrarwrrwwmwattctgcttagtggccctgggatatttacgcagttcaaacagacatggaaactaaatgaatcaacttttccctccgaagccagctgccaaaggcaataaaaccaatttctacaacgaaattgttggactaaaatgtcatgaatgtaaaaggctagtgcataaacacttcagttttttcctaaagtgcgttgcatgtgcaaaggcc

SEQ ID NO: 2922 - DNA, 2317 bp, Rattus norvegicus
ggtgtgtccccagtgcctccgaagtccctctctccagccgcacccatgcttctggcacgaatgaagccgcagtgcagcctgagctcggcggggcggaccagctgcccgagcagcccctgaggccctgcaaaaccgctgatctgctagtggtgaaggagcgcaacggtgtccagtgtctcctggcatcccaggatggtgacgcgcacccgggagacttggggcaagaagattgatttcctgctgtctgtggtgggcttcgcagtggacctggccaatgtgtggcgcttcccctatctctgctacaagaatggtggtggtgccttcctgattccatatacactgttcctcatcattgctgggatgcctctgttttacatggagctggctctggggcagttcaaccgggagggggcagccacagtgtggaagatctgccctttcttcaaaggagtgggctatgctgtgatcctcattgccctctatgttggcttttactacaatgtcatcatcgcctggtcactgtactacctcttcgcgtccttcaccttgaacctgccctggaccaactgtggccatgcctggaacagccccaactgtaccgaccccaaactcctcaacgcctcggtgctgggcgaccataccaaatactccaaatacaagttcacaccggctgcagagttttatgagcgtggtgtcctacaccttcacgagagcagtgggatccatgacatcggcctgccccagtggcagctgttgctatgcctgatggtcgttatcgttgtcctgtatgtcagcctctggaaaggagtgaagacatcgggaaaggttgtctggatcacagccaccctgccttactttgtcctctttgtgctcctggttcatggcgtcactctgcctggtgcttccaatggcatcaacgcctacctgcacattgacttctaccgcctcaaggaggccacggtatggatcgatgctgcaacccaaatattcttttccctgggagctggatttggagtcttgattgcatttgccagttacaataaatttgacaacaactgttacagggatgccttgctgaccagcaccatcaactgtgttaccagttttatttctggatttgccattttctccatccttggttacatggcccatgaacataaagtcaagattgaggatgtcgccactgaaggagctggccttgtatttgtcctgtatccagaagccatttctactctgtcgggatccacgttctgggctgtcctgttcttcctgatgctcctggctctggggctagatagctcaatgggaggcatggaggcagtcatcaccggactggctgatgacttccaggtcctgaagcgacaccgaaaactcttcacatgtgctgtcaccctcggtacctttcttctggccatgttttgcataacgaagggagggatttacgtcctcactctgctggacaccttcgcggcaggcacgtccattctctttgccgtgctcatggaggccattggagtttcctggttttatggcgtggacaggttcagcaatgacatccagcagatgatggggtttaagccaggcctgtactggagactgtgttggaagttcgtgagccccgccttcctcctgtttgtggtagtggtcagcatcatcaacttcaagccactcacctatgatgactacgtctatcctccttgggccaactgggtcgggtggggcattgccctctcatccatgatcctggtacctgcctacgtcatctacaaattcttcagcatacggggctccctttgggagagagtggcctacggaatcaccccggagaatgagcaccacctattggctctagaaatagagctttccagccttcagagctttgttattacttcatgtcccatagatcctcttttgtcgagttttcttttcatctcctgccagaaaaccttggtgtttaagaagtcaggtccagcaccattgatttgacacttgggtagcattgagaaggcaragagggttgctmtgccctgtgtttgcaggtmtggggaccccacagytytgccccacaggcaggatgcytggccytggttggtgaatgtgaagtytggggggtgccttccttgctmtactgtctmtacatctgtgtaaataggattgtttcactcccatgttctctgtgtcacagactgttcaagtatcattygmgsgctygwgymtgcmttggatttaatttgaaagttgttctcttcgtggaaaaaaaamcaaattaatgtacagaatawtaaagaacattcytgggcaaaaaaaaaaaaaaaaa

SEQ ID NO: 2923 - DNA, 2860 bp, Rattus norvegicus
gactcttccttccacctctgaccggccgggctgcggagcgctccgctcgcaggtcccgggagccgccgcccgcttcctccgcccgcggtgagcccgtcaatccccgcacaacgcgctcctccatctgggccatggatggcggggatctgatgagcttcttccttctggtgtcattaacggaccttctaccatgaacaattctacttctgcaggtgtgtatgctaatgggaatgacaacaagaaatttaaaggagatagacctccctgttcgccttcccgtgttctccatcttcgaaaaattccatgtgatgtcaccgaagcagaggtcatatcattaggtctaccatttggcaaagtaactaatcttttgatgttgaaaggaaaaagccaggcctttttggaaatggcttctgaagaagctgctgttactatgataaattattacactcccgttactcctcaccttcgaagtcagcctgtttatatccagtattccaatcaccgagaacttaagactgacaatctgcccaatcaggctagagcccaagctgcactgcaggctgtcagtgcagtccagtcaggaaacctgtcccttcctggagctacttccaatgaaggcacattgctacctgggcagagccctgtgctccggataattattgaaaacctattttaccctgtcactctggaagttctccatcagatattttctaaatttggcacggtgttgaagattatcacctttacaaagaataatcagtttcaagccttgcttcagtatgctgacccagtgaatgcgcagtatgccaaaatggctctggatggccagaatatctataatgcgtgctgcactctccgtatcgacttctccaagctcaccagccttaatgtgaaatacaataatgacaaaagcagagacttcactcgcttagaccttcctactggtgatggtcagccatctcttgaacctcctatggctgctgcattcggtgcaccgggtataatgtcctctccatatgcaggggctgctggatttgccccagccattgcatttcctcaagcagcaggtctgtccgtctcggctgttcctggagcccttggtcctctcacacttacttcctctgctgtcagtggaaggatggccattcctggggcaagtggtataccagggaattccgttctgctggtcaccaacctcaatcctgactttatcacaccacatgggctttttatcctatttggagtgtatggtgatgtacatcgagtgaagattatgtttaacaagaaagaaaatgccttggtgcagatggccgatgcgagtcaagcccagatagcaatgaaccacctaagtggtcagagactttatggaaaagtacttcgggctacactgtccaaacatcaagctgtccagctccctagagagggacaagaagaccaaggtctgaccaaggacttcagcaatagtcccctgcatcgctttaaaaagcctggctcaaagaacttccaaaacatcttccctccgtcagccacactgcatctcwccaacattcctccttctgttacaatggatgatctgaagaacctgttcacggaagctggatgttcagtgaaggcttttaaattctttcagaaggaccgtaagatggcactcattcagttgggatctgtggaggaagcaatccaggcccttattgagcttcacaatcatgaccttggagaaaatcaccacctcagagtttccttctcaaaatccaccatctgatctgtctgtgaaawtctctccttgtattggaccataatttctgtaaatcttcaggcacagactgaagcagttcaggaccagctctgcctcttccataaaagtaactcttggagtctgactgatactcaagtacgacagctactcctttcctctcatttcccctaccactgtatgatcaaaagtttgcttttcctttgtattgtggtttctatgaaaataactttcaggaaaaaaaatcaggaaagtawawwwwaaawaawwwaattccctgaattagatttcagaaggacagactttctttatgtttgggtccagatcagccttacatgacatttctaaactcctttgtactttgagaaatttaaacatacagccttttgcaatttcttgatgtaatttaaatcaccywckaskaagtttttaactttatgattcagaagtttccctgtagaacgtgacattcattcacttgtaagacttgtaccagatgtttgcacctattgatagcttattatacacaaccacacggagttgtattggaaacaggtctatagacatgcatgcttcctttagtcttctttccccctcctgtgttacactcctttgaataatgcatatcttctctttttaagactatttggaaaagcaaagtgttgcaactgtccccagggaaatagaagtgaaattcagcctggatctattacaatatcagcataattagtcattttagaaaaaaaaaatcatgttttaaatttcaaaatgacatttgtctagtaatgtaatgtgatcttggmaaattttaaaagaaaataatcctacttttttataattgttttcagaaaaaagtttacagtcttaaggaaaaatattcaggtctatcatatggtttgacagagtttttaaaagttatttttggtaaggtcttcttttrgaaaaaaaaawmwmaarrgttttttgtaccactataatctctaatactcagaattactgtgtacttacttaatttcttattatgtgccttattatgtgcttaagatataataggttaggattttatctaaatatctaggaagataaattgtgggcttggtgagcaaa

SEQ ID NO: 2924 - DNA, 2605 bp, Rattus norvegicus
cacgaggtgcatgagtgtgtgctgtgtgtcagagtggattggagttgaaaaagcttgactggcgtcattcaggagctggatggcttgggacatgtgcagccaagactctgtatggagtgacatagagtgtgctgccctggttggtgaggaccagcctctttgcccagatcttcctgaacttgacctttctgaacttgatgtgaatgacctggacacagacagctttctgggtggattgaagtggtgtagtgaccaatcagaaatcatatccaaccagtacaacaatgagcccgcgaacatattcgagaagatagatgaagagaatgaggcaaacttgctagcggtcctcacagagacactggacagtctcccggtggatgaagacggattgccctcatttgatgcactgacagatggagacgtgaccactgacaacgaggccagtccttcctccatgcctgacggcacccctccccctcaggaggcagaagagccgtctctacttaagaagctcttactggcgccagccaacactcagctcagctacaatgaatgcagcggtcttagcactcagaaccatgcaaaccacacccacaggatcagaacaaaccctgccattgttaagaccgagaattcatggagcaataaagcaaagagcatttgtcaacagcaaaagccacaaagacgtccctgctcagagcttctcaagtatctgaccacaaacgatgaccctcctcacaccaaacccacagagaacagaaacagcagcagagacaaatgtgcttccaaaaagaagtcccatacacaaccgcagtcgcaacatgctcaagccaaaccaacaactttatctcttcctctgaccccagagtcaccaaatgaccccaagggttccccatttgagaacaagactattgagcgaaccttaagtgtggaactctctggaactgcaggcctaactcctcccacgactcctcctcataaagccaaccaagataaccctttcaaggcttcgccaaagctgaagccctcttgcaagaccgtggtgccaccaccaacaaagagggcccggtacagtgagtgttctggtacccaaggcagccactccaccaagaaagggccggagcaatctgagttatacgcacaactcagcaagtcctcagtgctcagccgaggacacgaggaaaggaagactaaacggcccagtctacggctgtttggtgatcatgactactgtcagtcagtcaattccaaaacggatatactcattaacatatcacaggagctccaagactctagacaactagacttcaaagatgcctcctgtgactggcaggggcacatctgttcttccacagattcaagccagtgctacctgagagagactttggaggccagcaagcaggtctctccttgcagcaccagaaaacagctccaagaccaggaaatccgagctgagctgaacaagcacttcggtcatcccagtcaagctgtttttgacgacaaagtagacaagaccagtgaactacgggatggcaacttcagtaatgaacaattctccaaactacctgtgtttataaattcaggactagccatggatggcctatttgatgacagtgaagatgaaaatgataaactgagctacccttgggatggcacgcagtcctattcattgttcgatgtgtcgccttcttgctcttcctttaactctccgtgtcgagattcagtgtcaccaccgaaatccttattttctcaaagaccccaaaggatgcgctctcgttcgagatccttttctcgacacaggtcgtgttcccgatcaccatattccaggtcaagatcaaggtccccaggcagtagatcctcttcaagatcctgttactattatgaatcaagccactacagacaccgcacacatcgcaattctcccttgtatgtgagatcacgttcaaggtcaccctacagccgtaggcccaggtatgacagctatgaagccaatgagcacgaaaggctcaagagggacgaataccgcagagagtatgagmrgcrsgagkctgaaagggccaagcagagagagaggcagaagcagaaagcaattgaagagcgccgtgtgatttacgttggtaaaatcagacctgacacaacgcggacagaactgagagaccgctttgaagtttttggtgaaattgaggaatgcaccgtaaatctgcgggatgatggagacagctatggtttcattacctaccgttacacctgtgacgctttcgctgctcttgagaatggatatactttacgcaggtcgaatgaaactgacttcgagctgtacttttgtggacggaagcaatttttcaagtctaactatgcagacctagattcaaactcagacgattttgaccctgcttccaccaagagcaagtatgactctctggattttgatagtttactgaaggaagctcagagaagcttgcgcaggtaacgtgttcccaggccgaggatgacagagagatggtcaatacctcacgggacagcgtgtcctttcccaagactcttgcaagtcatacttaggaatttctcctactctacactctctgtacaaaaaaaaaaaaaaaaa

SEQ ID NO: 2925 - DNA, 1280 bp, Rattus norvegicus
ttgagctggtgtcctggactcactgccagcttcctcattcacaccatggaagatgatggttacaactactacggggctgacaaccagtctgaatgtgactacgcagaytggacgccctctggagctctcatccctgccatctacattctggttttccttctaggcaccacaggcaatggcctggtgctctggaccgtgttttggagcagccgagaaaagagacgctcagctgacatcttcattgccagcctggctgtggctgacttgacctttgtggtgactttgccactgtgggccacttatacctaccgggagtttgactggccttttggaaccttctcttgcaagctcagcagctacctcatctttgtcaacatgtacgccagtgtcttttgsctcaccggcctcagctttgaccgatacctggccattgtcaggccagtggctaacgctcgactaaggctgcgagtcagcggggccgtggccacagcagtcttgtgggtgctggctgcccttctagctgtgcccgtcatggtgttccgttccactgacatcccggaaaacagcaccaagacccagtgctacatggactactctatggtggscacttcaaactcagagtgggcctgggaggtgsgccttggggtgtcctccactgctgtgggctttgtggtgcccttcatcatcatgctgacctgttacttcttcattgcccaaaccatcgctggccatttccgaaaggagcgcatcgagggcctgcggaagaggcgccggctgctgagcatcatcgtggtgcyggtggtgacctttgccctgtgctggatgccttaccacctggtgaagactctctacatgctgggcaatttgctgcactggccctgtgactttgacagcttcctcatgaatgtctttccctattgcacctgcatcagttacgtcaacagctgcctcaaccccttcctctatgccttctttgacccccgatttcgccgagcctgcacctccatgctctgctgtgaccagagcgggtgcaaaggcagccctcacagcagcagtgcagagaaatctgccagttattcttctgggcacagccagggccccggccccaacatgtgcaagggaggagaaccgatgcatgagaaatctatcccctatagccaagaaacccttgtggactagggctgggaccagagggaagcctggtgcctcggggcctgacccaaacttcatcctcacgctctgagaaccaggtagcatggcttctcctggactccgaattc

SEQ ID NO: 2926 - DNA, 1830 bp, Rattus norvegicus
cggcacgaggcccagcctcctcgccgcaacccccgccgtagctgccgctgctcccgccgtcaccgcctccgagaacatggctgtgccwcccacrtatgctgatcttggcaagtccgccagggatgtcttcaccaagggctacggctttggcttaataaaacttgatttgaaaacgaagtccgagaatggattggaatttactagctcaggttctgccaacacggagaccaccaaagtgaacggcagtctggaaaccaagtacagatggaccgagtatgggctgacgtttactgagaagtggaacacagacaacaccctgggcactgagatcaccgtggaagaccagcttgctcgtggactgaagctgacctttgattcatctttctcgcctaacactgggaaaaaaaawrmwaaaawcaagacagggtacaagagggagcatatcaacctgggctgtgatgtggactttgacatcgctgggccctcaatccggggcgctctggtgcttggctatgagggttggctggctggctaccagatgaattttgagacctcgaagtcccgagtgacccagagcaactttgcagttggctacaagacggacgaattccagcttcatactaatgtgaatgatgggacggagtttggtggctccatttaccagaaggtgaacaagaagttggagactgctgtcaatctcgcctggaccgcaggaaacagtaacamtcgctttggaatagcagccaagtatcaggtcgaccctgatgcctgcttttcggccaaagtgaacaactccagtctaattggcttagggtacactcagaccctaaaaccaggtatcaaactgacactgtcagccctgctggatggcaagaacgtcaatgcgggtggccacaagcttggtttaggactggaatttcaagcataaatgaatattgtacaatcgttaattttaaactattttgcagcatagctaccttcagagtttagtgtaccttttaatgtcatatgttggggatgcgagagttgattgataccacgttagacctccaggctaaggatgactcggctttaaggtgtttaccgtttcagaggtacagcggaaaccccattccaggaagggtcctttttagctgtaggcgtgggctgggaggagctcctctagagatgccaggctgcaagtggaagctgggaacgtgtggaccctttgtaaatctgtatccagttccgcacatgaaattgtgacttcctgaacatcgaaccccggtgtcccgatcctgtctgctcggaagcatgtacacacctacgtgaaagggacggttttttttttttttttatcggatggtcacgccckgttcccatcgtgccctgttcccatcctagcccatcagttacctgttttacaccaaaagtagtctttagggtgtagttagcaatttcttttgtgccattttagggtggagagggtgggcatgatgaagccagtcattcaggacttaattcttccttgtgttgtggtgtggttttcttcctttcttctgtttttttttttttaattccttttttttttgccattgcaccagagtatgaaatagcttccaggttstccggctcagagctgggcgggtgattgtggtcacaccctgacaacactagggatctcaacggactcctyttgtagccgcaccactatttttagcagtttaatgggtacattatagagtcttccattttgtgtggaattagctcctccccttcaaatgctgtaattaacmtcacttaaaataaaacttgaataaaatactgaaammwmaaaaaaaaaaaaaaaaa

SEQ ID NO: 2927 - DNA, 1380 bp, Rattus norvegicus
  misc_feature (1300)..(1300): n is a, c, g, or t
aggtcgcgcaggcgcagacggcgttggttcgagaagaccttcagcgttgccttggtggagcggkacgggcccaccctcgggttgtagatatgtgtarcacaccaacktactgcgacctaggaaaggctgccaaggatgtctttaacaaagggtatgggtttggcatggtcaaaatagatctgaaaaccaagtcttgtagtggagtggaattttctacttctggtcatgcttatactgatacagggaaagcatcaggcaacctagagaccaaatataaggtctgtaactacgggctsatcttcacccaaaagtggaatacagacaatactcttgggacagaaatctcttkggagaataagttggctgaagggttgaaactgacggttgataccatatttktaccaaacacagggamgaagagtgggaaattaaaggcctcctatagacgggattgttttagtgtgggcagtaasgttgacatagatttttctggaccgaccatctatggctgggccgtgttggcyttykraggttggcttgctggctaccagatgagttttgacacagccaaatccaaactgtgtcagaataattttgctcttggttacaaggctgaagacttccaactgcatactcatgtaaacgatggcactgaatttggaggctccatctaccagagagttaatgagaagatcgaaacatcaataaacctggcatggacagctgscagcaacaacactcgttttggcatcgctgctaagtataggctggattgtagaacttctctgtctgcmaaaktwavswmtgsyakwktamtwggacwrggtwataygswgwktcwyckmcyrkgagtcaamytraccctgtcagctwtagtggatggaaagaayttcaatgcagkaggccacaaggttggctygssaykwgractggaagcttaatgsggttwtgmgtagagtwycaattskscmtgsaaatgaagagaaatgavmccaytatgtyytgsccktaaamttstgtgaaayktcaaaagtgaactttttattsttmcaaagarttgtaattcttcccwcaccgaagtytwgwgaktacagawccatccagtgggagbtccttgaaggcaaygscwsgarrtygtcatgttygtgccacatttcaghtgagtkmtgcagagttaattttaaatrtgttcctcagcaacaacgtagtgtcacgwtaaaggaagtgatstgccsggtctgtacatygwgtcctgcatgtcccaacwccmstttccatgamctwtygthacatcagtytntgstbtagtgagrcctttggtttgcmtcagrgtaamvtaaacccatcmcatytsgrwmawaaaaaaaaaaaaaaaaaaaa

SEQ ID NO: 2928 - DNA, 1526 bp, Rattus norvegicus
ttcacccggctgcaagcgctaggtgtacggagacctggcagctcttggggcttaaggactgagcrccagagccggtggaggttcctgtggagtacattcggaccctctcacagcccccgagagtgcgggacgtgcggagcgcagttcgggatctgcactcgaggacttgtcgaggacgcattaagctaagcatctgctcggagcatggaatcgcactttaactggtacggggtcccaaggctccagaaggctagcgacgcgtgccctagggaatcctgcagcagtgccctgcctgaggcccgtgaaggtgcgaacgtccacttcccaccgcacccggttcctcgcgagcacttttcctgtggcgcaccgaaacccgtagcgggggccccggcgctgaatgcaagcttgatggacggcggcgcgctgcccagactcgtgcccacctcgtctggagtcgctggagcctgcactgctcggcggagacccccgtccccggaactgcttcgctgcagccgacggcggcgatcgggagcaaccgaggccagcagcagctcggcggccgtggcacgccgcaatgagcgtgagcgcaaccgcgtaaagctggtaaacttgggcttccaggcgctgcggcagcacgtgccgcacggcggcgccaacaagaagctgagtaaggtggagacgctgcgctccgcggtagagtacatccgtgcgctgcagcggctgctagcagagcacgacgcggtgcgtgctgcgctctctgggggtctattaacacccgctactcggccgtccgatgtgtgcacgcagccctccgcctcccctgccagcgcgtctctgtcctgcacctctacatccccagaccgcctaggctgctccgagcctgcctctccgcgctccgcctactcgtcggaggacagcagctgcgagggagagacttacccgatggggcagatgtttgacttttccaattggttagggggctrctragcaccccacacccstaagctgcgtccctgggtgtcccctggtggacctacctgcgtttcttgcccaggaaacctgggcccatgccttacccatgctgtctagtgcagcctgaccaaatgccaagtactgacctctgctcggcctccacgccgcggaatgacatcttccatctcccagtccttgccgaaccaggacttggaaatttctcaggagaaagaattttacaatgacaatctgctttttatcaattaacttgaactgctggaggactctgctgaaaatatgaagaattatttttatacaaaggatccttaagcttggagcacaataaagatgacctctgtctctcacccccactgtctagaactttccaacctggccaaagtgtggacgggtcgggccctgagggcaagatgcctggctgcacccttcttcctcttccgaagcctatcctgacgctgatgtttggccagtgtgggaaccctgctattgcaaagtgtactattctataaaagttgtttttcayygraaaggaattc

SEQ ID NO: 2929 - DNA, 1341 bp, Rattus norvegicus
gggcggttcarggcataacaggctcatctgggatcctctccagtcaggcttccttgtgcaagtgtctgaagcagctatggcaactgtccctgaactcaactgtgaaatagcagctttcgacagtgaggagaatgacctgttctttgaggctgacagaccccaaaagattaaggattgcttccaagcccttgacttgggctgtccagatgagagcatccagcttcaaatctcacagcagcatctcgacaagagcttcaggaaggcagtgtcactcattgtggctgtggagaagctgtggcagctacctatgtcttgcccgtggagcttccaggatgaggacccaagcaccttcttttccttcatctttgaagaagagcccgtcctctgtgactcgtgggatgatgacgacctgctagtgtgtgatgttcccattagacagctgcactgcaggcttcgagatgaacaacaaaaatgcctcgtgctgtctgacccatgtgagctgaaagctctccacctcaatggacagaacataagccaacaagtggtattctccatgagctttgtacaargagagacaagcaacgacaaaatccctgtggccttgggcctcaaggggttgaatctatacctgtcctgtgtgatgaaagacggcacacccaccctgcagctggagagtgtggatcccrrmcrmtacccamwkmagaagatggaaaagcggtttgtcttcaacaagatagaaswcragrccaaagtggagtttgagtmtgcacagttccccaamtggtacatcagcacctctcaagcagagcacagacctgtcttcctakgaaacagcaatggtcgggacatagttgacttcaccatggaacccgtgtcttcctaaagatggctgcactattcctaatgccttccccaggacatgctaggragcccccttgtcgagaatgrgcagtctccaggggaagcctttgtcctctgccaagtcaggtctctcagagccataagaaaaccgtggcacattcyggtcaaagaaaacgtgtgtttcmctccvygcstbtgacaggcaaccacttacctayttatttatgtayttattgattggttgatstatttaagytgattcaggggggtcacgaggcagcattgtcgacagaagaatstagttgtccgtgtgtatgggatgaattgaatttggmccagygcwcwgccagcactgagttctttcattgatgctgaaaatgaagagtttcatattgtgtggatgagagtgtttatgaatgaagcacaagcacatcattttgatgagtatgaaataaatgtcactaaaacaaaaaaaaaaaa

SEQ ID NO: 2930 - DNA, 562 bp, Rattus norvegicus
ctttggaggaccagaacgagacaatggttcttgccagctctaccaccagcatcctctgtatgctgctcccgctcctgatgctcttccaccagggactccagatttcagacaggggctcagatgcccaccatttactcaggacgttggattgcaggactattgccttggagattttggtgaagctcccatatcctcaggtatctggactcaataatagtgacgacaaagccaatctgaggaatagtaccttgcggagagtaaacctggacgaattcctaaaaagccaagaggagtttgattctcaggacacaacggacatcaagtccaaacttcagaaacttaagtgttgtattcctgcagctgcgagcgactctgtgttgccaggtgtctacaataaagatctggatgactttaagaagaaactgagattctacgtgatccatcttaaggacctgcagccagtgtcagtctctagaccacctcagcccacatctagctctgacaactttcgccctatgaccgtggaatgttaaaacagcaggcagagcaactggagcctgaa

SEQ ID NO: 2931 - DNA, 4150 bp, Rattus norvegicus
taaagggaataagcttgcggccgctcgaccmtacgcccggsccgggggctccmtagacctcggccctcccgacacgtcgcggaggagcggatcctgcgcgcctccgggcgctcctgtgtggcccgacccgtgtcgccggttcctgaagcaggcgacgggaacaagatgtgaactgtttttcctccacagaagaagaggcccttctttcccctcccgggaaggccgatgttctgaaaaaggctgtggatgggaatggcttgccttacaatgacagaaatggakggaacctccacatctcctgcacatcagmmtsgtgmkawtyctggaaatgctaactctgtgaagcagacagagccagtccttcaagtgtacctgtaccattctcttgggcaagctgaaggagactatctgaagtttccaaatggagagtatgttgccgaagaaatttgtgtggctgcttctaaagcatgtggtattamgmmtgtgtatcataatatgtttgctttaatgagtgaaacagaaaggatctggtatccacccaatcatgtcttycacatagatgagtcaaccaggcataatatactctacagaataaggttttactttcctcattggtactgcagtggcagcaacagaacctataggtacggagtatctcgtggggctgaagctcctctccttgacgactttgtcatgtcttacctttttgctcagtggcggcatgattttgttcatgggtggataaaagtacctgtgactcacgaaactcaggaagaatgtcttggcatggcagtgttagacatgatgagaatagctaaggagaaggaccagactcccctggctgtctataactccatcagctacaagacgttcttaccgaagtgcgtgcgagcgaagatccaggactatcacattttaactcggaagcggataaggtacagattccgcaggttcattcagcagttcagtcagtgcaaagccactgccaggaacctaaaacttaagtatctcataaacctggagaccctgcagtctgccttctacacagaacagtttgaagtaaaagaatctgcaagaggtccttcaggtgaggagatttttgcaaccattataataactggaaacggtggaattcagtggtcaagagggaaacataaggaaagtgagacactgacagaacaggatttacagttgtattgtgattttcctgatattattgatgtcagtattaagcaagcaaatcaggaatgctcaactgaaagtagagttgtgaccgtccacaagcaggacgggaaggtcttggaaatagaacttagctcattaaaagaagccttgtcatttgtgtcgttaattgacgggtattacagactaactgcggatgcacaccattacctctgtaaagaggtggctcctccagccgtgcttgaaaacatacacagcaactgtcacggcccaatttcaatggattttgccatcagcaaactaaagaaggcaggaaaccagactggactgtatgtacttcgatgtagccctaaggacttcaacaaatacttcctgacctttgccgttgagcgagaaaatgttattgaatataaacactgtttgattacaaagaatgagaatggagagtacaacctcagtgggactaagaggaacttcagtagtcttaaggaccttttgaattgctaccagatggaaactgtgcgctcagacagtatcatcttccagttcaccaaatgctgtcctccaaagccgaaagataaatcaaaccttcttgtcttcagaacaaatggtgtttctgatgttcagctctcaccaacattacagaggcataataatgtgaatcaaatggtgtttcacaaaatcaggaatgaagatttgatatttaatgaaagccttggccaaggcacttttacaaaaatatttaaaggtgtaagaagagaagttggagattatggtcagctgcacgaaaccgaagttcttttgaaagtcctagataaagcacatagaaactattcagagtctttctttgaagcagcaagcatgatgagtcagctttctcacaagcatttggttttgaattatggagtatgtgtctgtggagaggagaacattttggttcaagagtttgtaaaatttggatccctggatacatacctgaaaaaaaacaaaaattccataaatatactatggaaacttggagtggccaaacagttggcatgggccatgcacttcctcgaagaaaaatcccttattcatgggaatgtgtgtgccaaaaatatcctgcttatcagagaagaagacaggaaaacagggaatccacctttcatcaaacttagtgatcctgggattagcatcacagttctaccaaaggacattcttcaggagagaataccatgggtaccacctgagtgcattgaaaaccctaaaaatctaactttggcaacagacaagtggagctttggcaccactctgtgggagatctgcagtggaggagacaagcctctgagtgctctggactctcaaagaaagctgcagttctatgaagataagcaccagctcccagcacccaagtggacagagttggcaaaccttataaatacttgcatggattatgagccagacttcaggcctgccttcagagctgtcatccgtgatctgaacagcctgtttactccagattatgaactgctgacagaaaatgacatgctacccaacatgagaataggtgccctaggattttctggtgcttttgaagacagggaccctacacagtttgaagagagacacttgaaatttctacagcaacttggcaagggtaactttgggagtgtggagatgtgccgctatgacccgctgcaggacaacactggagaggtggtagctgttaagaagctccagcacagcacggaagagcatctccgagactttgaaagggaaattgaaatcctgaaatccttgcagcatgacaacatcgtgaagtacaagggagtgtgctacagtgctggtcggcgcaacctaagattaattatggaatatttgccgtatggaagtttacgagactatctccaaaaacataaagaacggatagatcacaaaaaacttctgcagtatacatcccagatatgcaagggcatggagtatcttggtacaaaaaggtatatccaccgggatctggcaacaaggaatatattggtagaaaatgagaacagagttaaaataggagattttggattaaccaaagtcttgccacaggacaaagaatactacaaagtaaaggaaccaggtgaaagtcccatattctggtatgctcccgaatccttgacagagagcaagttttctgtggcctcagatgtgtggagctttggtgtggttctgtacgaacttttcacgtatatcgagaagagcaaaagcccacctgtggaatttatgcgaatgatcggcaatgataaacaagggcagatgatcgtattccatttgatagagctactgaagaacaacggaagactgccgagaccagaagggtgcccagacgagatttatgtgatcatgacagaatgctggaacaacaatgtcaaccaacgtccctctttcagggacctttcccttcgggtggatcaaatccgggacagtatggctgcatgaaagaggtgacctttactcagagaccaagtagacttccagaaccagagcaaagctctgtagccacatggycatggactcgtgtccacgrgsccttatcatgatgctagccagaasraaatgtgatgctgwctgctcaagactttggaagcgtkgtggatttttatgtaccatctgtaacccaccgcaraaggctggcaggatgctgtgaamtggtgcacggcactcactgcgtcatcgcgtctcccctggcaaaagaagaaaatwgacagttttcagctcagctctttgagaaatgaaaaaagttgtaatgtaaattttgcagtgtaagagatgcacasgacacacatgtacagttyttaccacgtggtgtgtatcatactttggcatccgtgtgatttacatgagggctgctgwtyattaatgttttttaatttttccatagctgatctataataactacatgatacacattaaaatctcagaaaattaaaaaaaaaaaaaaaaa

SEQ ID NO: 2932 - DNA, 1406 bp, Rattus norvegicus
cacgrssgcggcggctgaggcggctgaggcggcagcgctgtggcggcggctgaracggctggggaaggcggtggcggcggctgctcggcccggagtcccgctcccgcgccatttcggacccggagcgagcgcggcgccggcctgaargcggcggcgggagcctgaggcgcggcggctccgcggagcggagagaggcctgctgaaaatgactgagtataaacttgtggtagttggagctggtggcgtaggcaagagtgccttgacgatacagctaattcagaatcactttgtggatgaatatgatcctacgatagaggactcctacaggaaacaagtagtaattsatggagaaacctgtctcttggatattctcgacacagcaggtcaagaggagtacagtgcaatgagggaccagtacatgagaactggggagggctttctttgtgtatttgccataaataatactaaatcatttgaagatattcaccattatagagaacamattaaaagagtaaaggactctgaagatgtgcctatggtcctagtagggaataagtgtgacttgccttctagaacagtagacacgaaacaggctcaggagttagcaaggagttatgggattccattcattgagacctcagcgaagacaagacagggtgttgacgatgccttctatacattagtccgagaaattcgaaaacataaagaaaagatgagcaaagatgggaaaaagaagaagaagaagtcaaggacaaggtgtatagtcatgtgaatagtttgtactctttcttaaggcacacttaagtaaagtgtgatttttgtacattacactaaattattagcatttgttttagcattacctwwtytttttttttytkttcgtgcaaactgtcagcttttatcttaaatgcttattttaaaaggacagtggaaaccttcttttctctaagtgccagtattccctgggttttggacttaaamtagcamkgcmygwggaagagactaaagacctgagactctgtcttggggtttggtgcatgcagttgattccttgctagttctctaccaactgtgaacattggtgtgamccagaataatgaagcttttgamccatccstactstgtgttccacgtagtcatcaaatggattcattagtaattacagcttcacttgagaccttgtggytggttctcmtaagmctaagggaktatggatktatgggcttccctttgattcacttccagcatgtcctagaakttatcatccktyataastgtagktagactgttcataaaggctttctytagctttccmctgvymgwawtsttgctcactcccccaaatagtatattttttctagaaaaggggraaaadtgaaaaaawwwaaaaaaarcgaacgcggccg

SEQ ID NO: 2933 - DNA, 4189 bp, Rattus norvegicus
atgaaggctcccaccgcgctggcacctggcattctgctgctgctgctgaccttggcgcagaggagccatggggagtgcaaggaggccctagtgaagtctgagatgaacgtgaacatgaagtaccagcttcccaacttcaccgcagaaacccccatccasaatgtcgtcctccmtgggcaccatatttatctcggagccacaaactacatttatgttttaaatgacaaagaccttcagaaggtatctgagttcaagaccgggcccgtggtggaacacccagattgttttccttgtcaggactgcagcagcaaagccaatgtgtcaggaggtgtttggaaagacaacgtcaacatggcgctgcttgttgacacttactatgacgaccagctcatcagctgtggcagcgtcaacagagggacctgccaaaggcatgtccttcctcctgacaatgctgccgacattcagtccgaggttcactgcatgttctccccacttgcggaggaagagtcaggccagtgtcccgactgtgtagtgagtgccctgggagccaaagtcctcctgtctgaaaaggaccggttcatcaatttcttcgtggggaatacgataaactcttcctaccctcccgattattcattgcattcaatatcggtgaggcggctgaaggaaacccaggacggttttaagtttttgacagaccagtcctacattgatgtcctgssagaattccgagattcctaccccatmaagtacatacatgccttcgaaagcaaccattttatctactttctgactgtccagaaggaaaccctagatgctcagactttccatacaagaataatcaggttctgttctgtagactctgggttgcactcctacatggaaatgcctctggagtgcattctgacggaaaaaagaagaaagagatccacaagggaagaagtgtttaatatcctccaagccgcrtatgtcagtaaaccrggggccaatcttgctaagcaaataggggcyagcccgtatgatgacattctctacggggtgtttgcacaaagcaagccagattctgctgagcccatgaaccgatcagcggtctgtgcrttccccatcaaatatgtcaatgacttcttcaacaagattgtcaacaaaaacaacgkacggtgtctccagcatttttatggacccaaccacgagcactgtttcaataggaccctgctgagaaattcatcgggctgcgaagwgcgcagtgacgagtaccggacggagtttaccacrgcgctgcagsstgtggatttattcatgggccggctcaaccatgtactcttgacgtctatctctaccttcatcaaaggtgacctcaccattgctaatctaggsacwtmmgaaggtcgcttcatgcaggtggtgctytytcgmacarsacawttyamcccccatgtgaatttcctcctggrttccyatcctgtgtcwscrgrrgytrywgtygaryatcsatcaaatcaaaatggctataccytggtggtcacagggaagaagatcaccaagattccactgaatggcctaggctgtgggcatttccagtcctgcagtcagtgtctctctsccccctactttatacagtgtggctggtgccacaatcggtgtgtgcattccaatgaatgccccagcggtacatggactcaagagatctgtctgccagcagtttataaggttttccccactagtgcacccctcgaaggaggaacaatgctgaccatatgtggctgggactttggattcaagaagaataataaatttgatttaaggaaaaccaaagttctgcttggcaacgagagctgtaccttgaccttaagcgagagyacgacaaatacgttgaaatgcacagttggccccgcgatgagtgagcacttcaatgtgtctgtgatcgtctcaaacagtcgagagacaacacagtacagtgcgttttcctatgtggatcctgtaataacaagtatttctccaaggtatggtcctcatgccggaggcaccttactcactttgactggaaaatacctcaacagcggcaattctagacacatttcaatcggagggaaaacatgtactttaaaaagtgtatcagatagcattctcgaatgctacaccccaggccacaccgtctctgccgagtttcccgtgaaattgaaaatcgacctggctgaccgagtgacaagcagcttcagttacsgggaagacccgkttgtctctgaaatccacccgaccaaatcttttatcagtggtggaagcacaataacggggattggaaagaacctgaattcagttagcaccccaaagctggtaatagaagtgcatgacgtgggcgtgaactacaccgtggcgtgccaacatcgctcgagttcagagatcatctgctgcaccactccttccctgcracagctggacctgcaactccccctgaagaccaaagccttcttcctgctggacgggatcctttccaaacactttgatctcacttatgtacatgatcctatgtttaagccttttgaaaagccagtaatgatctcmatgggcaaygagaatgtagtggaaattaagggagacgatattgaccctgaagcagttaaaggtgaagtgttaaaagtcgggaataagagctgtgagaatctccactggcaywctgmakctktgttgtgtacggtccccagtgacctgctgaagctgaacggcggcgagctaaatatagagtggaagcaagcagtctcttcaactgtccttggaraagtgatcgttcaaccggatcagaattttssaggattgatcattggtgcggtctcaatatcagtggtagttttgttagtatccgggctcttcctgtggctgagaaagagaaagcataaagatctgggcagtgaattagttcgctatgacgcaagagtacacactcctcatttggataggcttgtaagtgcccgaagtgtaagcccaactacagagatggtctcaaaygagtctgtagactacagagctacttttccagaagaccagtttcccaactcctctcagaatggagcctgcagacaagtgcagtatcywctgacagatctgtcccccatcctgacgagtggagactctgatatatccagcccattactacaaaacactgttcacattgacctcagcgctctaaatccagagctggtccaagcggtgcmgcacgtagtgattggacccagtagcctgattgtgcatttcaatgaagtcataggaagagggcattttggctgtgtctatcatgggactttgttggacagtgacggaaagaaaattcactgtgctgtgaaatccttgaayagaatcacagatatagaagaagtctcccagtttctgactgagggaatcatcatgaaagatttcagccaccccaatgttctctcactcttgggaatctgcctgcggagtgaagggtcccctctggtggttctgccctatatgaagcacggagatcttcgcaatttcattcgaaaygagactcataacccaactgtgaaagatcttataggattcggtcttcaagtagccaagggcatgaaatatcttgycagcaaaaagtttgtccacagagacttagctgcaagaaactgcatgttggatgaaaaattcactgtcaaggttgctgatttcggtcttgccagagacatgtacgacaaagagtattatagcgtccacaacaaaacgggtgcgaaactaccggtgaagtggatggctttagagagtctgcagacgcaaaagttcaccaccamgtcagacgtgtggtccttcggtgtgcttctctgggagctcatgacgagaggagcccctccttatcctgacgtgaacacatttgatatcactatatacctgttgcaaggcagaagactcttgcaaccagagtactgtccagacgccttgtatgaagtgatgctaaaatgctggcaccccaaagcagaaatgcgcccatcsktttctgaactggtctccagratatcctcaatcttctccactttcattggcgagcactatgtccatgtgaacgctacttatgtgaatgtaaaatgtgttgctccatatccttctctgttgccatcccaagacaacattgacggcgaagcgaacacatgacggataagaggcccgccagcccacttccaagaaacagttc

SEQ ID NO: 2934 - DNA, 7653 bp, Rattus norvegicus
gcgtggagctggcccaatgagggtgggagtgggtggggcaggcgcgagcggcagtgctaaaggagcccggcggaggcagcggtgggtttggaactgagacgctggatctttggtcgctgctggggacgtgtgccggcgccaccatcttcggctgaagaggcaataacttttgggtccttctgtttacaatggcccagagaactggactggaggatcccgagaggtatctctttgtggacagggctgtcatctacaaccctgccactcaagctgactggacagctaaaaagctggtgtggattccatctgaacgccatggttttgaggcagctagtattaaagaagaacggggcgatgaggttatggtggagctggcagagaacgggaagaaagcgatggtcaacaaagatgacattcagaagatgaacccgccgaagttctccaaggtggaggacatggcagagctcacgtgcttgaacgaagcctctgttttacacaatctgaaggatcgctactattcaggactcatctatacttactcgggactcttctgtgtggtgataaatccctacaagaaccttccgatttactctgagaatattattgagatgtacagagggaagaagcgccatgagaagccgccacacatctacgccatatcagagtctgcctacagatgcatgcttcaagatcgtaaggaccagtcgattctttgcacgggtgaatcaggtgccgggaagacagaaaatacaaagaaagtcattcagtacmwkgmccayrwtrcttcytcasrcaawsrmmkaaassasyrmaayaytcmkggggaacttgaacggcagcttttacaagcaratccaattctggaatcatttggaaatgcgaagactgtgaaaaatgataactcatctcgctttggcaagtttatccggatcaactttgatgtaaccggctatattgttggggccaacattgaaacataccttctggaaaagtcccgtgctgttcgtcaagctaaagatgaacgcacgtttcatatcttttatcagttgctctctggagcaggggaacacctgaagtccgacttactcctggaaggctttaataactacagattcctctccaacggctacatccctattcctggacagcaagacaaggataactttcaggagaccatggaagccatgcacataatgggcttctctcacgaagagatcctctcaatgcttaaagtcgtgtcttcagtgctgcagtttggaaacatctctttcaaaaaggagaggaacactgaccaagcttccatgcccgagaacacagttgcacagaaactctgccacctgcttgggatgaatgtgatggagttcactcgggctatcctcacgcccaggatcaaagttggccgagattatgtacagaaagcccagaccaaagagcaggcagattttgcagtggaagcattggcaaaggctacctatgagcggttgtttcgctggctcgttcaccgcatcaataaggcgctggataggaccaaacgccagggarcgtctttcattgggatcctggatattgctggttttgaaatttttgagctgaactcctttgaacaactatgcatcaactacaccaatgagaagctgcagcagctgttcaaccacaccatgttcatcctggagcaggaggagtaccagcgagagggcatcgagtggaacttcatcgactttggtctcgacttgcagccctgcatcgacctgatagagagacctgccaatccccctggtgtgctggccctcctggatgaagaatgctggttccccaaagccacagacaaaacgtttgttgagaagctggttcaggagcaaggttcccactccaagtttcagaaaccacggcaactgaaagacaaagccgacttctgcatcatccactatgcagggaaggtggactataaggcggatgagtggctgatgaagaacatggaccccctgaatgacaacgtggccaccctcctgcaccagtcatcagacagatttgtcgccgagctttggaaggatgtggaccgaattgtaggtctggatcaagtcactggcatgactgagacagcttttggctctgcatataaaaccaagaagggcatgttccgcaacgtcgggcagctctacaaagagtctctcaccaagctcatggcaaccctccgaaacaccaaccccaacttcgtacgctgcatcattccaaatcacgagaagcgggctggaaaactggatccacatcttgtgctggatcagctccgctgtaacggtgtcctggaaggaatcaggatctgtcgccagggattccccaaccggatagttttccaggagttcagacagagatatgagatcctaactcccaacgctattcccaaaggcttcatggatggcaaacaggcctgtgagcgaatgatccgagctttagaactggacccaaacctgtatagaattggacagagcaagatatttttccgagctggagttctggcgcacttagaggaagaaagagatttaaaaatcactgatataatcatctttttccaagctgtatgcagaggctacctagccagaaaggcctttgccaagaaacagcagcagctaagtgccttaaaggtcttgcagcggaactgtgcggcgtacctgaagctgcgacactggcagtggtggcgcgtcttcacaaaggtgaagcctctcctccaagtgacccgccaggaggaggagctccaggctaaagatgaggagctgctgaaggtgaaagagaagcagacaaaagtggaaggggaacttgaggagatggaacggaagcaccagcagctgctggaagagaagaatatcctggcagaacagctgcaggccgagactgagctctttgctgaagcagaggagatgagagcaagactcgctgccaagaagcaggaactggaggagatcctccatgacctggagtccagggtggagggagaggaagagcgaaaccagatcctgcagaacgagaagaagaagatgcaagcgcacattcaggatctagaagagcaactggatgaggaggagggggcgcggcaaaagctgcagctggagaaggtgaccgcggaggctaaaatcaagaagatggaagaggaggttctgcttctcgaggaccagaattccaaatttatcaaagaaaagaaactcatggaagatcgaattgctgagtgttcctctcagctggctgaagaggaagaaaaggcaaaaaacttagccaaaatcaggaataagcaagaagtgatgatctcggatttagaagaacgcttgaagaaggaggagaaaacacggcaggaactggaaaaggccaaacggaaactggacggtgaaacaactgatctgcaggaccagatcgccgagttgcaagcacaggtcgatgagctcaaagtccagttgaccaagaaggaggaggagcttcagggggcgctggccagaggagatgatgagacgctgcacaagaataatgcgcttaaagttgcgcgggagctgcaggcccaaatcgccgagctccaggaagactttgagtctgaaaaggcttcaaggaacaaggctgagaaacaaaaacgggacctgagtgaggagctggaagctctaaagacagaactggaggacaccctagacaccacagcagctcagcaggaactccgcacaaagcgggagcaggaagtagctgagctgaagaaggctcttgaggatgaaactaagaaccacgaagctcagatccaggacatgagacagaggcacgccacggcactggaggaactctctgagcaactggaacaggctaagaggttcaaagccaatctggagaagaacaaacagggcctggagacggacaacaaggagctggcgtgtgaggtgaaggtgctgcagcaagtcaaggctgagtcagagcacaagaggaagaagctcgatgcccaggtccaggagctccacgccaaggtgtcagaaggtgacaggctcagggtagaactggccgagaaagcaaacaagctacagaatgagctggataatgtctcaaccctgctggaagaagccgagaagaaaggaatgaagttcgctaaggacgccgcaggtctcgagtctcagctacaggacacacaggagctccttcaggaggagacgcggcagaaactgaacctgagcagtcggatccggcagctggaggaggagaagaacagccttcaggagcagcaggaggaggaagaggaggccaggaagaacttggaaaagcaggtgttggccctgcagtcccagctggctgacaccaagaagaaagtggacgatgacctggggacaattgagggtttggaagaagccaagaagaaactgcttaaggacgtggaggcactgagtcagcgactggaggaaaaggtcctagcatatgacaagctggagaagaccaagaaccggctgcaacaggagctggatgacctgacggtggacctggaccaccagcgccagatcgtctccaacttggagaagaaacagaagaagtttgaccagctgttggcagaagagaagggcatctctgctcgctatgcagaagaacgggaccgggctgaagctgaggccagagagaaagaaaccaaggcgctctccctggcgcgggccctggaggaggccttggaggccaaggaggaattcgagaggcagaataagcagcttcgggcagacatggaagacctcatgagctcgaaagatgatgtggggaagaacgtccacgagctggagaagtccaagcgggccctggagcagcaggtggaggagatgaggacccagctggaggagctggaggacgagttgcaggccactgaggacgccaaactccgcctggaagtcaacatgcaggccatgaaggcccagtttgagagggacctgcaaaccagagatgagcagaatgaagagaagaagcggctgctgctcaagcaggtacgggagctcgaggcagagctggaggatgagcggaagcagcgggcacttgctgtggcttcaaagaagaagatggagatagacctgaaggacctggaggctcagatcgaggccgccaacaaggcccgggatgaagtgatcaagcagcttcgcaagcttcaggcacagatgaaggattaccagcgtgaactagaagaagctcgagcatctagagatgagatttttgctcaatccaaagaaagtgaaaagaaactgaagagtctagaagcagaaatcctccagttgcaagaggagctggcctcatctgagcgagcccgcagacacgcagagcaggagcgagatgagctggctgacgagattgccaacagcgcctctgggaagtccgctctgctggatgagaagcggcgcctggaagcccggatcgcgcagctggaggaggagctagaagaggagcagagtaacatggagctgctcaatgaccgcttccgcaagaccacgctccaggtggacaccctgaacacagagttggcagcggagcgcagcgctgcccagaagagcgacaatgcccgccagcagctggagcgacaaaacaaggagctgaaggccaagctgcaggagctggagggggcggtcaagtccaagttcaaagccaccatctcagccctggaagccaagattgggcagctggaggaacagctggagcaggaagccaaggaacgmgcagctgccaacaaactagtccgtcggacagagaagaaactgaaagagatcttcatgcaggtcgaagacgagcgccggcatgcggmtcmgtataaggagcagatggagaaagccaatgccaggatgaagcagcttaaacgccagctggaagaagctgaggaggaggctacacgtgccaatgcatctcggcgtaaactccaaagggaactggatgatgccaccgaggccaatgagggcctgagccgtgaggtcagcactctcaagaaccggcttaggckkskckscccarkcrgskykkcttcaagccgatctggccggcgccagctacacattgagggggcatcgctagagctgtcagatgacgacacagaaagcaagaccagtgatgtcaaygagacacagccaccccagtcggaatagacacaggcagtcagaggtgatgctgaggacaggccggaacccaacccagcactggtctgcttgagccctgcactcgggagcggcaagccccaggttccttaaggaaatcaactgtgtcttaaggctttgcggcctgcgcagactgaatcctgcttcagactaggtacaattgccccttttatatatacacctccacaagacatgcgtattaaacagattgtctcattcrwwrmawmwawwwwmmatatattcatcaagagaccattttatgatgcattaagaagaaagaacctttttgaaacaaactccagaccctttgttgccagtggctgggcctggggttgccccggggacgttgctcagttgctctgcatgctctgtcctgccgacaggtaccttagttctgtgttcatgtggccctgacccttccaccacacccggtcttagagcattgtgaacccaacctgcacttgtctctcatttcctctgaatagtgatcgctgtctcggtgagcaaactgtgagaagggctttggcggcttaggaggggtgggtttgggttgggaagcagcatccatttggggtgrccytgcccctcaaatttatggtgtccccactgtctcatgtgaatagccccagagttctatgcacagagaggacagtggcctcaacatataaggtgccccaggtggcagccatcacagtgacttccaggtggtctctgagtgtctggcttgatgatgccctccctcctcaattcaggagtgagcctctgtgacccttggggtgctcacagaaggcctctccaaccagtcaggccctcttgcaaattcagccamtgctttgagcccaaaatgggaatattagttttktktcggaggtgtgttccaagtttktcaatgaggccmcrgagcytcgagaacagatgccatctgcctgaatgttgacgccagtgggsgtgtgccctccatttccsttcsctcctwtggacagtgttacaatgaacayttagcattctggtyytssttggtagttgagcagactracrwwwcrgmamrhgvsktagacmytgcagcamtwargmcaatgttaaatgtattatttgsctvtaacaacytcagtgtattaggttttgtctgtgctttatrycatgtacctstgtaktgaagtmgaaacattcagtgacagcascaaatcrgtsttaatgacaagcccmgaccygtggcaatgtgctygaaaacacagaccttttgggttaaaagctttaacatctgtgaggaagaattggtcamatgggtttggaatcyhtgatttyccctgtatgaattrtactggctgttgmccaccagacacctgactgcaaatatcktttcttgtactcccatatttytagacaatgatttttgtargacrataaatttwttcrttrwvddwawwwrmrmmwrmwmwdwwwamwtggaggaaaaagcacccgttgagaayaaacagacctcaataaacaagaataatcatgtgaamawrraaaaaaaaaaaaa

SEQ ID NO: 2935 - DNA, 4120 bp, Rattus norvegicus
gaattcttgctcttgctcctgtgccgtaatacacaccgaaaagccagggcagcagtggagggagaggaagagaggattccaatacttgcaagcagtttctggtaatttctgaatactacttctaaatgtctctgcattttcttctaactgcccccccgcaccccccccccacttctgagatctgagttgtgctgctgtgagttgctccctctgtgggaaggtaaacttcataggtaagagaaaacaaacaacaaagcaaacctccacaatcctcatttctctccaaatttccaatttccttcacttaggaggaagaggaggaagaggaggaagagggtgaggaggaggaagaggaagaagaggaagaagaggaagaagaggaagaagaggaagaagaggaagaagaggatgagggaaaggaggagaagaggaggaggaggaggaggaagaaaaggagaagaaggagaaggagaaaaggaggaagccatttgcttctattgcaaggactttagtaactacatggggtgggtgtgggggctctacaactttgaaaagcgagctgaatctaaaaattctttctttttttttcctaattatttaaacgttcaaattcccgattaaggaacgctggagggcagaaggatctccaaaggcttgagtgaaggaaaagggtgaaaagaagaaatcccagcttctgcctggaaggttctgtgtgaaagagcccggctcccttggtgactccaggccgtgttttgcaggcggccgcatctgcctcccctgtctcttacctcctggatgttaggaactatttgtggtcggcgtggtggaaggacacagtgaggttctcacctccgccccccgcccgtcgctcgcatccccagttccatcaaagccaacccgggccagcgcagggatctccgagttgcgagtgtgctgaggctggggctgtcactcattctccgctcagcggtgaacgcagctcggcagtggctggcaagaaacaattctgcaaaaataatcatayccagcctggcaattgtctgctcctcggtccattgctccgccgccgtccacagtcgcttgcaagggaaggcactgaatttaccgcggccagaacatccctcccagccrgcagwttacaatgctgcraactaaggatctcatctggactttgtttttcctgggaactgcagkttcyctgcaggtrgatattgttcccagccarggrgaratcagcgttggagagtccaaattcttcytrtgycaagtggcaggagatgccaaagataargacatctcctggttctcccccaayggrgaraarctsascccaaaccagcagcggatctcagtggtgtggaaygatgatkmctcctcyaccctcaccatctayaacgccaacatygaygaygccggcatttacaagtgygtggtyacmgsygargayggcasysagtcmgaggccactswcaawgygmmkatcyyccmsaarmwmawrwwmaaraatgcgccaaccccacaggagtttaaggaaggggaagatgctgtgattgtctgtgatgtggtcagctctctgcccccaaccatcatctggaaacacaaaggccgagatgtcatcctgaaaaaagatgtccggttcatagtcctatccaacaactacctgcagatccgaggcatcaagaaaacagatgagggcacttaccgctgtgaaggcaggatcctggcccggggggagatcaacttcaaggacattcaggtcattgtgaatgtaccacccactgtccaggccagacagagcatcgtgaatgccactgccaacctgggccagtctgtcaccctggtgtgtgatgccgatggcttcccagagcccaccatgagctggacaaaggatggggaacccatagagaatgaggaggaagatgacgagaagcacatcttcagtgacgacagttcggagctgaccatcaggaatgtggacaaaaatgacgaagccgaatacgtctgcatcgctgagaacaaggctggcgagcaggatgcctccatccacctcaaggtcttcgcaaagcccaaaatcacctatgtagagaatcagacagccatggaactagaggagcaagtcactctgacatgtgaagcctccggagaccccattccttccatcacctggagaacgtccacccgaaamwtcrgcastgargmmwmggcmkcgtssacycgaccagagaagmaagagactctagatgggcacatggtggtacgcagccatgctcgtgtgtcctccctgaccctgaagagcatccagtacacagatgctggagaatacatctgcactgccagcaacaccatcggccaggactcccagtccatgtaccttgaagttcaatatgctcccaagctccagggccctgtagctgtgtacacttgggaagggaaccaggtgaacatcacctgtgaggtctttgcctacccaagtgccacaatctcctggttccgagatggccagttgckgccaagctyymmctwyagsarkrtyaakwtctacwwcaccccatctgcgagctatctggaggtaacccctgattccgaaaatgactttggaaactacaactgcacagcggtgaaccgtattggacaggagtccttggaattcatcctggttcaagcagatacaccatcttccccatccatcgaccgggtggaaccatactccagcacagcacaggtacaatttgatgagccagaagccacaggtggagttcccatcctcaaatacaaggctgagtggaagtcgctgggtgaagaagcatggcattccaagtggtatgatgccaaagaagccaacatggaagggattgtcaccatcatgggcctgaagcctgagacaaggtacgcggtacgactggcggccctcaacggcaaggggctgggcgagatcagtgcagccactgagttcaagacacagccagtccgggaacccagcgcacccaagctggaagggcagatgggagaggacgggaactccatcaaggtgaacctgatcaagcaggatgacggcggctcccccatcagacactatctggtcaagtacagagcgctcgcctccgagtggaaaccagagatcaggctcccgtccggcagtgaccacgtcatgctcaagtccctagactggaacgccgagtacgaagtatatgtggtagctgagaaccagcaaggaaaatccaaggcagctcayttcgtgttcaggacttcagcccagcccasggccatcccagccaatggmagccccaytgcaggcctgagmacaggsgccattktgggmatcctcattgtcattttcgtcctactcctggtggtcatggacatcacctgctacttcctgaacaagtgtggcctgctcatgtgcatcgctgttaacctgtgcggcaaagcggggcccggagccaagggcaaagacatggaggagggcaaggctgctttctcgaaagatgagtctaaagaacccattgtagaggtccgaacggaggaggaacggactccaaaccatgacggagggaagcacacagagcccaacgagaccacaccactgacagagcccgagaagggtcctgtagaaacaaagtccgagccccaggagtcagaagcaaagccagcgccaactgaagtcaagacggtccccaatgaagccacacaaacgaaagagaatgagagcaaagcatgatgggtaccagcaaaaagcaaagatcaaaataacaaattgacacagcggcttcaccagagcatcccmaaataacccccccccyctctctctctctctcasacacacacacacacacacacacacacacacacacacacactcactcctctagtgtcttttgccttttaaaaaaacaacaaaaaacagataaacatgggattgcctttttgtaggtttctagaaagggytcctttgttgcacactcasttgttaagaaaaaaaaararamaaaaaggttaaacccacagccaaactaggacactccgttccctgaaaccatttaaaaatcaaacaaaagggccccaaattaagaatctaggaagctcagactgaagagaaaamcrrgaaaaaaaaaaaaaaaaa

SEQ ID NO: 2936 - DNA, 2156 bp, Rattus norvegicus
gagacctcttcctccaacctgcacaacttcccgcttttcacctgggaccggcggagtgacctgcggacttaggcgcgggcaattctgggctgggcgccccgctgaggggccgcccatcggggcgaagggacttgtccctttgcccctctagccgacttgcacggatggcgccgcggctgagtgacgagagccccggtgcaggacttccccctcctggatcttcggccttcgcggggcaagatgtacgaaagtgtagaagtcgggggscttacccccgcccctaaccccttcctagtggtggacttttataaccagaaccgggcctgtttgctccaggagaaggggctccctgccccgggtccctactccaccccactccggactccgctttggaatggctcaaaccactccatcgagacccagagcagcagttcggaagagatagtgcccagccctccctcaccaccacccctgcctcgaatctacaagccttgctttgtttgtcaagacaagtcatccggctaccactatggggttagcgcctgtgagggctgtaagggcttcttccgacgcagtatccaaaagaacatggtgtatacgtgtcaccgggacaagaactgcatcatcaacaaggtgacccggaaccgctgccagtactgccggctgcagaaatgcttcgaagtgggcatgtccaaggagtcggtgcgaaacgaccgaaacaaaaagaagaaagarrcacccaagcccgagtgctcagagagctacacgctgacaccggaggtgggggarctcatcgagaaggtgcgcaaagcmmaccaggagaccttcccggccctctgccagctgggcaagtacactacgaacaacagctcagaacaacgtgtctctctggacattgacctctgggacaagttcagtgaactctccaccaagtgtatcaykargactgtggagttcgccaagcagcttcccggcttcaccaccctcaccattgccgaccagattacccttctcaaggctgcctgcctggacatcctgattctgcgaatctgcacgcggtacacacctgagcaagacacaatgaccttctcagatggactgaccctgaaccggactcagatgcacaacgctggctttggccccctcaccgacttggtctttgccttcgccaaccagctgctgcccctggagatggacgatgctgagaccggactgctcagtgccatctgcctcatctgtggagaccgacaggacctggagcagccagacaaggtggacatgctgcaggagccgctgttggaagcactgaaagtctatgtccggaaacggaggcccagccrrccccacatgttccccaagatgctgatgaagatcacggaccttcggagtatcagcgccaagggagctgaacgggtgatcacattgaagatggagatccctggttccatgccaccacttatccaggaaatgttggagaactctgagggcttggacactctaagcggacagtcggggggcggaacacgagatgggggtggcctggcccctcctccgggtagctgtagccccagcctcagtcccagctcccacagaagcagcccagccactcaatccccatgaccacctcgacacatggacagccctcacccctgccctggctttctctgccttcctactggccatgtgacctatcagcccagccctgcttgtccttccrgacagaactggggaccttccaggggggacaggaggkagaaggcagtgactctgtggacagaggcctggaccctgagatggactgctctctcctggcagcctgggctggcatcaggggccaggcattgagccacgtgaggacytgggcctgagccctcacccagcttgccatgtcttcatcaccagcaaacaccagggcctggctccctgtcctccgaactcaagccatcaccccccagttggggaacttccccctgcttcggatggtgacagaagatgcccagggtgggggagaccccctgtacatatcytgcgtaccaacccccagatattaattctcgatggttttgtttttawwwwaawwwwwwhwrhtttgkttttttttaataagaattttcattttaagcmmahwwaaaaaaaaaaaaaaaaagtgagcggcc

SEQ ID NO: 2937 - DNA, 782 bp, Rattus norvegicus
gcagagacacagrcagaggccagcccagaaaccagccaactctcactgaagccagatctctcttcctccaccactatgcaggtctctgtcacgcttctgggcctgttgttcacagttgctgcctgtagcatccacgtgctgtctcagccagatgcagttaatgccccactcacctgctgctactcattcactggcargatgatcccaatgagtcggytggagwactacargagaatcaccagcwgcaggtgtcccaaagaagctgtrgtatttgtcaccaagctcaakagagagatctgtgctgaccccaataaggaatgggtccagaagtacattakaaamctggaccagaaccaagtgagatcagaawctacagtcttctataraattgcatcaaycctaaggrcttcagcacctttgaatgtgaacttgacccataaatctgaagctaatgcatccactctctttwccacaaccacctcaagcacttctgtagaagtgaccagtatgacagagaactagtgtgatttggaatgtgatgccttaagtaatgttmaacttatttaacttattgatattacactattccsttccatgaatactagaawtccttaaatgcaagatgtagatccatttttttatttctctgtgaatcytggttcaacactttcaatgtatgagagatgaatgggtaaacyttgtgtttgagagtccaaggtattgtttaaaatattattatggatattcctaattattaaaagaaatatattatttttgtacac

SEQ ID NO: 2938 - DNA, 2088 bp, Rattus norvegicus
aacacaccagggaagtggcaaccctgaacatcaggagtcrgcaatcacagaggcwggcagctggctggtatcggctctgcagcctgaagactggagaagatgacccgccttgtgacttggagctcttgatggmtgggatcggctctgctctcctctscttcccagattgcatactgggagaggacactctattccatgaagaccaagacaaggggacacaactggacagtctcacattggcctccatcaatactgactttgccttcagcctctacaagaagctggctttgaggaatccasataaaaatgttgtcttctccccacttagcatctcagccgccttggccgtcgtgtccctgggagcaaagggcarcagcatggaagagattctagaaggtctcaagttcaatctcacagagacccctgagacagaaatccaccggggctttggacacctcctccagaggctcagccagccaagggacgagatacagatcagtacaggcaatgccctgtttattgaaaaacgccttcaggtcctggcagagttccaggagaaggcaaaggctctgtaccaagctgaggccttcacagctgatttccagcagtctcgtgaggccaaaaagctcatcaatgactatgtgagtaaacagacccaggggaagatccagggactgatcacaaacctagctaagaagacatccatggtactggtgaattacatctactttaaaggcaaatggaaggtgccttttgaccctcgggacacattccagtctgagttctactctggcaaaaggaggyctgtgaaagtgcccatgatgaagcttgaggacctgaccacaccctacgtccgggatgaggagctgaactgcactgttgtggagctgaagtacacaggaaatgccagcgccctgtttatcctccctgaccagggcaagatgcagcaggtggaagccagcttgcaaccagagaccctgaggagatggaaggactctctcaggcccagcatgatagatgagctctacctgcccaagttctccatctctgctgactacaacctggaggacgtccttccagagctgggcatcaaagaagyyttctccacacaggctgacctgtctgggatcacaggggataaggacctgatggtstytsaggtggtccacaaggctgttctggatgtggctgagacaggcacagaagcagccgctgccacaggggtcaaatttgttccartgtctgcaaaactggaccctctgattatagctttcgaccggcctttcctgatgattatctctgacacagaaactgcaatagctccctttttggccaagatatttaaccccaaatgagattcgaacttcccaagagttgatssttctcctsasgcakkkagcctgtctgtgggtctctgtgtgcattttsgcttctatgctstgattggccatggcggcatgcctggatgagacagtaactaactgtgtaacagtcctcatgtacagacgcctgtgcagagtcgctgccatgctcccaaacttcttggtaccactagctcatatttctgagcctaaaatttgyctttcccytgcccytgctctctctccccygtatctgcctcaacccagaagccagggccccatcaggttgtctcagtcccwwcttaggcyytagttatatcttccttcagcgttgctgtsttgatgggrctgtgcrcgattaccggccaacccacatggaccaagaagaacacwtgctggtccstatcwttctgcagtatgtgggaatcacwtggtgcccagtgctgcctcactatttccttcstbtgggcamagtgctccttgcagyactggcctgacyttgtccamatytggcacarrgcwggagccctcccttytgcaratgcatggcacctgtggktcagrccaratccccstccccagcactcctamttwgrgcaatgcagcctttyttttagttcccagctgaccaacctcacacaaaarrtrrccaacaacaaccaaaatgaagaggtwggrgcaaaggatcaataaacacatcactgcattgaaaaaaaaaaaaaaaaaa

SEQ ID NO: 2939 - DNA, 1576 bp, Rattus norvegicus
tccgaaccgcacctcatgggttccgacgtgcgggacctgaacgcgctgctgcccgccgtgtcctcgctgggcggtggaggcggctgtgggctccctgtgagcggcgcgcggcaatgggcgccggtgctggacttcgcgcctccgggcgcctcggcttacgggtcactgggcggtcccgcgcctcctcccgctccgccgccacctccgccgccaccccactccttcatcaaacaggagcccagctggggcggcgccgagccgcacgaggagcagtgcctgagcgccttcaccttgcacttctccggccagttcaccggtacagccggggcctgtcgctacggacccttcggtcctcccccgcccagccaggcgtcatccggccaggccaggatgttccccaatgcgccctacctgcccagctgcctggagagccagccctccatccgcaaccaaggatacagcacggtcactttcgacggggcacccagttatggccacacgccctcgcaccatgcagcgcagttccccaatcattccttcaaacacgaggaccccatgggccagcagggctcgctgggcgagcagcagtactcggtgccacctccagtgtatggctgccacacccctaccgacagttgcacaggcagccaggccctgctcctgaggacgccctacagcagtgacaatttataccagatgacctcccagcttgagtgcatgacctggaaccagatgaacctcggagctaccttgaagggaatggctgctgggagctccagctcagtgamayggrcagaagggcagagcaaccacggcacagggtacgagagtgagaaccacacaacccccatcctctgtggtgcccagtacagaatacacacccacggtgtcttccgaggcattcaggatgtgcggcgcgtatctggagtggccccaactcttgtccggtcagcatctgaaaccagtgagaagcgtcctttcatgtgtgcgtacccaggctgcaataagagatattttaagctgtcccacttacagatgcacagccggaagcacactggtgagaaaccataccagtgtgacttcaaggactgcgagagaaggttttctcgctcagaccagctcaaaaggcaccaaaggagacacacaggtgtgaaaccattccagtgtaaaacttgtcagcgaaagttttcccggtccgaccacctgaagacccacaccaggactcatacaggtaaaacaagtgaaaagcccttcagctgtcggtggcacagttgtcagaaaaagtttgcgcggtcagacgaattagtccgccatcacaacatgcaccagagaaacatgaccaaactccasstggcgctttgaggggtccgacccggagacagtccagcgtcccaggcaagaaagtgtgtgcttaaactgcttccaaatctgattttgaaattcctccctctcacctacaaaaggacatgatggtggatcttcatccgacttccaagacagcacacctgtttactgagtcctatcaggtttgccggaaggagtcggtctctgcccactcttgattaactcccaggcc

SEQ ID NO: 2940 - DNA, 1607 bp, Rattus norvegicus
tatttctgactggcctgctgtgcagaatctagaccactggcagtgggtgacagcccagttgaggttaatcgaagtctcgtcgcaggctctgcttggtcttgggagttgctatgtcctggttcttggtcctgaagtgcctccttactgtctgcatcatctctcacttatctgtcagctctacagagagttatggttgtataagaaaaacatgctttggtggaagatgtttacataatactactagatcttgtgaattctccaaaggttgtttctcccaactgcaggaatttgcagtcccactacttctattaaaccgaagagttgagcagagaggctgttctgaagacaattgtactgaactagcattctcggcaacactggggattgattggatgtttagttataaccatcaatgctgctacagtgaacagtgcaacaacaagcccattaatgtgtctccattgtctttacaacccaatggtgttgaatgtccaacctgctacagtgaacttggcacgtgtaggccagtctccctaaagtgcacaggggcacagacgacgtgtgttaatgtcactggscaaggaattagggaggacttcattaagatacacgccatgggctgtgcaacccagactgcctgcaacttgaagaacgtgatcatcttgaataatattaaaatcgatacctcctgtgtcagtgggagccccccactcaggtactccccctctctcagcacggatcaaaagacgagctcagcaactgctcccacactgtgcctgcttgctgctgtgctccctgccatcatggtcatggagtcattctctgaactgtgaacgctcagtaaactctttcttttggaaatttccttggtcatggcgtcttcacagcaatagaaaagaaactaagacatcatttctggaaaagtagtagcatcaaaaccccctttcaataagaatagcaagaaccagaaccggctaaagtgatctcattttaatttgatcatttctataaagatcttgccttgggctggagagatggctcagtggyyaagarywckgacwgckwkksmagaggtcctgagttcaattccyagcaaccacagggtggctcacagttatctgtagtgggatcagatgtcctcttctggtatgtctgaagacaacaacagtgtacccacatatataatcttgtcttgccaacttgacacaaaccagggtcacctgggaagagggaacctcaacagagaaaaatgcctccatcagattggtttgtagaaaaattcgtggagcatttccttgattgatgtttgatgtgggaccaagcccactatgggcagtaccatccctaggcaagtggtcctgggaggaatgagaaaggaggacatgcctagcaagcacaaggccctgggttcggtctccagctccaaaaaaaaaaaaaaaaaaaagaaagaaaggaggacaaacataagcctgaggagccagtcagtaagcagtgmacctccatgatactacatttcctgtctccaagttcctaccttgagatcctgccctggctttcctccacggtgtaacctgtaagataaaataaagactttccttcctcgtgcc

SEQ ID NO: 2941 - DNA, 1010 bp, Rattus norvegicus
ccctagagccctagcttgacctaaggtgctggtgggacgcacaccatggcctcacgggtgatctgctttctgtcgctgaacctgctactgctggatgttatcactaggctccaggtttccggacagttacagttgtcaccaaagaaagtggacgctgaaattggccaggaggtgaagctaacatgcgaagtgctgcgggacacttcgcaaggatgctcttggctcttccggaactccagctccgaactcctccagcccaccttcatcatctatgtatcttcatcccggagcaagctgaacgatatactggatccgaatctgttctctgcccggaaggaaaacaacaaatacatcctcaccctgagcaagttcagcactaaaaaccaaggctactatttctgctcaatcaccagcaactcggtgatgtacttcagtcctctggtgccggtgtttcagaaagtgaactctattatcaccaagccggtgacgcgagctcccacaccagtgcctcctcctacagggacaccccggcccctacgaccagaagcttgccgacccggggcgagtggctcagtggagggaatgggattgggcttcgcctgcgatatttacatctgggcacccttggccggaatctgcgcggttcttctgctgtccctggtcatcactctcatctgctgccacaggaaccgaaggcgtgtttgcaaatgtcccaggccccttgtcaagcccagaccttcagagaaattcgtgtaaaatggcgccactaggaagccacaactactacatgacttcagagatttctcacaagagaccgggccctcctttttcagagtttcctgctggcttatatattgtcctctgtattgttttaggggtaggatggggacagttcctttttctttatgaattctctttgatacaaaacatacttgtatgcacacaatggggtaaagatcagactgtaacaccagagatagtcccagtttcagggtcagcgtagctggtgg

SEQ ID NO: 2942 - DNA, 1261 bp, Rattus norvegicus
ggagccctgaggagaacaggtgtctcaaagagcgccaagatgcagccatggctctggctggtcttcagtgtgaagctatcagctctctggggcagctctgccctccttcagactccttcatccctgctggttcaaaccaaccaaacagcaaaaatgtcctgtgaggctaaaaccttccctaaaggaacaaccatctactggctgagagagctccaggattccaacaagaacaagcactttgagttcctggcgtcccggacttcaaccaaaggaattaaatatggtgaaagggtgaagaagaatatgactctgtctttcaattcaaccctgccctttctcaagatcatggatgtgaagccagaggacagtggcttctacttctgcgcgatggttgggagtcccatggtagtctttgggacagggacaaagctgactgtggttgatgtccttcctacaactgctccaaccaaaaagactacactgaagaagaaacaatgtccaaccccccacccaaagacccagaaaggcttgacatgtggcctcattaccctcagcctgctggtggcctgcatcctggttctgctggtatccctcagtgtggccatccactttcactgcatgcggaggagagcccggattcacttcatgaaacagtttcacaaatgatccgcgcccacgacactgacagcctgctacaaaggactcaatataaagcaagacctggaccaacgagagacgacgcatttagctcaagctgtctgcctgaactgctgcaagtcctgtgaatggtcaggcacgttacctggagtctcacagagaaggccccagaatccaggctcactcacggagtgtgctgaagaaccaagaactcccaccatgacacccctgtggcttttgtacccttcttggactggaccttggatggcagccttgcagccaccatctttgtaagttgcttggtagggcagcatgactggctttttggcgtctcatgggagagagctaggtggcagccctgcagaagactgcacatcctcacacagagaggccacctcatgaataaggtttcctgcaaacatcttctgggcccttggcagccatcttgctctctcaggccttgctgtggttttgggaagctgttggctcagaagacagacttctacttcatctcctagtaggaaatttcttaagcttcttctccctcgtggcttatatatttcttccctcactctctgtcctttttatgaaaatgtcctggatc

SEQ ID NO: 2943 - DNA, 2497 bp, Rattus norvegicus
ggaatcccgcgccgaacacgggggcgggctgcccgggccatggcgcataaaacctctggccacctgcagggctactgctgckctggccactgtcaggcacacaccttgctgctcggtttctgtcatctctgtggcctccgtcgcctctgtcgccgtcyccttcagktcctgagcccagcgactctcggccgcgcacgcggacatgggcgkcagctccagggcacgctgggtggccttggggctgggcgttctagggctgctgtgtgctgcgctcggcgttatcrtgattctcatggtgccctcgctcatcaarcagcaggtgctcaagaatgtccgcatagaccccagcagcctgtcctttgggatgtggaaggagatccctgttcccttctacttgtccgtctacttcttcgaggtggtcaaccccagcgaggtcctaaatggccagaagccagtagtccgggagcgcggaccctatgtctacagggagttcagacaaaaggttaacatcaccttcaatgacaatgacacggtgtcctacatagagaaccgaagccttcrtttccagccagacaggtcccagggctcagagagtgactacattgtactgcctaacatcctggtcctgggaggggcagtgatgatggaggacaagcccacaagcctgaagctgctaatgaccttggggttggtcaccatgggccagcgggcctttatgaaccgcacggttggtgagatcctgtggggctaygargatccsttygtgaatttcctcagcaaatatttcccagacatgttccccatcaaaggcaaatttggcctgttcgttgggatgaacsactcgagttctggcgtcttcaccgtcttcacaggtgtccagaatttcagcaagatccatctggtggataagtggaacggcctcagcgaggtcaamtattggcattcggaacagtgcaacatgatcaatggtactgccgggcagatgtgggcaccattcatsacacccraatcctcactggaattcttcagcccagaagcctgcagatctatgaagctcacctaccaggaatcaagggtgttcgaaggcatccccacttatcgcttcacggcccccgatactttgtttgccaacgggtccgtctacccacctaatgaaggcttctgcccgtgccgcgagtccggcattcagaatgtcagcacctgcaggtttggtgcgcccctgtttctctcccagccccacttctacaatgctgaccccgtgctgtcagaagctgttcttggtctgaaccctgacccaarggagcattcyttgttcctwgacatccacccggtcmctgggatccccatgaactgttccgtgaagatgcagctgagtctgtacakcaaatccgtcaagggcgtcgggcaaacagggaagatcgagccagtagtcctgccattgctgtggttcgaacagagcgggatgatgggtggcaagaccctgaacacgttctacacgcagctggtgctgatgccccargttcttcactacgcgcagtatgtgctgctggggcttggaggcctcctgctkctggtgcccatcatttaccaactgcgcagccaggagaaatgctttttattttggagtggtagtaaaaagggctcgcaggataaggaggccatgcaggcctactctgagtctctgatgtcaccagctgccaagggcacggtastgcaagaagccaagctgtagggcccagaagacaccacgagccccccaaacctgatagcttggtcagaccagccgcccagtccctacaccccrcttctygaggactctctcagcggacaacccgccagtgccasgtcctgagcccccagatgtcacactgtccmcacggcacatagtgtgcggaaacactcakggaccakggacagacccgctgctgagtagagcctgttgggccacaggcgacctcttctargkgacctgtgagccaggcygwgggaactgtagctgcccctcctgtaggagctggcsccsccggggytcctgactttctccgtctttytccagcaggctgaaagccttagttcccacagaggacmcagatctgtcactcytaggggctgggcaaacatsggcmkmwtksgkcacgrskggacaagcagttccagatyctgaccagtytgcacacacactctggcgctgwatctggcccttytcmtacagtytctgctgtcacctgaacactgaattggccactgtaagtggcarcgktggcaggccccctcagggtccttatttttcaggsgtggggtcaaarararaggtgtgggccgtytacccykggcrcctagtatatctcmccaragggtagggtatacarrggcccagsgtcccmcaatcgaccccttttttttytactggaaragaaattttatcgtcttttgaaagaaagtcatgactgaagcaataaaccttttcmcaaattmmaaaaaaaaaaaaaaaaaaaaa

SEQ ID NO: 2944 - DNA, 10366 bp, Rattus norvegicus
ccgtaattagttaacgtgaatacttttaaatgacgttaagtttttctggttattggctcccaccatatccgctttcgggtgcagtttggttcgaagcacaattataatctctccccatcttcatgataagttctgttcttgccccaaaagatgggcctaagattctttaccaagaacatgaccgttgaatacaaaaggagaccaactttttgggaaatttttaaagcgagatgcagcacagcagatttaggaccaataagcctcaattggtttgaagaacttttttcagaagccccaccatataatactgaacatccagaagaatctgaatataaaccccaaggccatgaaccacagctatttaaaacaccacagaggaatccctcttaccatcagtttgcttcaactccaataatgttcaaagaacaaagtcaaactctaccactagaccagtcacctttcaaagaattagggaatgttgttgcaaatagtaaacgtaaacatcacagcaaaaagaaggccagaaaggaccctgtggtagatgttgccagtctgccgctgaaagcttgtcccagtgaaagcccttgtactccgcgatgcacacaggtggcaccgcagcgaagaaagccagtggtatctggaagtttattctatacaccaaaacttgaggagacaccaaaacatatttctgaaagtctgggagttgaagtggatccggatatgtcttggacaagttcattagctacaccaccaacccttagttccactgtgctcatagcccgagatgaagaagcacacagaaatgcatttccagccgactctcctgctagtttgaaaagctatttttctaaccacaatgaaagtctgaaaaagaatgatagatttattccctctgtgtctgacagtgaaaacaaaagccagcaagaagcttttagtcagggactggagaaaatgttaggggattcatctagcaaaataaatcgcttcagagactgccttagaaaaccaataccaaatgttctagaagatggggagacagctgtagatacttcaggagaagatagtttctcgttatgttttcctaaacgtagaaccagaaatctacagaaaacgagaatgggcaagatgaagaagaaaatcttcagtgaaacaaggactgatggattaagtgaagaagccagaggacaagctgatgataaaaactcatttgcacttgaaattgaaccaagagatagtgagcccttagatccatctgtaacaaaccagaagcccctttacagccagagtggggacatctccagtgaagctggccagtgttcagacagtatatggtctcagccagatccctctggtttaaatggaacccagacaagaaaaatacccctactccatatttcttttcataagcaaagtattttagaagacttcatagatatgaagaaggaaggtactggctctattacttttcctcatatttctagtcttccagaaccagaaaagatgttcagtgaggaaactctggtagacaaggaacatgaaggacagcatcttgagtcacktgaagactccatctcagggaaacaaatggtgtctggaacgagtcaaacagcctgtctctctccgagtatcaggaagtctatagtcaagatgagagagccacttgaagagactttggatactgttttctcagacagtatgaccagctcagcctttacagaagaacttgacgcctctgcagggggactggaaatacatactgcatgctcacagagagaggattctttatgtcctagttcagtggacactggaagctggccaaccactctcactgacacttctgcaactgtgaaaaatgcaggtttaataaccactctcaaaaawaaaaraaraaartttatttactctgtaagtgatgatgcatctcatcaaggaaaaaaactacagacacagagacagtcagagcttactaacctttcagccccgtttgaagcaagtgcttttgaagtaccattcccctttacaaatgtagattcaggtataccagattcttcaatcaaaagaagcaatttaccaaatgatcctgaagagccatctttgtccttgaccaactcttttgtgactgctgccagtaaagaaattagttatattcatgcattgatatctcaggatctaaatgacaaagaagcaatactcagtgaagaaaagccacagccatatacagccctagaagctgactttctgtcgtgcttgccagaaagatcatgtgaaaatgatcaaaaaagtccaaaagtttccgaccgaaaagaaaaagtcttagtctcagcatgtcgtccttcaggaaggcttgcagcagcagtgcagctcagcagcattagctttgactctcaggaaaaccctcttggtagccacaacgtaacaagtactcttaaattaactcccagcccgaagacacctctgtcaaagccagttgtggtttctagagggaaaatgtgtaaaatgccagagaaactgcaatgtaagagttgtaaagataatattgaattaagcaaaaacatccctctgggggttaatgaaatgtgtgtcttaagtgaaaattctgaaacacctgagcttctgccacctctagaatatataacagaagtgtcctcatcagtgaagtcacagttcaatcaaaatacaaaaatagcagtcgtacaaaaggaccaaaaagactcaacttttatttcagaagtaacagtccatatgaattctgaagaacttttcccagaaaaggagaataattttgcttttcaagtaaccaatgaaagcaataaacccaatataggaagtactgtggaattccaggaagaagacctcagccacgcaaaagggcatagtctcaagaactctcccatgacagtagatagagacctagatgatgagcaagcaggccaagtgttgattacagaggactcagattcattagcagtagtccatgattgtacaaagaagagcagaaatactatagagcagcatcagaaaggaactgcagacaaagacttcaagtcaaattcctccttgtatttgaaatcagatgggaacaatgattatttagacaaatggtcggagttcttggatccactcatgaaccataaattgggaggtagcttcagaacagcttccaataaagaaataaaactttcagaggataatgtcaagaaaagcaaaatgttcttcaaagatatcgaagaacagtatcctactagtttagattgtattgacactgttagtaccctacaattagcaaacaagaagagactaagtgaacctcatacatttgatttgaagtcaggtactactgtatctacacagtgtcatagtcaatcatctgtttctcatgaagatactcacacagcacctcagatgttatcttcaaagcaagattttcattcaagtcataacttaacgcccagccaaaaagcagaaattacagaactgtctactatcttggaagaatcaggaagtcagtttgaattcacacagttcaaaaatccaagccacatagcacagaataatacatctgcagtgcttggaaaccagatggctgttgtaaggaccgcttctgaggagtggaaagatgttgatcttcatctcccactgaatccctcctctgtaggtcagatagatcacaacaagaaattcgaatgtttggttggagttaagcaaagctcttctcacctgttagaagacacttgtaaccaaaatacatcttgttttttaccgataaaagaaatggagtttggaggattttgttctgctcttggcacaaaacttagtgtgtctaatgaggctctgagaaaggctatgaaactgttcagtgacattgaaaatattagtgaggagccttctacaaaagtaggaccaagaggattctcttcatgtgcacatcatgattctgttgcttccgtgtttaagataaagaaacaaaacactgataaaagttttgatgagaaatctagtaagtgccaggtaacagtacaaaataataaggaaatgactacctgtattcttgttgatgaaaatcctgaaaattatgtaaagaatataaaacaagataacaactatactggctctcaaagaaatgcttataaattagaaaactctgatgttagtaaatcaagtacaagtggcacagtttatattaataaaggtgacagtgatttaccttttgctgctgaaaaaggcaataagtatcctgagtcatgtacccaatatgtgagggaagaaaatgcacaaattaaggaaagtgtatcagatttaacatgtttggaagtcatgaaagctgaggaaacatgtcatatgaaatcttcagataaagaacaattaccttcagacaagatggaacaaaatatgaaagagtttaatatatcttttcagactgcaagcgggaaaaatatcagagtctccaaagagtcactaaataaaagtgtgaatattttagatcaggaaacagaagacttgactgtcacttcagattctttgaattctaaaattctttgtggcataaataaggacaaaatgcatatttcatgtcacaagaaatcaatcaatattaaaaaggtatttgaagaacatttcccaattggaactgtcagtcaattaccagctcttcagcagtatcctgaatatgaaatagaaagtatcaaagaacctactctgttgagttttcatacagctagtgggaaaaaagtcaaaattatgcaggaatctttggacaaagtgaaaaatctttttgatgagacacagtatgttaggaaaaccaccaattttggtcatcaagaatcaaaacccctgaaggacagagaggactataaagaaagacttacattagcatatgagaaaattgaagtaactgcctcaaaatgtgaagaaatgcagaactttgtctctaagcagactgaaatgctaccccagcaaaatgatcatatgtataggcaaactgaaaatctcacatcaaatggtagctctcccaaagtacatggaaacatagaaaataaaatagaaaagaatcctagaatttgctgtatttgtcagtcctcatactttgtcactgaagattctgctttggcatgttatacgggggacagtagaaaaacttgtgtcggagagtcttctctgtccaaaggcaaaaaatggcttagagaacaaagtgataagcttggaacaagaaatactattgaaatccaatgtgtaaaggaacacactgaagattttgcaggaaatgccttatatgaacatagtttagtcattatcagaactgaaattgatacaagtcatgtctctgaaaaccaagcttcaaccctctttagtgaccctaatgtgtgtcacagctatctatcccattctagtttttgtcatcatgatgatatgcataatgattcaggatatttcttaaaagataaaattgattctgatgtccagccagacatgaagaatactgaaggcaatgccattttccctaaaatatctgctacaaaagaaataaaactacacccacaaactgtaaatgaagagtgtgttcaaaaactggagactaatgcttcaccatatgcaaataaaaatatagccattgactcagctatgctggatttaaggaattgtaaggtaggctcacctgtattcattacaactcattcacaagaaactgtaagaatgaaagagatattcacagataactgtagtaaaatagtcgaacaaaacagggagagtaaaccagacacttgccagacaagctgtcataaagcattggataattcagaggattttatatgtcctagctcttcaggtgatgtctgcataaactcacctatggctattttttatcctcaaagtgaacaaattttacagcataaccaaagtgtgtctggactgaagaaagctgcaacaccacctgttagtttggaaacttgggatacatgtaaatctataagaggatctcctcaggaagtccatccttcacgcacttatggattttttagcacagcaagtggaaaagctgtacaagtatctgatgcttcattggaaaaggcacggcaagtgttttctgagatagatggtgatgctaaacagttagcttccatggtgtcactggaaggtaatgaaaaatcacatcactctgtgaaaagagaaagctctgtggtgcataacacccatggtgtattgtcactccgaaagaccctcccaggcaatgtcagttcatttgtattctctggatttagcaccgcaggtggaaaactggtcacagtttcagaaagtgctttacataaagttaaaggaatgttagaggaatttgatttgatcagaactgaacatactctccagcattcacctacacctgaagacgtatcaaaaatacctcctcaaccttgtcttgaaagcagaaccccagaatactctgtaagctctaaattgcagaaaacctacaatgataaatccaggtcaccaagtaattataaagaaagtggttcttcaggcaatactcaatctcttgaagtttctccccaactctctcagatggagagaaagcaagaaacacagtcggtattaggaacaaaagtgtcccagaggaagactaatatcttggaaaaaaaacaaaacttaccccaaaacataaaaatagaaagtaataaaatggaaacattttctgatgtttccatgaaaacaaatgtaggagagtactactccaaagagccagagaactattttgaaacagaagcagtggaaattgccaaagcttttatggaagatgatgagctgacggattctgaacagactcatgccaaatgctcactgtttgcatgcccccaaaacgaggctttattaaattcgagaactagaaaaagaggaggaatggctggtgttgcagttggacaacccccaattaaaaggagcttattaaatgaatttgacaggataatagaaagtaaaggaaaatccttaacgccttcaaaaagcactccagatggcacaataaaagacagacgattgttcacacaccacatgtctttagagccggttacctgtggacccttctgctcaagtaaagaaaggcaagaaacccagagcccacatgttacctcacctgctcaaggacttcagtctaaggagcatccttcaagacactcagctgtgggaaagtcttcaagcaatcctacagtttctgccctaagatctgaaaggaccagacactcagtctcagacaaatccaccaaagtctttgtcccacctttcaaggtgaaatcacggtttcacagagatgaacattttgatagcaagaatgttaatttggagggaaaaaaccaaaagagcgcagatggagtcagtgaagatgggaacgacagtgactttcctcagtttaacaaagatttaatgtcaagccttcagaatgccagagacctacaggatatacgaattaaaaacaaagaaaggcatcatctctgtccgcagccaggcagtctgtatcttacaaaatcatccaccctgccccggatttctctgcaggccgcagtaggagacagcgttccttctgcctgttctcctaagcagctctatatgtatggcgtttctaaagcatgcataagcgttaacagcaaaaacgctgagtattttcagtttgccattgaggatcactttggtaaagaagctctgtgcgctggcaaaggctttcggttggcagatggtggatggctaatcccctccgatgacgggaaggctgggaaagaagaattttacagggctctgtgtgacactccaggtgtggatccaaagctgatttctagcgtctgggtctctaaccactacaggtggattgtatggaaactggcagctatggaatttgcttttcctaaggaattcgcgaatagatgtctaaacccagagcgagtgctgcttcaactaaaatacagatacgatgtggaaattgacaatagcagcagatcagctctcaagaagatactggaaagggatgatacagcagcaaaaacgcttgtcctctgtgtttctgatatcatttcactaagcacaaatgtgtctgaaacttcaggcagtaaagctagcagtgaggacagtaacaaagtagacacgatcgaactcacagatgggtggtatgctgtcaaggcccagctagaccctccactcctggctctcgtaaagagtgggagactcactgtgggtcagaagatcattactcagggagcagagctggtgggctctcccgatgcctgtgcacctctggaagccccagactcccttaggctaaagatttctgcaaacagcacgcggcctgctcgctggcacagcaagctggggttctttcatgaccccaggcccttccctctgcccttgtcctcactgttcagtgatggaggaaatgttggttgtgtggatgtcatcgttcagagagtgtaccctctacagtgggtggagaagacggtgtctggatcgtacatatttcgtaatgagagagaggaggagaaggaagcgctgagatttgcagaggcccagcagaagaaactagaggccttgttcaccaaagtccacacagagcttaaagagcatgaagaagacatagcccagcggcgtgtgctgtcccgrgcactcacacggcagcaggtccacgctctgcaggacggtgcagagctctatgcagcagtgcaggatgcatcagacccagagcacctggagacttgtttcagcgaagagcagctgagagccttgaacaactacagacaaatgctgagcgataagaaacaagcgcggatccagtcagagttccggaaggccctggaggccgctgagaaagaagagggtttatcaagggacgtctcaactgtgtggaagcttcgtgttacaagctacaagaaaagagaaaaatcagctctgttgagtatctggcgtccatcttcagacttgccctccctgttaacagaaggacagagatacagaatctatcatctttcggtgtcaaaatcgaagaataaatttgagtggcccagcatccagttaacagccacaaagagaactcagtatcaacagctgccggtttccagtgagaccctgctccagctttaccagcccagggagctccttcccttcagcaaactgtcagatccagccttccagccaccttgttctgaagtggatgtagtaggagttgtagtttctgttgtaaaaccaataggtcttgctcctttggtctacttgtcagacgagtgccttcatttattagtggtgaaatttggaatagaccttaatgaagacataaagccacgtgtgcttattgctgcgagcaacctccagtggcggccggagtccacgtcacgagtgccaactttatttgctgggaacttttccgtattctctgccagtccaaaggaggcccactttcaggagagggtcacgaacatgaagcatgctattgagaacatcgacacattttacaaggaggcagaaaagaagcttatacaggtgctgaagggagacagtccaaagtggtccaccccgaacaaagaccccacccgagaaccctacccagcctccacttgctctgcttcagaccttgcttcaggaggtcagttaccgaggagttcacctactgatcagcaaagttatcgaagtcctttatcatgctgcacaccgacggggaaatctacacccctggcccactcagcctggatggcagccaagtcttgtagtggggagaatgagattgaggaccccaagacctgtcgaaaaaaaagggccttggatctcctaagwsggctgcccttaccgccaccgctcagtcctgtmtgcacctttgtctcwcsrgmtgcacagaagkcytttcagccaccacggagctgtggcaccaaatacccaacacctctaaaaaaagagggacccagttccccttggagcagggcgccatttcagaaggccagtggcgtttctctchtggactgtgaytcagtasctgatgaagaacktgccttgctcagtacccaagcccttgtgcctcaytcagtgggagkaagtgaacaagtgtttcmcagtgattccacaaggacagaaggaccytcagccagcacagagkccagaccascawatagatccargagggagtctctgagggactgtagakatgacagcgatgggaaattggctgctgagacagttccagactactcataagtgtccgtgtgtccagacaggaatacacttattgacgcatttgtttactctacagatgctytacctggtaactctttaggattagacttgatcaccacaagaattattttgcatacaaaataaacatagctttgcttttaaaaaaaaaaaaaaaaaa

SEQ ID NO: 2945 - DNA, 1642 bp, Rattus norvegicus
gccctagcgcacatggcggttcttggcatcaccattgccttgctggtgtgggtggccaccctcctcgtcatatccatctggaagmagatctataacagttggaacctgcccccaggacctttccctcttcccatccttgggaacatttttcagctggatttgaaggatatccccaagtctttcaccaagttggcaaagcgcttcgggccagtgttcacactgcaccttggctcaaggcgcatcgtggtcctgcatggctacaaggctgtcaaggaggtgctactgaaccacaagaatgagttttctggacggggggacattcctgtgttccaggagtacaagaacaaggggattattttcaataatgggcccacatggaaggatgtgcggaggttttccctaagcattctccgagactggggaatggggaaacagggtaatgaggcccgcatccaaagggaggcgcaattcctggtggaggagctcaaaaagaccaaaggccagccttttgaccccacatttctgattggctgcgcaccctgcaatgtcattgcggatatcctcttcaacaaacgtttcgactacaatgacaagaagtgtctgaggctcatgagtttgttcaatgaaaacttctacctgctgagcaccccctggatccagctttacaataactttgcggattatctacgatacctacctggaagccatagaaaaatcatgaaaaatgtgtctgaaataaaacagtacacacttgaaaaagccaaggaacaccttcagtcactggacatcaactgcgcccgggatgtgactgactgtctcctcatagagatggagaaggaaaaacacagccaagaacccatgtacacaatggaaaatgtttctgtgactttggccgacctgttctttgcaggaactgagaccaccagcacaactctgagatatgggctcctgatcctcatgmamkasscasaaattgamgagaaacttcatgaasaaattgacagggttattgggccaagccgcgtccctgctgtcagagacasactggatatgccctacatggatgctgtggtgcatgagatccasasattcatcamtcttgycccttccaasmtascccatgaagcaaccagagatactgtgttccaaggatatgtcatccccaagggtayagttgtgattycaamtctgractccctcttawatgacasccatgagtttccasatccagasaagtkkaaacytgagcatttccygawtgaaaatgggaagktcaagtacagtgastatttcaaggcatttthtgcasgaaagcgtgtgtgtgttggagaaggcctggccmgcatggaattgtttctgctcctgtctgctattctgcagcattttaacctgaagtctctggttgaccctaaggatatcgacctcagtcctgtcacagttggctttggcagtatcccaccccaatttaaactctgtgtcattccccgttcatgagacctgaaaacttcctgatatccctyccattgttatcccttaaactatgactgtttttaaaaaacccaagcatatagagttcctatcataaaatgaaaccgaaaaaataaataaamccttgatgawwwrwwaaaaaaaaaaaaaaaaa

SEQ ID NO: 2946 - DNA, 3937 bp, Rattus norvegicus
tgtgtgtgtgtgtgtgtacatgcgcgcgcccgtgtgtgttgggaggggcgggaaggtgattcaagggaccagttcaacacctggagaacaccaacgcttgctggtcggtttagctaccaagaccgagatgcctcgccaattccccaagttgaacatgtccgatttggacgaacatgtccggctgttggcagagaaggtgttcgctaaggtgctccgagaagaggacagcaaagatgttatgtccctgtttactgtccccaaggactgtcccatcggacagaaggaagccaaggagagggagctacagaaggagttggcagagcagaagtctgtggagacagcaaaaagaaagaagagtttcaagatgatccggtcgcagtctatgtccctgcagatgccaacacaagactggaaaggtcctccatctgtcagtccggccatgtctcctacaacccctctggtccttggagctgcttctaagcctgggctggcaccctatgacatgcctgagtatcagcgagccaccatcagtggagattactgtgcagggatcactatggaagactatgaacaggctgccaagagcctggccaaggccctgatgatccgggagaagtatgcacggcttgcctatcaccgcttcccgcggaccacagcccagtacctggctcatcagggggaaagtgtgcctttggaagagggtctcccagacttccaccctcccccactgccccaggaagacccttattgcctggacgatgcgccccccaacctgggctacctggtccgcatgcagggaggtgttctctttgtgtatgacaatcagacgatgttggaacgccaggaaccccacagcctgccctaccctgacctggagacctacatcgtggacatgagccatattctggcactcatcaccgatggccccacgaaaacctattgtcaccggcgactgaactttctggaatccaagtttagccttcatgagatgttaaatgaaatgtcagagttcaaggaattgaagagtaatccccacagagacttttataatgtgagaaaggtagacacacacatccatgcagcggcctgcatgaatcagaagcacctgctgcgtttcatcaagtacacataccagacagagccggacagaactgtggccgagaagctcggccggaagatcaccctgcggcaggtgtttgacagcctgcacatggacccctacgacctcacagtggactcgctggatgttcatgcgggccggcagacatttcacggcttcgacaagttcaactccaagtacaaccctgtgggggccagtgagcttcgggacctgtatttaaaaactgaaaactacctggggggagagtactttgctcgcatggtcaaggaagtggcccgggaattggaggacagcaagtaccagtactcagaaccccggctgtccatctatggtcgcagtcctaaggaatggtctagcctggcccgctggttcattcagcacaaggtctactcgcccaacatgcgttggatcatccaggtgccgcggatctatgatatatttaggtcaaagaaactactgccaagctttgggaagatgctggagaacatcttcctgccccttttccaggctactatcaaccctcaagaccatcgggagcttcacctcttccttaaatacgtgacagggtttgacagcgtggatgatgagtccaagcacagtgaccacatgttctcagacaagagccccagcccagacctctggaccagcgagcagaacccaccctacagttactacctgtactacatgtatgccaacatcatggtgctgaacaacctccgcagggaacgaggcctgagcacattcttgttccgacctcactgtggggaagccggctccatcactcacctagtgtctgccttcctgactgcagacaacatttcccacgggctgctcctcaagaagagtcctgttttgcagtatctctactaccttgctcagattcctattgccatgtctcctctcagcaacaacagcctgtttctggaatattccaagaacccacttcgggaattcctacacaagggattacacgtctctctctctactgatgaccccatgcagttccactacaccaaggaagcgctcatggaggagtacgccatcgcagcccaagtgtggaagttgagtacgtgtgacctgtgtgagattgccaggaacagcgtgctgcagagcggcctctcacatcaggagaagcagaagtttttgggtcagaattattacaaggagggaccggagggcaatgacatccgaaagacaaatgttgcacagatccggatggctttccgctacgagaccctgtgtaacgagctcagctttctgtccgatgccrtgaagtcagaggagatcacagccctggcsgactaggccagcgatccacacacactttcatcttttggtttaatgtcaggtctgctggggctaacggtgcccagatctcaaaccggggcttccgtctgtgacgaggacacctctgaagaaatctcaagctcccagttttggttgcactttatgaacatgctcacttcaykagsgtttctgagccagaggctggctctcttccatggggctctgggagctggcactgtgtacacctgctccttggttgtccgagtctcctgtgattaccaatgtttatatggttggggctgggactttgcaaggctgaatgccaagtgacacaaggcctgtctggtgtctgccacagtcctcccagcagaccctgtasagsarttctcwctttggwawctggctggstgrctgcctgaacccccaccaaagccccttttataaagggctacctagagaaaatacaaagctccctgctgacgattgtgcacttttaaaacagtttttttccctgtgagcacccctccttcctgtctaggtaggaagcccaacgcaccctctgaggtcatcacttctgktattttcctcatctaggaatgagtcatctcaaaccatgttctgtgaacccatctcatggtccactcctaggcctggggaagatacagggygaggttctggggctgktctcacttttttgkttttttaaatgaagscctttgaaaagcataggacctcygctccttttggctctaatgkcctatgattgkagctgtcmccmccttcccccaggagtcagaccagggactgactcctcaggggagtgaaatgtttcaggacatacaggactagagccaagttcctgatccagtcacamccggtccccgactcccctgmttccacmtactattttaggcttcacatattttaatttttttttaaagaatcactgtaacagtgcattttwttttaaagcagatttcttcagaagctatcatggtcccagggaccaggtagagttaagtttaatgtggactctagctttatcagactactcatctttgttamtagtgcctagaacatagtaggtgctcaataaatacatatggrgtaattgaawwamwwwmwmwwwwrrcatctgtatgtacagaatactgaacaatgttcaaagatcttcctaactgttcacaaggcaggaagtcctgtaccatacttagatgaacctaaytgyacctggaagatgctcatgtaactaattacccccgtcctgtgactctgccagccttccagtgytcacacagcgtatggaaggaaccatgtcatgccttactaggcaaataaacataccaccctacatagctgattatgaaaccgaatgaaacctgtcgttatgagggattatttttgaaaagcctccatttgtatacatttgcccaaacatagcaagtattgtacagtttttcattgtatcaaatacttttttaaagactacaaataaagtctgttaggactgtgammmarwaaaaaaaaaaa

SEQ ID NO: 2947 - DNA, 3177 bp, Rattus norvegicus
ctcgagcagctggcaccaagccacactctgaagagggacatcaggtaagagtcccacagcagaggcctaccagtcatcaggactggtggatgcagttgaaagatggtagctgtaagccaccaagcttacccaacatgtacaaaaccctgcattcaatcttcagccagcataaaacaacacggagggccgcacctgcaatctgggtgctcaagaagtagaggcaggaagatctggtaacttaggctagcctgggctatgagatccaggccgttaaatgcagcattcaggagtcagggacaggcagatccctgtgagttcaagggcagcctaatctacaaagtgagttccaggtcagctaaggactacacaataaaaccctgtctcttacaagcaacaacaaaagaagtaaatgctgaaagatggtgtcagatggccctggaattggagttataagtagttgtgagtcaccatgtgggccccgggtactgaacctggttcctctagaagagcatccagtgctctaaagcacctcagtcaccttccccagcactggcggttatttttactgtgttagttgagatgagaagacccactgtgagtgtccccactttatggatggggtcctggaccacataagtggagagagagagagaaagagagagacagacagacaggcagacagagacagagagagacagagagacagggacagagagacagacagagagagtcagacagagacagagacagagacagagagacagagaggcagacagagagagacagagagagagagagagagagagagagagagagagagatgaattcactgctctctgcttcctgatggtggatgttacataaccaatggcttcaagctcctgccacaggcaatgctgatagaagtgtagacagtgggaacctatctcagaggagagatgggatctatcaggaacttggctgggagccacttgtatgacatgttggccaagaatctgacttcattctgcctgtgtcctgagaatttactgaaactgatgtggggatggtaggctaatttgttcctcagagggaaattgtgtgagaagggttaggggtttgagtgcttccgtactgggacttcaagtctttaaaaatgcaaattcacatacaaagaaagctgcagcttaagaatgaagctggggggggtcctcttcccccttgaaaacaatagcttaggagagagtgtgtctcccttgggtcaagaacacaagaacctcacataaacaggggtccaagaagccccgaggcttgcagaagaacctgacagctttctccaaatgtgactggtttggggctcatgaccttctaactatcccctttctctatctctaccttaacccactgccactcctggtcactgcccttgaccaacctgacccttgtgaacatagattctgcagaagggatagtgacattggccacacacctgggtgtataccccacagcctcatttcctcagagtctcatttctcacctgagtgggagactgggtgtgcgagggagaagtcactcatggctgatcagcagctgggaagaggcccttcccacatgtctggtgtctaggcaccctttctctttcactcgtggtgtgggaggggacattggcacctggagatgccccagaaggcattgctgtgtgaccttgtctttgggccaggatgaaaattctatcctaatcagctctcttttgttaaggggctggagttccagaagttccttgccatttaccagcttttagtcatttgaatattggagagtgagcatctttggagctgaaatcttcacagggttttggaggggtggggagtactggaaggtggggcagggtatcagagtggttgcgtgagccacctagctccttctggcctggagatcagtggagaagagaacttgaaagtttgtgtgaaggtcacgtgtggtgatcagaaccatggacagctaccagagtgcccggaagtggtgcagcccggccctacagctagatgcttggtagccgggcagggcctggattacaggttcgaggacactctcccagagaggctggtgatggtgggtgctaactggaagtgtttgtggatgagtcaccccataagccccacacccgccccagggtgggaaaactgggggttcttccctgtcatttccaatacgggtggggcacggtattaaaggccctcaggttttgcatgatagaagggagcaggaaacaaggacctgttagtgtcccccacacactcccaccctagcccagcccatgcctatacaaggcctgcggtttatagcctccacccacaacgaacactccacagaggcacagaggggtgaattctcaggtcctgagctcagcaggcaggaatgtgtctgataaatcagagataaccccacccctactccatgagaagggctggccggacacccagcmcsmggatamarkkyrgmkkswccgwtkcwkwgagrcyakygcwsgsrakytgcytkcggaggcsagaywmgmsmgagcmggacaccwtcgcagstgsytggcccatcacttctgcmrcmtggatctccmgaaggtgstgccccaratgattmtgctcctgcttttccttaatctgtcgccsctgggaggtcactcccatcccctgggaaktcytagccrgtcyccrgmmcrakscacgatgcmgaagctgctgkagctgataagagwaaagtcagaggaaatggytcmkrswcagstctcaaaggaccaaggccstacaaaagaacttctaaaaagagtccttakgtctcaagacagcgccttccgratccaggagagacttcgaaattccaagatggcacatagttyaagctgctttgggcagaagatasaccggatyggcrcagtcagtcrywtgggctgtgacgggctgaggttgttttaggaagacctcctggstgcagactyyggcttytgacthtgcctgcggctyttctttccccagctytgggrccacctytcmagtgahcctgtytmytwawwtsbyymyyymytyayytttatgttgctgattttbyacaagamtgtttyttatyttccagcacaaacttgccmcagtsymmymmmcayagcctattthhtgcttttgrraaarrraaaaaaaaaaaaaaaaa

SEQ ID NO: 2948 - DNA, 707 bp, Rattus norvegicus
catctccgagaggaaggcgaactcgaggagagcgatccggagcagcatggagtcctctgcagatagactagccagggcagcggccctgggccgtgagcacgaggtgcgggcactgctggaagccggggcttcaccaaacgccccgaacactttcggtcgtaccccgatacaggtgatgatgatgggcaacgtcaaagtggcagctctcctgctctcctatggtgcagattcgaactgcgaggaccccaccaccctctcccgaccggtgcacgacgcagcgcgggagggcttcctagacactctggtagtactgcaccaggcaggggcgcggctggatgtgcgcgatgcctggggtcgcctgccgctcgacctggccctagagcggggacatcacgacgtcgtgcggtatttgcggtatctactctcctccgctgggaacgtttcccgggtcaccgacaggcataacttctgctcaagcacgcccaggtgcctaggacttcgaggccaacccccaaagcagcgctaagttaggcctcagccctcctttttctccttggcttcacttctggcaacgcgagactagcatatggctttaaaaaaatacataatgctttttgcaatcacgcggggtgggtggggggaggttagcagagggagggagggacagagtggactattaaaaaaagattaaatactttttaaaaatg

SEQ ID NO: 2949 - DNA, 2554 bp, Rattus norvegicus
ggcaggagtcggatgtagatcgctcctgagttcaattcccagcaaccacacctagccsggmmgmygsacmcgcgkyggckmssmkgsrsgcamarcagctttggmtcgcctgcagggcaagaagactggaagcatgagttcagacascagccaagcggtgatcaccacccctcctcctcccagcatgcctcacaaagagaggtattttgaccgaatcaatgaaagtgatccagaatacctycgagagaggaacatgtctcctgatctacgrsaggactkcarymygryggwgsmgaggargsgrgtcacwmagmtsctgcrswgysmkgcctttcgggaagacctagagtgcctcayccaagaacagmtkaagaaaggscacgacccgrcykrawtkytmbyktwacwkcmkwtckmcgamtacatmatkkvmawctmsttyamyrkwttttcttcacctcccctgagtcttggsatggtcactcctattaatgaccttcctggtgcaracacatcctcgtatgtgaagggagagaagctcactcgttgcraactcgccagcctgtacagactcsymgwkcygwttgggtgggcacatctggcaaatacatacatctcggtacgagtaagtaaggagcaggaccacatcataatcatccccagaggcctcyctttctctgaagccacagcctctgctctggtgaaggtcaacataataggagaagtggtggaccaggggagtactaatttgaaaattgaccaytcaggattcagtccccatgctgcaatctattcaacccgtcccgatgtgaagtgtgtgatacacatccacaccctcgctacagcagctgtgtcttccatgaagtgtgggatccttccaatttcccaagagtctctcatcctgggagatgtagcctattatgactaccaggggtcgcttgakgaggaggaggaaagmmtcgwrcttcagaaagttctgggtccaagctgtaaggtgctggtcctcargaaccatggcgtggtagctcttggagaaacacttgaggaggctttccactacatcttcaatgtacagatggcctgtgagattcaggtgcaggctgtagcaggggcagggggagtggacaatcttctcatactggatcttcagaaatacaaagctttcacccacggtgttgccatgactggaggaggcggtgtgaatatgggttcccatcagaagtggaaagttggcgagattgagtttgaagggctcatgagaaccctggacaacttgggctacagaacaggctacgcatacaggcatcctctagttcgagagaagcctcggcacaagagtgacgtggagatcccagcaactgtgactgcattctcctttgaagatgatagtgtgccactctctcccctcaagtacatggcacagagacagcagcgtgaaaaaacaagatggctgaattctccaaatacatacatgaaagtgaatgtgccggaggagtcccggaacggggaaactagtcccaggaccaaaataacgtggatgaaagcagaggacccctctaaagttagtagtggaacacctatcamrakkgaagatcccaatcagtttgttcctctaaacacgaacccgactgaggtgctggagaagagaaataagattcgggaacagaatcgctatgacctgaagacagcagggccacagtctcagctgctggcggggatcgttgtggacaaaccgccttctaccatgcggtttgaagacgatgatcagggcccaccagcccctcctaacccattcagtcatctcatggaaggagaacttgaagaatatacgaagacaatckagagamagcagcaaggcctggacgaaaaccacgagctgttttccaagagcttcacctctgtggatgtgcctgtcattgtgaatggcaaggacgagatgcacgatgttgaagacgagctcgctcagcgcgtcagcaggctcacgacgagcaccaccatagagaacatcgagatcaccatcaagtccccagacagaactgaagaggtcctgtcacccgatggctcgccttcaaagtcaccatccaagaaaaagaagaaattccgcacaccttcttttctcaaaaaraamaaaaaaaaaggagaaagttgaggcctaagtagtctttctgtaatttgtacattacattgtggcattgcacagttaaataccatattttagttaatcgttaatatacggtggtagagcmtattgggggtatatagcaaactggactttaaaactggaaagaggttttactaaaaggaaaaatattattgaaaactttcaaattcatctctttttatatgtccaaaagtgactgaccttttcagcagtaaactattgcacctttttgctaatgcttctctttacttgctttgacataatgaatgagccgtgaactcagtatcctgtggaaaaatgtgtaaaagttatctgatattgctcttagatgttatgctaattaatgttaaatcacaataaacagtattttaaatataaaaaaaaaaaaaaaaa

SEQ ID NO: 2950 - DNA, 2675 bp, Rattus norvegicus
ctttgaagagatcagtgactctgtaaccttgcaactgcattttgatggttyctttwmacwcgcsgmcttgwamtststcmwckgrtgrmtrgytkmytacttytshdwrgyagcttacaaatgattcgaagtgttgaaactttctgagtctcaatgaactatttctcacacaactcagatactgctgttcatgcatgaattagttgaaccaggccacatagamrgcattgtaattgtacctgtgagttggcaagaagcaagtgctcttccttgattctgctgcacgaggaggagaatgggctgygatckgaactgtgggctcattactggagccrttattggtgctgtcctggctgtgtttggaggcattctcatgccggttggagacctrctcattgagaagacaatcamaagggaagttgtccttgaagaaggaaccattgctttcaaaaactgggtgaaaacgggcaccactgtgtacagacagttttggrtctttgacgtgcaaaacccagaggaagtggcaaagaatagcagcaagatcaaggttawacagagaggtccttacacatacagagttcgytatttagccaaggaaaatataactcaggaccccaakgacagcactgtctcttttgtacaacccaatggagccatctttgarccttcactgtctgttggvacagagaatgacaacttcacagttctcaatctggctgtggcagctgcaccacatatctacacaaactcatttgttcaaggtgtgctcaacagccttatcaaaaagtccaagtcttctatgttccaaacacgaagtttgaaggaactcttgtggggttacaaagatccattcttgagtttggttccatatcctataagtaccacagttggtgtgttttatccttacaataacactgtagatggagtttataaagtttycaatggaaaggataacataagcaaggttgccataattgatacctataaagggaaaaggaatttgtcctattgggaaagttattgcgacatgattaatggcacagatgcagcctcctttccacctyttgktgagaagtctcraacactgaggttcttttcctctgacatttgcaggtccatctatgctgtgtttgaatctgaagtgaaccttaaaggaatccccgtatacagatttgttcttccagccaacgcctttgcctccccactccagaacccagacaaccactgtttctgcactgaaaaagtaatctcaaataactgtacgtcgtatggtgtgctggacattggcaagtgcaaagaaggraarcctgtgtacawttctcttccacatttcctacatgcaagtcytgatgtctcagaacctatcgaaggcttgaatcctamcgaagatgagcataggacatacttggatgtggaacccataactggattcactctacagtttkcmaaacgactgcaggtcaacatactggtcaagccagctagaaaaatagaagcactgaagaatctgaagagaccttacattgtacctatactgtggctaaatgagactgggaccatcggcgatgagaaagcagaaatgttcagaamccaagtgaccgggaaaataaagctcctgggcctggttgagatggtctwacttggtgttggagtagtgatgtttgttgcttttatgatttcatactgtgcttgcagatctaagaatggaaaataagtagtggatgagcctacattatgcactagctacatttttggtaaaaccaatctccaaaacgaagacttaagacatgcttgtttttataaaacacacctatctgtagttgaagaaacggtggtgtgcgcgctctctctcttattgcagatatataytyattyatatattgcaataagccacagcatatttygamaagatyaatatgtcactaagcctatatttttaataaaatcttgtattttgttaagtccatcawmwrmaamwrarwrracttcaatttctgcagaactaattatcttytttggttctgatttactgatttttttttcctgwtgscaaattycaagaatgtatatattctaagaaacgctttgttcctcatcgaagtaaactgttatcatgtytggggtgmccctttcattwatagcaaatgttcytwgtgactgtcagcacatgatatgtcatktattacatcattttaaagatttaaggatgaaaaatgamcaattcacatatgadccattgmwaatatawtgkttaagcctctccctctmtkgtgtccttggcaacaacaaggccaggtatcmcagatattttttctttthactttctwaacacagagcttaatatgttctgttcctcgccatgaaatgmmctatttttagcacattttagctcttkaattttaagtawgttgtcaagttccaggctgcctagctcttttgaaaactgrgtaggwttttytytttywgctcagccacaactaatgtaacttcagagagcwgttatagtgktaaaaratgwaatttwtaataaatggrttatgatatwgaatcttamaaaarmwwraawwrrctttaaatatgtatttgtggtaatatattctgcttttataatcacccmgaaataactggtttctaacattaaagatgttmwtaaattcmaaaaaaaaaaaaaaaaa

SEQ ID NO: 2951 - DNA, 3077 bp, Rattus norvegicus
atatgctcctctcactgcccggtgcaccagcaacatggattgtcacctctccatcctcatcctgttcggctgctgcgtcctcagctgctccagggaactgagtccacagccttccaacgaagttaatctactagattcaaaaacgattcaaggagagctgggctggatctcctacccatcccacgggtgggaagagatcagtggtgttgatgagcattacacaccaatcaggacttaccaggtatgcaatgtcatggatcacagccaaaataattggctgaggacaaactgggtgccgagaaactcagctcagaagatctatgtggagctaaagttcacactgcgggactgtaacagcattccattggttttggggacttgcaaggagacctttaacctgtactacatggagtctgatgatgatcacggtgtcaaattcctagagcatcagtttacaaagattgacaccattgccgctgatgaaagtttcactcaaatggatctcggggaccgcattctaaaactcaacactgagattagagaagtgggaccagtcaataaaaaggggttttatttggcctttcaagatgttggtgcttgtgttgccttggtgtctgtgagagtgtacttcaaaaagtgcccatttacagtgaagaatctggctatgtttccagacacagtgcccatggactcccagtccttggtggaggttaggggctcttgtgtcaataattccaaggaggaggaccctcccaggatgtactgcagtacagaaggtgaatggctggtccccattggcaagtgcacctgcaatgctgggtatgaagaacgagggttcatatgccaagcttgtcggccaggcttctacaaggctttggatggtgttgccaagtgtactaagtgcccaccacacagctcaacccaagaagatggttcaatgaactgcaggtgtgagaataattatttccgggcagaaaaagaccctccatccatggcttgtacccgacctccatccgcaccaagaaatgttatctctaacataaatgagacctcggttatcctggactggagctggcccctggacacaggaggccggaaggatattaccttcaacatcatatgtaaaaaatgtgggtggaatgtcaggcagtgcgagccatgcagccccaacgtccgcttcctccctcgtcagcttggactcaccaacaccacggtgacagtgacagacctcctggcacatactaactacacctttgagattgatgccattaatggagtgtcagagctgagctcgccaccgagacagtttgccgccgtcagcatcacaactaatcaggctgctccatcaccagttatgacaattaagaaagatcggacttccagaaacagtatctctttatcttggcaagaaccagaacatccaaatggaattatacttgactacgaggtcaaatactatgaaaagcaggagcaagagacgagttataccattttgagggcaagaggcacaaatgttactatcagtagcctcaagccagatactacttacgtattccaaatccgagctcgaacagcagcaggatacggaaccaacagccgcaaatttgaatttgaaaatagtccagactccttctccatctctggtgagaacagtcatgtggtgatgattgcgatttcagctgctgtggccatcattgtcctcactgttgtcacctacgttttggtcgggagattttgtggctatcacaagtcaaaacacagttcagatgagaagcgccttcactttgggaatgggcacttaagacttccaggtctcaggacatatgttgatccacatacgtatgaagaccctacacaagcagttcatgagtttgcgaaagaattggatgccaccaacatagccatcgacaaagttgttggagcaggtgaatttggagaagtttgcagtggtcgcttaaagcttccttcaaaaaaagagatttcagtggctatcaagaccctgaaagtgggctacacggagaagcagaggagagactttctaggagaagcaagcatcatgggacagtttgaccaccccaacatcatccgactggaaggagttgtcactaaaagtaagccagtgatgattgtcacagaatacatggagaatggctccctggacagtttcttacgtaaacatgatgcccagtttacagtcatccagctcgtgggaatgctccgtgggatagcatctggtatgaagtacctctcagatatgggctatgtccaccgcgaccttgctgctcgaaacatcttgatcaacagtaacttggtgtgcaaagtctctgacttcggactttctcgagtgttggaagatgaccctgaagctgcttacaccaccagaggaggaaagataccagtaaggtggacatcaccagaagcaactgcctaccgcaagttcacatcagccagcgatgtatggagttacgggattgtactctgggaagtgatgtcttacggagaaaggccgtattgggagatgtccaatcaggatgttattaaggccgtggatgagggttatcgcctgccacttcccatggactgcccagctgccctgtatcagttgatgttggactgctggcagaaagacaggaacaacagacccaagtttgagcagatcgtcagcattctggacaagctcatccggaatccaggcagtctgaagatcatcacaagcgcggctgcaaggccatcaaaccttcttctggaccaaagcaatgtcgatattgctacgttccacacaacaggtgattggcttaacggtatgaggacagcacactgtaaggaaatcttcacgggtgtggagtacagctcctgtgacaccattgccaagatctccacagatgacatgaaaaaggttggtgttactgtggttgggccacagaagaagatcatcagttccattaaagctctagaaacacaatctaagaatggtccagttcccgtgtaaagtactggaaggatgtgaggaaagggaagatgcagcgtcatccagcaaacagatagaaatggtggagatgctgcagaagctccaagtc

SEQ ID NO: 2952 - DNA, 1941 bp, Rattus norvegicus
caggatccgtgtggtccccttgtcataggctggagatctcgctgtcccccaagcctgtagccttctatcatgtgcctctatgctctgatcctggtgtttcttgcagcattcacagcagggggacacccatcgtcactacccgtagtggacaccctgcaaggcaaagtcctcgggaagtacgtcagcttagaaggattcacacagcctgtggccgtcttcctgggagtcccctttgccaagccccctctcggatctctgaggtttgctccaccacagcctgcagagccctggagcttcgtaaagaacaccacctcctaccctcctatgtgctcccaagaccccgtggcagggcaaatagtcaatgaccttctaactaactgggaagagaacatttctctccagttttctgaagactgtctctacctaaatatttacacgcctgctgacttgacaaaacgtgatagactgccggtgatggtgtggatccatggaggtggactagtgttaggtggggcatccacctatgatggactagccctgtctactcatgaaaatgtggtggtagtggtcattcaataccgtctgggtatttggggattcttcagcacaggggatgaacacagccggggcaactggggtcacttggaccaggtggctgcactgcactgggtccaggacaacattgacaactttggaggggacccaggctctgtgaccatctttggagagtcagcaggaggtgaaagtgtctctgttcttgtgttgtctcccttggccaagaatctctttcacaaggccatttccgaaagtggcgtggccctcactgcaggcctggtcaagaagaacaccaggcccttggctgagaaaattgctgttgtatctggttgtaaaagcacaacttcagcttccatggttcactgccttcgccagaagacagaggaagagctcttggagaccacactaaaattgaatcttttttcgctggatttgcacggagactccaggcagagctatccgtttgttcccactgtgcttgatggagtggtgctgccaaagatgcctgaggagatcctggctgagaaggacttcaacactgtgccctacatcgtgggaatcaacaagcaagagtttggctggattctgccaacaatgatgaactatccaccctctgatatgaaattggacccgatgacagccacatcgctcttgaagaagtcttcttttcttcttaaccttcctgaagaagcaattccagtggccgttgagaagtatttaagacacacagatgacccagacagaaataaagaccaacttctggaattgattggggatgtgatcttcggtgtcccatcagtgattgtctcccgtggacatagagatgctggagcccgcacatacatgtacgagtttcaatatcgcccaagcttctcatcaaaaatgaaaccaagtacggtggtaggagatcatggagacgaaatctactctgtctttggtgctccaattttaagaggtggtacctcaaaagaggagatcaatctcagcaagatgatgatgaaattctgggcaaactttgctaggaatgggaatcccaatggacagggcctgccccattggccagagtatgaccaaaaggaaggttatcttcagattggagccaccactcaacaagcccagaagctaaaagaaaaagaagtggctttctggtctgagcttctggctatgaagccactgcrtgcaggacacactgagctatgaacgggagctctgccagcctcatcctcagggcagctcacatggaagatggttttggccaaggctttgaggagacttcagaactgtgtggtgggagtgggcagaggccagggagaggatatttgcacatgtggactcaaactgaaaaataaattttsttttataaawmaaaaaaaaaaaaaaaaaaaa

SEQ ID NO: 2953 - DNA, 3074 bp, Rattus norvegicus
ggggcgcgggtcacgggaacgctgccgggctgccggctgttcttgtggagtttggtcctcagtgggccatggccaacgtttctaagaaagtgtcttggtccggccgagatcgcgatgacgaggagggggcgccgctgcttcgaaggacggggcaacctgacgaggagacgccgctgctgaacggagccgggccgggcgcgcgccagtctcattctgcacttttccgaattggacagatgaacaacgtggagctggatgatgaactcctggacccggaagtggaccctcctcacaccttccccaaggagattccacacaacgagaagctcctctccctcaagtatgagagcctggactatgacaatagtgagaatcagctcttcctggaggaggaaagacgaatcaaccacacggctttccggacagtggagatcaagcgctgggttatctgtgccctcattggaatcctcacaggcctagtagcctgcttcattgacattgtagtggagaacctggcaggcctcaagtaccgagtcatcaaggacaacatcgacaagttcacagagaagggcggcctgtccttctccctcctgctgtgggccacactgaactctgccttcgtgctcgtggggtctgtgattgtggccttcatagagccagttgctgctggcagcggaatccctcagatcaagtgcttcctcaatggggtgaagatcccccacgtggtgcggctcaagacgctggtgatcaaggtgtctggcgtgattctgtctgtggtagggggactggctgtgggaaaggaagggccaatgatccactcaggatccgtgattgctgcagggatttcacagggaaggtcgacgtcactcaagcgagattttaagatctttgaatatttccgcagagatacagagaagcgggattttgtctcagctggagctgcagctggagtgtctgctgcgtttggagcacctgtgggtggggtcctgttcagcctggaagagggcgcctccttctggaatcagttcctgacatggagaattttctttgcttccatgatttcgacctttacactgaattttgttctgagcatctaccatggaaacatgtgggacctgtccagccctggcctcataaattttggaagattcgactcagagaaaatggcctacacaatccatgagattcctgtcttcatcgccatgggtgtggtgggtggcattcttggagccgtgttcaatgccttgaattactggctaactatgtttcgaatcaggtacatccaccggccctgcctccaagtgattgaggccatgctggtggcagctgtcacagccacagttgcatttgtcttgatttactcgtctcgagattgccagcccctgcaggggagctccatgtcctacccactccagctcttctgtgcagatggcgaatacaactcaatggccgcagccttctttaacacccctgagaagagcgtcgtcagcctgttccacgacccaccaggctcctataatcccatgactctcggcctgttcaccctggtctacttcttcctggcctgctggacctatggcctcacagtatctgctggtgtcttcatcccatccctgctcattggggctgcctggggccgactctttggcatctccatgtcctacctcacaggagcagcgatctgggcagatccgggtaaatacgccctgatgggagctgctgctcagcttggtgggatcgtgaggatgacccttagcctgacagtcatcatgatggaggccaccagcaacgtgacctacggttttcccatcatgttggtgctgatgactgccaagattgtgggtgatgtcttcattgagggcctctatgacatgcacatccagctgcaaagtgtgcccttcctacactgggaagccccggtcacctcacattcgctcactgccagggaagtaatgagcacgcctgtgacctgcctgaggaggagagagaaggttggcatcatcgtggatgtcctaagtgacacagcgtctaatcacaatgggttccctgtggtggaggatgtaggagacacccagccagccagactccaaggcctaatcctgcgttcccagctcatcgtgctcctgaagcacaaggtgtttgtggagaggtccaacatgggtttggtgcagcggagactgaggctgaaagactttcgcgatgcctacccacgcttccccccaatccagtccatccacgtatcccaggatgagcgggagtgcaccatggacctttctgagttcatgaacccttctccctacactgtgccacaggaggcatctcttcctcgagtgttcaagctgttccgggctctgggcctgaggcacctggtcgtagtagacaaccacaatcaggtggtcggsctggtgaccaggaaggacstagcaagatacckcctaggaaaaggaggcctagaagagctttcactggcccagacgtgaggkctggcccccacccttgggcagcggcaccccggcccytctgcacctcctcccagggtccctggtctcagccaaagccttgccctgggcagtgcagcaacaggagcaaatgccctccccgggcttggctggtgtggggcccagaccctttgtcctgggcagktggtttacatcatcagcatttccctattccctgaacctgcagtcctcagacttgtcccactcctgggtcccttctcccaggatgtaaagtgtgttttcacaccccttgtggctcacttctgagagccaatagagactcgtgtatgtgagagagacagacagacagacaggcaagcagcaggcgagagctactatttactgmtgttkkwgckcygcctctgagcacctatcctgtgtctgtactgctcaaaacagccaggggcttcagcagaaagggtgtgaggagctatgcagcctggagcaggctctgtcagggaacccacgtgtgccccacatgccgtctgtgtctttgtccaaaagacagggactggttctatgcctggggcttgtgatctgaagatcacatgaagactgaattggaattcaccaaca

SEQ ID NO: 2954 - DNA, 2955 bp, Rattus norvegicus
ggasckaggagccattcccagccgcagcagaccccaatctagagtgagagtcattgctcagtccactgtgctcctgcsygsccgcctttctgctaagcattggggtctattttggcccagcttctgaagaggctgtgtgtgccgttggaggaactgtactgagtggctttgcagggtgacagcatggagtccctctttcctgctccatactgggaggtcttgtatggcagccactttcaagggaacctgtccctcctaaatgagaccgtaccccaccacctgctcctcaatgctagtcacagcgccttcctgccccttggactcaaggtcaccatcgtggggctctacttggctgtgtgcatcggggggctcctggggaactgcctcgtcatgtatgtcatcctcaggcacaccaagatgaagacagctaccaacatttacatatttaatctggcactggctgataccctggtcttgctaacactgcccttccagsgsacagacatcctactgggcttctggccatttgggaatgcactctgcaagactgtcattgctatcgactactacaacatgtttaccagcacttttactctgaccgccatgagcgtagaccgctatgtggctatctgccaccctatccgtgcccttgatgttcggacatccagcaaagcccaggctgttaatgtggccatatgggccctggcttcagtggttggtgttcctgttgccatcatgggttcagcacaagtggaagatgaagagatcgagtgcctggtggagatccctgcccctcaggactattggggccctgtattcgccatctgcatcttccttttttccttcatcatccctgtsstgatcatctctgtctgctacagcctcatgattcgacgacttcgtggtgtccgtctgcttycaggctcccgggagaaggaccgaaacctgcggcgtatcactcgactggtgctggtagtggtggctgtgtttgtgggctgctggacgcctgtgcaggtgtttgtcctggttcaaggactgggtgttcagccaggtagtgagactgcagttgccatcctgcgcttctgcacagccctgggctatgtcaacagttgtctcaatcccattctctatgctttcctggatgagaacttcaaggcctgctttagaaagttctgctgtgcttcatccctgcaccgggagatgcaggtttctgatcgtgtgcggagcattgccaaggatgttggccttggttgcaagacttctgagacagtaccacggccagcatgactaggcgtggacctgcccatggtgcctgtcagcccacagagcccatctacacccaacacggagctcacacaggtcactgctctctaggttgaccctgaaccttgagcatctggagccttgaatggcttttcttttggatcaggatgctcagtcctagaggaagaccttttagcaccatgggacaggtcaaagcatcaaggtggtctccatggcctctgtcagattaagttccctccctggtataggaccagagaggaccaaaggaactgaatagaaacatccacaacacagtggacatgcctggtgagcccatgtaggtattcatgcttcacttgactcttctctggcttctccctgctgccctggctctagctgggctcaacctgaggtattgtagtggtcatgtagtcactcttgtgactacatgttgtgtgctgttgctctcggcctttcagtatttccacaggactgctgaacatacctggtattgcagtggggagcattaattttcttttaaagtgagactggcccttaagcttggcgttgccttggagcgtcttctacttctgacttcactgatgcagtcagattacccgagggtgagcatcagtggtttcttggatggctgttttctgaagattcttcccatccagtacatggagtctatgaaggggagtcacaattcatctggtactgccactacctgctctataatcctgggctatcttcttggcaagatgacagtgggggagacaagacacagagcttccctaaggctctttccctccaaaaccactgtgaactcttatcctacagactgttcggcaagcactgcttctaggtgtgtgggaggtaatcaggagaaagctttgtggcctctgtaggctgctcacaacatggaggcaccacatgctggtcttgcctgcttagtacaggcaggacagagcagaatatgctctctctcgattctctacaaactccctcagttctccagcagagtctcttttacttgctatcagaggtcaggagttgtactgctagaagcatacttgtagcttgggaagagtggcagtcaggatgtgttctactctatatccacagtgaccacctgyttmatatatagggttaggacatatstragtaaggcctgagtgtgctgccaaattggaggttggyatgagagctgatgcctaaagtggctcatttgcaaggactattatggtytggaatagcaatggggggcatgggaagaagagtctataccttggagatmtatttgatggttcacagaagaggttttstamacgccctttctatgggtcagatatcaaaataccagcaacgttggatagattytgaccttttactgrgacctcggtcagatgstytcatgtcatgcagagaacstaggctggttcctgtgtcagagagacctggrcttmtggggagkccagggttcttcckwtracacktgtgcgggagccrttasctctagagttktcktgstaatgctaagaaactwtgtgaawttgtatatctktatgtawttaagcatgcaacargtgtcatktccatkcatgtagctagccctgarcctgcctstggggtaatgaaggastkctcatmatamacacttwtccwgtgammarwaaaaaaaaaaaaaaaaaa

SEQ ID NO: 2955 - DNA, 1433 bp, Rattus norvegicus
gaattcctgtcacttccattcaagagcctacaagaacctaactaggtgcttgggatcccctgagatccagctgaccatgacccgggatgaggccctccctgactctcattctgcacagaatttctatgagaactacgagcccaaggagatcctgggcaggggagtcagcagcgtggtcaggagatgcattcacaaacctacgtgccaagaatacgcagtaaaaatcatcgacatcaccggcggaggaagctttagctccgaggaggtacaggagcttcgggaagccaccctgaaggaggtggacattctgcagaaggtctcaggacaccccaacatcatacagctgaaggacacttacgagaccaacactttcttcttcttggtatttgatctgatgaagagaggggaactctttgactatctcacagagaaggtcaccttgactgagaaggaaaccagaaagatcatgcgggccctgctggaggtggtctgcaccttgcacaaactcaacattgtccatcgggacctgaagccggagaacatccttctggatgacaacatgaacatcaagctcactgacttcgggttttcctgccagctgcagccaggagagaagctccgagaggtttgtgggactcccagttatctggcccccgaaatcatccagtgctccatggacgaaggccatcctggctatggaaaggaggtggacatgtggagcacaggagtcatcatgtatacgctgctggctggctccccgcccttctggcaccggaagcaaatgctaatgttgaggatgatcatggatggcaaataccagttcggctcaccagagtgggatgactactcagataccgtgaaagacttggtatctcgcttcttggtggtgcaaccccaggaccgctgctcggcggaagaggccttggcgcatcctttcttccaggagtacgtggtggaagaggtgcggcacttcagccctcgagggaagttcaaggtcatctgtctaactgtgctggcctcggtaaggatctactaccagtaccgtcgggtgaagccggtaaccagggagatcgtcatccgagacccctacgccytacggccattgcgcagactcatcgacgcmtatgcttwccgcatctacggccactgggtgaagaaagggcaacagcagaacagagctgccctcttcgagaacacgcccaaggcagtgctcctctccttggctgaggaggaggacttctgaggggtggcggggcacaggggagaaagcaaacaggktacgcgcccccagaactgtgagaagaggatgcctcaaggaggaggcttctgcaaaggagctgtgaccctactctgcactckcaaaggctcgccaytagatgcgggmrttcccattaaacagcagtattaatagctggaaaaaaaaaaaaaaaaaa

SEQ ID NO: 2956 - DNA, 1548 bp, Rattus norvegicus
ctgcagagcaccatttctccaagttgggggctcagagggagccatcatgagcgatgttaccatcgttaaagaagactgggttcagaagaggggagaatatataaaaaattggaggccaagatacttccttttgaagacagacggctcattcataggctataaagagaaacctcaagatgtggacttaccttatcccctcaacaacttctcagtggcaaaatgtcaattaatgaaaacagaacgaccaaagccaaatacatttattatcagatgtcttcagtggaccactgttatagagagaacatttcatgtagatactccagaggaaagagaagaatggacagaagctatccaagctgtagccgatcgactgcagaggcaagaagaggagaggatgaattgtagtccaacgtcacagattgataatattggagaggaagagatggatgcatctacaacccatcataaaagaaagacaatgaatgattttgactatttgaaactgctaggtaaaggcacttttgggaaggttattttggttcgagagaaggcaagtggaaaatactacgctatgaagattctgaagaaagaagtcattatcgcaaaggatgaagtggcacatactctgactgagagcagagttctaaagaacaccagacatccatttctaacatccttgaaatattccttccagacaaaagaccgtttgtgttttgtgatggaatatgttaatgggggagagctgtttttccatttgtcgagagagcgggtgttctctgaggaccgcacacgtttctatggtgcagaaattgtctctgctttggactatctacattctggaaagattgtgtaccgagatctcaagttggagaatttgatgctagataaggatggccatataaaaattacggattttggactttgcaaagaagggatcacagatgcagctaccatgaagacattctgtggtacaccagagtatctggcaccagaggtattagaagataatgactatggccgagctgtggactggtggggcctaggtgttgtcatgtatgaaatgatgtgtgggaggttgcctttctacaaccaggatcatgagaaactctttgaactaatactcatggaagacatcaaattcccccgaacactctcttcagatgcaaagtcattgctttcagggctcttgataaaggatccaaataaacgccttggtggagggccagatgatccaaaagagataatgaggcacagtttcttttctggagtaaactggcaggacgtatatgacaaaaagcttgtacctccttttaagcctcaagtaacatctgagacagacaccagatatttcgatgaagaatttacagctcagactattacaataacaccacctgaaaagtgtccactataaaataagattaattgatttggaccaatctggttcaatttcaggaagacttgcattatcttagtgttcttcataaggacattccaatataatttatttaattggaaatatctcttggatatatctatttattctacctc

SEQ ID NO: 2957 - DNA, 4183 bp, Rattus norvegicus
cggccgccgccattttatttgaccacagggggagcgagcgggagcgatcggaacccagtgagaggggccggtctgmgtctctcctgaccctgccgccgcgctgttgcggttctgaggtgaagctttcctcctgcggaggggcgcggagccatgtacatcaagcaggtgrkkmtsswgkscttccgmastyacsgmsatsarasrmkkgkwgrkcysttcagttcaaaacataatgttattgtgggcagaaatggatctggaaaaagcaactttttttatgcaatccagtttgttctcagtgatgaatttagtcatcttcgtccagagcagcgattggctttgttgcacgagggtacaggtcctcgtgttatttctgcttttgtggaaatcatttttgacaattcagacaaccggttaccaattgataaagaggaarkttcgcttcgaagagttattggtgccaaaaaagatcagtatttcctagatwagaagawggtcacgaaaaatgatgtgatgaatctccttgaaagtgctgggttttcgagaagtaatccttattacattgttaaacaaggaaagatcaaccaaatggcaacagcaccggattctcagagattaaagctgttgagagaagtagctggcactcgagtgtatgacgagcgcaaagaggaaagcatctccctgatgaaagaaacagagggcaaacgggaaaagatcaatgagttgttaaaatacattgaagagcgattacatactctagaggaggagaaggaggaactgscccagtatcagaagtgggataaaatgaggcgtgccctggagtacaccatctacmmccaggagctcaacgagactcgcsccaagcttgatgagctttctgytaagcgagaaacaagcggagagaaatccagacaattaagagatgcccagcaggatgcaagagataaaatggaggatattgagcgccaagttagagaactgaaaacaawaatttcagccatgaaagaagaaaaagawcagctcagtgcggagagacaagmgcagattaagcaaaggaccaagctggagcykrmmgcmaaggacttacaggatgagctggcagggaacagtgagcagcggaaacgtttmttaaaagaaagacagaagctgcttgaaaaaawagaagaaaagcagaaasmmctsgyrgaaacagaaccgaaattcaacagcgtaaaggaaaaagaagagcgaggaattgctagattggctcaagctacacaggaaagaactgatctttatgcaaagcagggtcgaggaagccagtttacatcaaaaraaraaararawaagtggattaagaaggaactgaagtctttagatcaggctattaatgataagaaaagacagattgctgctatacacaaggatttggaggataccgaggccaataaagagaaaaatctggagcaatataataaactggatcaggatctcaatgaagtcaaagctcsagttgaagaactggacagaaaatawtmykmagtgmmraataagaaagatgaactacaaagtgaaagaaattacttgtggagagaggagaatgcagaacagcaagcacttgccgctaagagagaagaccttgagaagaagcagcagcttcttagagcggcaacaggaaaggccattttaaatggaatcgacagcattaacaaagtgttagaccatttccggcggaagggtataaaccagcatgtgcaaaatggctaccatggcatcgtgatgaataactttgagtgcgaaccagctttctatacttgtgtggaagtcactgccggtaacaggttattctatcacattgtcgattcagatgaagtcagcacgaagatattaatggagttcaataaaatgaatcttcctggagaggtgactttcctgcctcttaacaagttagatgtgagggacactgcctatcctgaaactaacgatgctattcctatgatcagtaagctgaggtacaatcccagattcgacaaagctttcaaacatgtgtttggaaagacactcatctgtcggagcatggaggtttccactcagctagctcgtgccttcactatggactgcattactctggaaggtgatcaagtcagccatcgaggtgctctgactggaggctattacgacacaagaaagtctcgccttgagttacagaaggatgttaggaaagcagaggaggagctgggtgagctcgaagctaagctcaatgaaaacctgcgcagaaacattgaaaggattaataatgaaattgatcaattgatgaaccaaatgcagcagatagagacccaacagagaaaatttaaagcatccagagatagcaccttatcagagatgaagatgctaaaagagaagagacagcagtcagaaaagaccttcatgccaaagcaacgcagtttgcagagtctggaggccagtctgcacgctatggagtcgaccagagagtcgctgaaggcagagctagggacagatttgccctctcagctcagcctggaagaccagaaaagagtcgacgcactgaatgacgagatccggcagcttcagcagaaaaacagacagctgctgaatgaaagaattaaactagaaggcattattactcgagtagagacttacctcaatgagaatctgaggaaacgtctggaccaagtagagcaggaacttaatgaactgagagagacagaaggtggcactgttcttactgccaccacgtcacaacttgaagctattaataaaagagtgaaagatactatggcaagatcagaagatttggataattccattgacaaaacagaagctggaattaaagagctccagaaaagcatggagcgctggaagaacatggagaaggagcacatggatgccataaatcacgacactaaagagctggagaagatgaccaaccgacagggcatgctgttgaagaagaaagaggagtgcatgaagaagatccgagagctggggtcccttccccaggaagcatttgaaaagtaccagacactgagcctgaagcagttgtttcggaaacttgagcagtgcaacacagagttgaagaagtacagccatgtcaacaagaaggctctggaccagtttgtgaatttctctgagcagaaggagaaactgataaagcgacaggaagaattggacaggggctacaagtcaatcatggagttgatgaatgtactcgaacttagaaaatatgaagctatccagttaaccttcaaacaggtatctaagaactttagtgaagttttccagaagttggtacctggggcaaaagcgaccttggtgatgaagaaaggagacgtggagggcagccagtctcaggacgaaggagaggggagcggcgagagcgagaggggctctgggtcacaaagcagcgttccatcagttgaccagttcacaggagtcgggatcagggtatcatttacaggaaagcaaggcgagatgagagaaatgcagcagctttcaggagggcagaagtctctggtagcccttgctctcatttttgccattcagaagtgtgaccctgctcctttctacctgywygakgagatcgaccaagctttggatgctcagcacagaaaagctgtgtcagatatgattatggaactagctgtacacgcccagtttatcactaccacttttaggcctgaactgcttgagtctgctgataaatyctmcgggaagtcagaataaggtagtcacatcgacgtgatcacagcaagagatggccaaagactttgtagaagacgrymcsasgcatggttaactgaaagataacgcctgccgtcttggaagatgtgtatagtaatgtggtccgtacctgggaacgtaaattttaaaaataataattggttattactgagtttttggatttagaatacacagtccttttatacttgtctttgtattttataagctcccctgtaatgttacatttctacgtatagtcgaggrattttatttcmtacacgacwwwwwgtaagtgtcctcctattttaaawcytttgagrttctaaatattcccmattattttatagcttcyattwaataattggtttgtgmmtaacttagtgtaaatgtggccttttgtctttgtaattgttagaaacattcrrtrrrtattttgcwtaagaaaaaaaaaaaaaaaaaa

SEQ ID NO: 2958 - DNA, 2186 bp, Rattus norvegicus
atgcacgcgtccgcctgagctgagcgcgctgccttcagcagcatttggagccctgtgggtgaagcctcaggaacagctgcctccagggaccatgtcgaccgtggatgatattctagaacatataggggaattccacctttttcagaaacaaacatttttcctcttagctctgctgtctggtgccttcacccccatctacgtgggcatcgttttcctaggatttacccctgaccaccactgctggagtcctggggcagccaagctgagccagcggtgtggctggagccaggcagaggagctgaactacaccgtgccgggtctgggaccttcggacgaggcctccttcctcagycagtgcatgaggtatgaagtggactggaaccagagcacccttgactgtgtggacccactgtccagcctggctgcggacaggaaccagttgccattgggcccctgcgagcatggctgggtatacaacactcccggctcctccattgtcactgagtttaacctggtgtgtgctcactcctggatgctggacctgtttcagtcagtagtgaacgtggggtttttcatcggtgctatgatgattggctacctagcggacaggtttggccggaagttctgcctcttggtcaccatcctcatcaatgctatctctggggctctcatggcgatttctcccaactatgcctggatgttggtgtttcgctttctccagggactggtcagcaaagcaggctggttaattggctacatcctgattacagaatttgttgggctgggctatcgcagaatggtggggatttgctatcaaatcgccttcaccgttggcctcctgatcctggctggagtggcctatgtgattcccaactggagatggctacaatttgctgtgactctgcccaacttctgcttcctgctctatttctggtgcataccggaatctccaagatggctgatctcccagaacaaaatcgtaaaagccatgaagataattaaacatattgctaagaaaaawrraaarwmrrwrccggtctctcttcagaacctgacaccagatgaggacgctggcaagaaattgaamccttcawtcctggacttggtcagaacccctcagataaggaaacacacgttgatcttgatgtacaattggttcacgagctctgttctctaccagggcctcatcatgcacatgggccttgcaggggacaacatctacctggatttcttctactccgccctggtggagtttccagccgccttcatcatcatcctcaccatcgaccgggttggtcgccgctatccctgggctgtgtcaaatatggtggcaggagcagcctgtctagcctctgtttttatccctgatgatctacagtggctgaaaattaccattgcatgcttgggtagaatgggcatcaccatggcctatgaaatggtctgcctggtcaatgctgagctgtaccccacatacatcaggaatcttggtgtccttgtctgctcctccatgtgtgacattggcggcatcatcacgcctttcctcgtctaccgtctcacggacatctggatggagttcccactggttgtatttgctgtggttggccttgtcgctggggcacttgtgctgttgctacctgagaccaaagggaargctctgcctgagaccatcgaggatgccgagaatatgcagaggccaagaaaaaaagaaagaaaagagaatttacctccaagtcaagcaagcagaccgtccgctaagctaaaaagaaagggcatcattgctgctggagctgactttgctctctctgaggccagagatggagcttctctctcccctccccccaaacccacacaaaccaacctcacttacccctgaactccatcagcaagagctgtagcttgcacggtctgttgcactgatgtgtcaagctcttcctcccagccaggattttccgcctcactctgctctcagcactcccaggaaatgaccattgctttactggattcgttatggttgttttttcatctttacattctttatttagtttccttctccaccacaacatcaaaccaaaatacccaagggagctgtgggccaggacaaccaactattaaagaagtaagaaatctgaaaaaacaataaacgtgggagaagagawwwwmaaaaaaaaaaaaaaaaaaaaaaaaaa

SEQ ID NO: 2959 - DNA, 555 bp, Rattus norvegicus
ccctsgccaagrtgaaactccttytgctggctgctttgctcacagcaggcgttactgcacacagcatcagcactcgggctgtgtggcagttcsgcaatatgatcaagtgcaccatccccgggagtgatcccctgagggagtacaacaactacggctgctactgtggcttggscggytcaggcaccccagtggacgacttagacaggtgctgccagrcwcakgaccactgmtacaatcaggccaagaagctgraaagctgtaaattcctcatygacaacccstacaccaacacgtamtcatacaagtgsymcgrgracgtgatcacmtgcagsgamaaaaacaacgactgtkaragcttcatctgcaactgtgaccggcaggccgccathtgtttytccaaggtcccmtacaacaaggaatacaaagaccttgacaccaaraaacactgttaggctgtcaccccacttcctgthtatgccgtccccgctccccttgctgtcttattthtgcaccgcaccctbtaataaagtaccagcagaaagaaaaaaaaaaaaa

SEQ ID NO: 2960 - DNA, 3272 bp, Rattus norvegicus
gcggccgcagctgccgggagatgcgagcgcagaccggattgtgatcacctttccctcttcgggctgtaagagagcgagacaagccaccgaagcgaggccactccagagccggcagcggagggacccgggacactagagcagctccgagccactccagactgagcggacgctccaggtgatcgagtccacgctgcttcctgcaggcgacaggcgacgcctcccgagcagcccggccactggctcttcccctcctgggacaaacttttctgcaagcccttggaccaaacttgtcgcgcgtcaccgtcacccaaccgggtccgcgtagagcgctcatcttcggcgagatgtctgagcgcaaagaaggcagaggcaaggggaagggcaagaagaaggaccggggatcccgcgggaagcccgggcccgccgagggcgacccgagcccagcactgcctcccagattgaaagaaatgaagagccaggagtcagctgcaggctccaagctagtgctccggtgcgaaaccagctccgagtactcctcactcagattcaaatggttcaagaatgggaacgagctgaaccgcaaaaataaaccagaaaacatcaagatacagaagaagccagggaagtcagagcttcgaattaacaaagcatccctggctgactctggagagtatatgtgcaaagtgatcagcaagttaggaaatgacagtgcctctgccaacatcaccattgttgagtcaaacgagttcatcactggcatgccagcctcgactgagacagcctatgtgtcctcagagtctcccattagaatctcagtttcaacagaaggcgcaaacacttcttcatccacatcaacatccacgactgggaccagccatctcataaagtgtgcggagaaggagaaaactttctgtgtgaatgggggcgagtgcttcacggtgaaggacctgtcaaacccgtcaagatacttgtgcaagtgccmammtgrrttyactggwgawsrttrcsaaawstacrtaawgkccascywmkamaaagcggaggaactctaccagaagagggtgctgacaattactggcatctgtatcgccctgctggtggtcggcatcatgtgtgtggtggcctactgcaaaaccaagaagcagcggcagaagcttcatgatcggcttcggcagagtcttcggtcagaacggagcaacctggtgaacatagcgaatgggcctcaccacccaaacccaccgccrgasracgtgsagctggtgaatcaatacgtatctaaaaacgtcatctccagtgagcatattgttgagagagaagtggagacttccttttccaccagtcattacacttccacagcccatcactccacgactgtcacccagactcctagtcacagctggagtaatgggcacacggagagcgtcatttcagaaagcaactccgtaatcatgatgtcttcggtagagaacagcaggcacagcagtcccgccgggggcccacgaggacgtcttcatggcctgggaggccctcgtgataacagcttcctcaggcatgccagagaaacccctgactcctacagagactctcctcatagcgaaaggtatgtatcagccatgaccaccccggctcgtatgtcacctgtagatttccacacgccaagctcccctaaatcgcccscttcggaaatgtctccacccgtgtccagcatgacggtgtccatgccctctgtggcagtcagcccctttgtggaagaagagaggcctctgctgcttgtgacgccaccaaggctacgggagaagaaatatgatcatcacccccagcaactcaactcctttcatcacaaccctgcacatcagagtaccagcctcccccctagcccactgaggatagtggaggatgaggagtacgagacgacccaggagtatgagtcagttcaagagcccgttaagaaagtcaccaatagccggcgggccaaaagaaccaagcccaatggccacattgccaataggttggaaatggacagcaacacaagttctgtgagcagtaactcagaaagtgagacagaagacgaaagagtaggtgaagacacaccattcctgggcatacagaaccccctggcagccagccttgaggtggcccctgccttccgtctggctgagagcaggactaacccagcaggccgcttctccacacaggaggaattacaggccaggctgtctagtgtaatcgctaaccaagaccctattgctgtataaaacctaaataaacacatagattcacctgtaaaamwwwawwwwawawaataaagtatttcaccttaaattaaacaatttattttattttagcagttctgcaaatagaaaacaggaagaaaaaaaaacttttataaattaaatatatgtatgtaaaaatgtgttatgtgccatatgtagcaatttttttacagtatttcaaaaacgagaaagatatcaatggtgcctttatgttctgttatgtcgagagcaagttttataaagttatggtgatttctttttcacagtatttcagcaaaacctcccatatattcagtttctgctggctttttgtgcattgcattatgatgttgactggatgtatggtttgcaaggctagcagctcgctcgtgttctctctctctctctctctctctctctctctgtctctctctctgtctctctctctctctctctctctctctctctctctctctckswckctskctctctgtctctctctctgcttcccgtagctcccaaccagtactgtcttggactggcacatccatccaaatacctttctactttgtatgaagttttctttgctttcccaatatgaaatgagttctctctactctgtcagccaaaggtttgcttcactggactctgagataatagtagacccagcagcatgctactattacgtatagcaggaaactgcaccaagtaatgtccaataataggaagaaagtaatactgtgatttaaaaaaaaaaacaaactatattattaatcagaagacagcttgctcttggtaaaaggagctaccattgactctaattttgactttttagttattgttcttgacaaagagtaacagcttcaagtacagcctagaaaaaaaaatgggttctggcctgctatcaggataaatctatcgacgtagatagattcaactcagtttcactttctgtcttgggggaaatgatccagccactcatatgacgaccaaccaaccacaggtgcctctgctccctgt

SEQ ID NO: 2961 - DNA, 1930 bp, Rattus norvegicus
aaaaacacagctcagcagatccgggcactggagagggagctgcaagcaggagcagtcaagagtgtggtcagaagcaccgtgagtggaccagcagggccggctttttctaccatggcggcccaaggctatggctattaccgcactgtcatattcacagccatgttcggaggctacagcctttactacttcaaccgcaaaaccttctcttttgtcatgccctccttggtggatgagatcgctctggacaaggacgatttggggctcatcacgagcagccagtcggcagcctacgccatcagcaagtttgtgagcggggtgctgtctgatcagatgagtgcccgttggctcttctcctctgggctgctcctggttggtctggtcaacgtagtcttctcgtggagctctacagtaccggcttttgctgctctctggtttcttaatggtctggcacaggggctaggctggcccccctgtgggaagatcctgaggaagtggtttgagccatcccagtttggtacttggtgggctgtgttgtcaaccagcatgaacctggctggaagccwsgrrsctatcttggcgacaatccttgctcasagctacagctggcgcagcaccctggccctgtctgggtcactgtgtgtggttgtctccttcttctgtctsctgctcatccacaacgaacctgctgatgttggactccgaaatctggaccctsscccctccaagggcaaaaagggctcgtcaaaggaggagagcaccctacargacctgctgctgtccccctatctctgggtgctctccactggctacctcgtggtctttggggtaaagacttgctgtacagactggggccagttcttccttatccakgagagagggcagtcggycctygtgggtagttcctacatcagtgccctagaggttggaggccttgtaggcagcattgcagctggctatctgtcagacagggctatggcaaaggcagggctgtctgtgtatgggaaccctcgccacagcctgttgctgctcatgatggctggcatggcagcatccatgttcctcttccgggtaacagtgaccagcgactctcccaagatctggatcctggtattgggagctgtatttggtttctcttcttatggtcccattgccttgtttggagtcatagctaatgagagtgcacctcccaacttgtgtggtacctctcatgctattgtggggctcatggccaatgtgggtggatttctggctgggttacccttcagtaccatcgccaagcactatagctggagcacagccttctgggtggcagaagtgatctgtatagccagcacagttgtcttcttcttgcttcgaaatatccgcaccaagatgggccgagtatccaagaaggcagagtgaaaagagcactcactatagagcatccccaactgcaacctcattggcaggacacagaaaggaagagaggctgctctggctagaacagagcsttwmcatatctgtgtctacactgtctctstggacctccgyggyrctgmrrgttaccagtggctaatgaggtcctatgctctatttaaatgatgtttggttttaggctccattggcttcwgkttmtaccttytagcagrcagacaactcctaaattcagggtgtctcctatacccytcttcctctcctgagtccccatytcctagtgaggtggttctatctctgcagctgcagaatattaatggcctgtggtytctgctgtaccccarggcttcttgttaggggtcaacactgttgccaatacctcagtccywaagggaggagaggaggccaccactytcatcagtwmcctggggacaaaagggaggaatgtagagagcaaactgtcttgtatrgactaataaaactagatttgatmctaaaaaaaaaaaaaaaaaaaaaa

SEQ ID NO: 2962 - DNA, 1741 bp, Rattus norvegicus
ctgcaaagatctgacagacgcttctgatctccagaggaccctggggtgggacaggggcttggcaaggctgcagcgctgggcagtggcttggaatggaggtctttattactgggaactgaggagctaagaggctcctgtcagcttgtcctaaacccttagcacttgtggtggcttgggcttcacacactgtcagacaccttcgtggtggcctccacggctcacctccaggtttgaagctggctccacaagggacacggtgacatgaggggcagcccactgatccgtcttctggccacttccttcctctgccttctctcaatggtgtgtgcccagctgtgccggacaccctgcacctgtccttggacaccaccccagtgcccacagggggtacccctggtgctggatggctgtggctgctgtaaagtgtgtgcacggaggctgacggagtcctgcgaacacctgcatgtctgcgaacccagccagggcctggtttgtcagcctggggcaggccctggcggccatggggctgtgtgtctcttggatgaggatgacggtgactgtgaggtgaatggccgcaggtacctggatggagagacctttaaacccaattgcagggtcctgtgccgctgtgatgacggtggcttcacctgcctcccgctgtgcagtgaggatgtgacgctgcccagctgggactgcccacgccccaagagaatacaggtgccaggaaagtgctgccccgagtgggtatgtgaccagggagtgacaccggcgatccagcgctccgcggcgcaaggacaccaactttctgcccttgtcactcctgcctctgctgatgctccttggccaaattggagcacagcctggggcccctgctcaaccacctgtgggctgggcatagccacccgagtgtccaaccagaaccgattctgccaactggagatccaacgccgcctgtgtctgcccagaccctgcctggcagccaggagccacagctcatggaacagtgctttctaaggccaactggggatgcggatacagggcctgccatcctcagcaaatgacccttggaccaggccctggactgctggtagatgctcttctccatgctcttggctgcagttaactgtcctgcttggattcactgtgtagagccactgagcgatccctgctctgtctgaggtaggcggagcaggtgaccagctccagttctctggttcagcctggaattctgggttctcctggctcattcctcaaaacatccctgtacaaaaaggacaaccaaaaagacctttaaacctaggctatactgggcaaacctggccaccgtgctggggataaggtcaatgttaggaccagacagcagattgcctgaaacttccaattcccttcttggacttctgtatgcttgtaaccaaagatgatgaatgaactcgtaagtgtaccttccctgacctgagaacaccctgcctgctcgggaagtattcaggggcagaattctctgtgaacatgaagagatgaatcacactgtccttaagaaattcctcaaagtccaggagcttgagctttgtattttcaggaatgcacatctcttaagcactcgcaaaacaggaaggctccacacctctaacagccagggcctttctcttcagcatgagaaagacaagggacagcagagtactctcgtctggaggactagtctagcctagaataaacacccaaatcaagcgtgaaaaaaaaaaaa

SEQ ID NO: 2963 - DNA, 2622 bp, Rattus norvegicus
gcgcgctgcaggaagagtggcagaccgaagcggcctcgggctgcaaacggaggggcgctcgcgcggcgacggctgcagggctgacaccgctcagggcaggggggtcccaggcggctggaacgctctattctgaactgtgagtggatgatgctgttgcagccaagctgctgaacacactccgtggactcttccctgctgtgccttgcccatcggccgagataaaatggaagactcctacaaggataggacttcactgatgaagggcgccaaggacattgccaaagaggtgaagaagcaaacagtgaagaaggtgaaccaggcagtggaccgggcccaggatgaatacacccagcggtcctacagtcgattccaggatgaagatgatgatgatgactactacccacctggagaaacctacagtggggaggccaatgatgatgaaggctcaagtgaagccactgagggtcacgatgaagaagacgagatctatgaaggggaataccagggcatccccagcacgaaccaagggaaggacagcatagtgtctgtaggacaacccaaaggagatgagtacaaggaccgcagagagctggagtcagagaggagggctgatgaggaggagctcgcccagcagtatgagctgataatccaagagtgtggccatggccgtttccagtgggcccttttcttcgtcctgggcatggctctcatggcagacggcgtggaggtgtttgtggtgggctttgtgttacccagtgcagagacagacctatgcataccgaattcaggatctggatggctaggcagcatagtgtacctcgggatgatggtgggggcgttcttctggggaggactggcagacaaagtgggaaggaagcagtctcttctgatttgcatgtccgtcaacggattctttgccttcctttcttcatttgtccaaggttacggcttctttctcctctgtcgtttgctttcaggattcgggattggaggcgccattcccactgtgttctcctactttgctgaagtcctggcccgggagaagcgcggtgagcacctcagttggctctgcatgttctggatgattggcggtatctatgcttcagccatggcctgggccatcatcccccactatgggtggagcttcagcatgggctcagcctaccagttccacagctggcgcgtcttcgtcatcgtctgtgccctcccgtgcgtctcctcggtggtggccctcaccttcatgcccgaaagccctcggttcttgctggaggtaggaaaacatgatgaagcctggatgattctgaagctaattcatgataccaacatgagagcccggggccagccagagaaggtcttcacggtaaataaaatcaagactcccaagcaaatagatgagctgattgagattgagagcgacacaggaacctggtaccggaggtgttttgttcggatccgcacagaactgtacggaatttggttgacttttatgagatgcttcaactacccggtcagggaaaacaccataaagcttacgattgtttggttcaccctgtcctttgggtactatggactgtccgtttggttcccagatgtcattaaacacctccagtctgacgagtacgccctgctgactcggaatgtgcagaaggataaatatgcaaactttagcattaacttcaccatggaaaaccaggtccacaccggaatggaatatgacaatggcaggttcctcggagtcaaattcaaatcggtaaccttcaaggattcagtgtttaagtcctgcacctttgacgatgtgacctcagtcaacacctacttcaagaactgcacgtttattgataccctttttgagaacacagattttgagccctataaattcatagacagcgagtttcaaaactgctcgtttcttcacaataagacgggatgtcagattacttttgacgacgactacagtgcctactggatttactttgtcaactttctcgggacattggcagtgttaccaggaaatatcgtgtctgctctcctgatggacaggatcgggcgcttaacgatgctaggtggctccatggtgctctcggggatcagctgcttcttcctgtggtttggcaccagcgaatccatgatgataggcatgctgtgcttgtacaacggactgaccatctcagcgtggaactctcttgatgtagtcacggtggaactataccccacagaccggagagcaacgggctttggcttcttgaacgcactctgtaaagcagcggccgtcctgggaaacttaatattcggctccttggtcagcatcaccaaagcaatccctatcctgctggcttccaccgtgctcgtgtgtggaggactcgtggggctgcgcctgcccgacacaagaacccaggttctgatgtgacaaaagccattctcttctctcaccatgggtcagccctattgcctgactcaaggcttcagagtttttatgtatagaaaggtggccaagtatcagaactcaaacttttgctgtgacgtaaatgtagctgtgtattgtccccgccagtgtgatttgcagggtcctccccctcccccgcgccttgttatcttttcctaattgtgatgttcctgcttccg

SEQ ID NO: 2964 - DNA, 2555 bp, Rattus norvegicus
cccattttgcgtcgtctgggttcgggtggcggcccggctccaggcggacgcactaatcatggggtcgtcaaagaagcaccgtggagagaaggaggcagccgggactacggctgcggccggtaccgggggcactaccgagcagccgccacggcatcgagagcacaagaaacacaagcatcggagcagcggcggcggcagcagcggcggcgaacgacggaagcggagccgcgagcgtggggccgagcgcgggagcgggaggcgcggggccgaagccgaggcccgcagcggcgcgcatggtcgtgaacgaagccaagcggaaccctcggagcggcgcgtgaagcgggagaaacgcgatgaaggctatgaggccgctgccagctccaaagccagctctggagatgcctcatcactcagcatcgaggagaccaataaactccgagcaaagttggggttgaagcccttggaagtcaatgctgttaagaaagaggcgggcaccaaggaggagcccgtggcagccgatgttatcaaccccatggccttgcgacagcgtgaagaactacgggagaagctggcagctgccaaggaaaagcgcttgctgaaccaaaaattggggaaaataaagacactgggggaggatgacccctggcttgatgacactgcagcctggatagagaggagccggcagctacagaaagagaaggacttggcggagaagcgggccaagctgctagaagagatggaccaagagtttggtgtgagcactttagtggaggaggagtttgagcagaggcgacaggacctgtacagcgcccgggacttgcaaggcctcaccgtggaacatgcaatcgattcctttcgagaaggggagactgtggtcctcactctcaaggacaaaggggttctgcaggagggggaggatgtgctggtgaatgtgaacatggtggacaaggagcgagcagacaagaacgtggaacttcggaagaagaagcctgactacctgccctatgtggaggacgagagtgtggatgacttggcacagcaaaaacctcgctctatcctggccaaatatgatgaggaactggagggcgagcggccacattccttccgtttagagcagggtggcatggccgatggcctgagagaacgagagctcgaagaaatccggaccaagctacggctgcaggctcagtctctgaacactgtagggccccggcttgcctctgagtacctcagtccggaggagatggtgactttcaaaaagaccaaacggagagtgaagaaaatccgaaagaaggagaaggaggtaataatgcgggcagatgacttgctgccccttggcgaagaccagactcaggacggggacytysrmtycaggmytcggggccggggtcggcgccgagttcctgaagtggaggasgaggsccktgakgatgaasagaaggaccctgtggcccakccgccaccatcagatgacactcgcgtagagaacatggacatcagtgatgaggaggatgggggggctcttccctcggggcccccakakctggaggakgacgaascggagctggagctgcagaagcagctggagaaggggcgccggctgcggcagctgcagcaactgcagcagctgcgggacagcggtgagaaggtgctggagattgtgaagaaactggagtctcgccaacgtggctgggaagaggaagaggatcctgagcggaaggggaccatcgtgttcaatgccacttctgagttctgtcgcactctgggggaaatccccacttacggattagctggcaaccgagaggagcaggaggagctcatggactttgaaagggatgaagagcgckcggccaatggtggctctgaatcagatggcgaagagaacattggctggagcaccgtcaacctggatgaggagaagcaacatcaggatttctccgcttcctctaccaccatcctggatgaagagcccattgtgaacagagggctggcggctgccctgctcctgtgtcagaacaaaggactgttggagaccacggtacaaaaggyggcmcgrgtaaaggctcccaataagtcactgccttcagcagtgtactgcatcgaggataagatggccattgatgacaagtacagccgacgtgaggagtacaggggcttcacccaggacttcaaggagaaggatggctacaagcccgatgttaagattgaatatgtggatgagacgggcaggaaactgactcccaaggaggcattccggcagctgtcccaccgcttccatgggaagggctcagggaagatgaagactgagcggcggatgaagaagctggatgaggaggcgctcctaaagaaaatgagttccagtgacacgcccctgggaaccgtggcactgctccaggagaagcagaaggcycaaaagacaccgtacatcgtgctcagtggcagtggcaagagcatgaatgcgaacaccatcaccaaatgaagcacctccctgtcccagatgtaatgttaaataaagttcccgccttawwwwwwmmwmwwaaaaaaaaaaaaaaaaa

SEQ ID NO: 2965 - DNA, 5927 bp, Rattus norvegicus
ggctggcacagggcttgtaaataaactgcgatgctgtctcgggctcgccggcccgggtgccgccgtcgccgccgcctccctggagcttcggtgccaggctcccgccgtcgcgcgccctagcgccaccgcgccagcctcgcgcgccctcgccgggctccgcacggaccccggcttcccgcgcccctccgggtcctacaggggacccgctcgggatgtgaccccttgactccccatccgacctcccctgccccccgggaggcccgcctttgccttcttttgggggggtgggcggggaggggcgcgcggatcatggcattggagttcccgggcttgcagccgccgccgccgcctcgtccacgtaccccaagcgctccttcttcccggagcagcagcggagaaggcgaagcgcccggtgggggcgaggcggatggggctcaaggctcgcagggcggcgggggcggccggcgggggcggcggcgaagggggcggaggaggcggcggggcggctaacccggctggaggggactcggcagtggccggcgacgaggagcggaaagtggggctggcgccaggagacgtggagcaagtcaccttggcgctagggaccggagccgacaaagacgggaccctgctgctggagggcggtggccgcgaagaggggcagaggaggaccccgcagggcatcgggctcctggcaaagacccccctgagccgtccagttaagaggaacaacgccaagtacaggcgcatccaaactttgatctatgacgccctggagagaccgaggggctgggcgctgctctaccacgcgcttgtgttcctgattgtcctgggatgcttgattctggccgtgctcaccactttcaaggagtatgagactgtgtctggagactggcttctcgtgccggaaacatttgctattttcatctttggagctgagtttgccttgaggatctgggctgcaggatgttgctgtcgatacaaaggctggcgtggacggctgaagtttgccaggaagcccctgtgcatgttggatatcttcgtgctgattgcttctgtgccagtggttgccgtgggaaaccagggcaatgtcctggctacctctctgcgaagcctccgcttcctgcagatcctgcgcatgcttcgaatggataggaggggtggcacctggaagctcctgggctcagctatctgtgcccacagcaaagaactcatcaccgcctggtacatcggcttcctgacactcatcctttcttcatttcttgtctacctggtggagaaggatgtgccagagatggatgcccaaggagaggaaatgaaagaggagtttgagacctatgctgatgccctgtggtggggcctgatcacactggccaccattggttatggagacaagacacctaaaacctgggaaggacgtctgattgctgccaccttttctttaatcggcgtctccttttttgctcttccggcaggcatccttggctcaggactggcattgaaggttcaggaacagcaccgtcagaagcactttgagaaaagaaggaagccagctgctgaactcatccaggctgcctggagatattatgctaccaaccccaacaggcttgacctggtggcaacctggagattttatgaatcagttgtctctttcccattcttcaggaaagaacaactggaagcagcagccagccaaaagctgggtctcttggatcgggttcgcctttctaatcctcgtggtagcaatactaaaggaaagctatttacccctctgaatgtagatgccatagaagaaagcccttccaaagagccaaagcccgttggcttaaacaataaagagcgtttccgcaccgccttccgcatgaaagcctacgctttctggcaaagttctgaagatgccgggacaggagaccccatgacagaagacaggggctatggaaatgacttcctcattgaagacatgatccccaccctaaaggctgccatccgagctgtcagaattctacaattccgtctgtataaaaaaaaattcaaggagacattgaggccttatgatgtaaaagatgtaattgagcagtattccgctggacatcttgacatgctttccaggataaagtaccttcagacaagaatagatatgattttcacccctggacctccatccactccaaaacataagaagtctcagaaagggtcagcatttacctacccatcccagcagtctccaaggaatgaaccatatgtagccagggcagccacatcagaaactgaagaccaaagcatgatggggaagtttgtaaaagttgaaagacaggttcacgacatggggaagaaactggacttcctcgtggacatgcacatgcagcatatggagcgtctgcaggtgcacgtcaccgagtactacccaacaaagggggcctcctccccagcagaaggggagaagaaagaggacaacaggtattctgacttgaaaaccatcatctgtaactactcagaatcaggcccccccgacccaccctacagcttccaccaggtgcccatcgacagagttggtccctatgggttttttgcacatgaccccgtgaaactgaccagagggggacccagttctacaaaggctcaggccaaccttccctcctcgggaagtacatatgcagagaggcccacagtcctgcccatcttgactcttctggactcatgtgtgagctaccactcccagacagaactgcaaggcccctattcggaccacatctcaccccgccagagacgcagcatcactagggacagtgacacaccactgtccctcatgtccgtcaaccacgaggaactggaacggtctccaagtggcttcagcatctcccaagacagagatgattatgtatttggccccagtgggggttcgagctggatgagggaaaagcggtacctggcagaaggagaaacagacacagatacagaccccttcacgcccagtggatccatgcctatgtcatctactggagatggtatttcagattccatatggaccccttccaacaagcccacttagaaggggtcactggctgactcctggtactgtagtcagactttgtacagctcacttactctcacatctagtgcttaacaatgaggactccagtggctgtgtcaagcgcatgcatgtgcgcggtggcccccctgcaagcaggggcttctcacagccttcttcctccccatgtcactgcaacaaagtcgcttccttttcagcatggtttgcatgacttgacactatataaaatgcactgttagtctcttctarawamamawwwawmwrctcttccttttaatcacgattgaacaagtacagggagacttactgatgagctgtgctattttgtttggttggctggtttgggttttgattcggataaactgagagcatagtttcagttatttctaggctcacttcccctttatgtaaaatgctccagttaatttattgttttttaaaacaaggaaataattttctcaatcaaaacatactgcattacaatgagggaagcctctgagcaaacagaagagcaggaacaagatagtcattcaaaccccaaagccaagatttcaaacaattatctcactaaaggaaggctgacaaaattatcaaaagctccccaggggatttggcctaccccattgttcagaactgtgcctcagtttccttatctataagatgttggtgatccaaaatataacgtcacacgtgttatggactggtgaagagaaattttacacacataccacaaacataaaaaaagttcccaatttatgtagccaaagataataaaatttaccagaagtgggatgaccttctaagcaggagctaaatttggtatcttaaaatgaaattccaactcattcttctgtcttgcctgttcttgaatccaaaatggagattagaaccaagagcaattatcattccatgtcctctatttcaaagtgagaagtttggggcacaaggcaaatgccatgccttgagacacttggctgtcctgctgagaacaaggactcaaaacctttacatgaggactcactccttgccccagtcttccctcatactatcctagttgcatactgggatccaggaattcccagaatcacccatttttactcctcctgatttttcttaatgaaaatactagagccacacaaaactataagagctcctgagatgacaacttacagcctggaaatccctgccctgctacagaaggattgatgttaagcacaagccaccacgtggcctattggaagatattgctacttgctgaaaacctccaatggaaaaggttagactctggctactctttgtggaacgccacaccagagtattagtatcttagtcatttcatgcctctaaacactggttttaaatggttgccatggtgatcatcatgatgatggaaataccctaaataagtgtttgaatacaactctcaccagtgctgtttctgtgttgtcaagagccataaatatcacagcagactcctgggtgacgttttcatcaatttgcaatgttagtactctgtgctgtgttggggagaggctcctcagagatcgatttcttacaacctacatgctgattggtcctttataaagyactgagaatacagtagtgatgaaagtttgtcccctgatgataggaacttaaactcaaagcctgcagctccatgaatgatggcaagcactgtgaattagtagaggaatagccttcatggacagtatcacaatggatgtatgtgcagttagtgacctttaagtccaaggcaggcaatatcttaatacactcacacacattggaagaaaagcttttcttatagttttcaattgatcttttttctggcaatctgaaagacaaagactgtggacctcctcccttagttctttcaatatgacttcagtggtgccattgtggctataatctaagaaaacttacacctcttcctagggatttggctcttgagtatgatcttcctataattttttttcaccagaaatagctgtcctgcctagcatctaacatatkktwttyttttttcttacatgcatgagttatcagagacaaaaatgataaagaataaactgtgccamatggtttttccctaacataacattctctcacaacctcctagagttggtakgttacattwggatgcattgcttcaagagttcaaatgggaatcttggccaagaattctttgaactggaacttgcattrtttttcaagcaagctctaagtgagtagtcttcctggtgattcaaaaatcagagtggcaggaattagttttgtattggataccaagctmatatagtytagtcagttggtctgtatcagccaatacatatttgacwwmrwrmmrmwarwwttatgtcacttgacacaaattagagccatctgaagagaagatacctcaatggagataatgtctccattagatcaggctgtaggcaagcttgtagggcatttgtttaattggtgatggattagggagggcctagcccattgtaggtggtgtcagtcctagcctgatgttcctggatgccgtagcaatgcaggatgagcaaggcatgatgggcacaccagtagacagcacttctccatggcttctgcataacctcttgtctccaggtcctacctggtttgagttcctgtctaggatttcctctgtaaattaaagatctgtgacttcagatctaaatatgtgccaaataaatcctttcttcttcaagttgcctttggtcgtggtatttcattatagccgtagaaatatacttagttcaaacagttaacaatgttgtctttttagagcacataaggcaggtgacagaatatcatcaagcatggttaatttttttgttaaaacagtttcattttatttatttgtatttta

SEQ ID NO: 2966 - DNA, 1306 bp, Rattus norvegicus
tgtgatggaatgaatgactgacacgtgaattaagcagcgtacagaaccagcgttccctttcctatcccccaaagtyacagtttatcagaagaaagaaacatcccagactttcaaacactcattccctcccctgtatacagtccttccatgctcctggaagtggctgccaggaggctgcaggcggtcacacccagatgggcttttggaaagttctccagtcaggagctgcaccctgtttctcatcaaccgaatgaactttcgaaatcagctaaagtttatgatggccacaacccatggtatgagggcttttccggccctcaaggctgttctgccagctgttggggggaaaaggggaaattacccagggcgttgggtatgcccgtctgtgaatccattatttggccacacccacctccccatccctgtggctctccgatccccagccctgcagagggaagagctatttaagagcattgggagtacaggaaaaacamgrsrggcmckwgracaagaagccataccaccatcccatccaagagagctgacagcatgaaggtcctcctgttgctagcagttgtgatcatggcctttggctcaattcaggtccaggggagccttctggagtttgggcaaatgattcygtttaagacaggaaagagagctgatgttagctatggcttctacggttgccattgtggtgtgggtggcagaggatcccccaaggatgccacagattggtgctgtgtgactcatgactgttgttacaaccgtctggagaaacgtggatgtggcacaaagwwhstgacctacaagttytcctaccgagggggcsraatctcctgctctacaaacvagkwctcctgccggaaacagctgtgccagtgcgatarasstgccgctgartgttttgcccggaacaagaaaagctacagtttaaagtaccagttctaccycaacaagttttgcaaagggaagacgcccagttgctgaaagmgmcatcttckgaaacatccagacatcctctaacacctstcctagcccaaccaagttccccagtgatcaagaaaacacccctykccaaccstagaagcaggcgggcccttctgtcttcacccagaaggagccgctgaagcctgatctttycccaacactccacagccttggatccgcccacttttcccttkgcatccaacttcctgctgcgtagtacctaagagrgtcctgagaggctctcgcaagtaaagcaattcatcaacwwawaaaarrrwaaawwttaatatgcaactggtccgtgttttaaaaggtg

SEQ ID NO: 2967 - DNA, 5136 bp, Rattus norvegicus
ccgccgcaggagcgctgagagcgccgcaaaaggagctggcaccgcctcgctaaatccctatcagtcctcgctcccgcgcggccatggactgagcgccaaccggctgcggggatggggctaccgctcccgcttttgctgctgctgctgctgccgccgccactgcctcgcgctctgccggcccccgcgtctgcccgcggccggcagctcccagggcgcctgggctgcttgtttgaggatggcttgtgtggatcattggagacctgtgtgaacgatggtgtgtttggaagatgtcaaaaggttccggccttggacacttaccgatatgaggtgtcaccaggagccctgctgcacctgaggatcatcttacagaagctctcccgtacaggtttcacgtggcaagatgactatacccagcgtgtgatcgcccaggagctttcaaaccttcccaaagcctacctatggcatgaggaagcttccagcccagccaggtccttacaacagaatgcggataatgaaaaatggttcagtctggagagtgaggtggccctggccaagacccttcggcgctatctgccctacctggagcttctgtcccaggccccgacggcaaatgcacaccccaggatagaccacgagactcgtccagttaagggtgaggactcgtcccctgagaacatcctgacctatgtggcccacacatctgcactgacctatcctcctgcaacccgggtcaagtatcccgataaccttctgcgaccccttagccggctccagccagatgagctcagccccaaggtagacagcgacatagacaaacagaagctgattgcagcactgggtgcctacactgctcagaggcctcctggagaaaatgacccagagccacggtatcttgtgcatagtcccatgcgagcaccaaggcccttcgcagcacctgctttgtctcagagatggcctctacctcctggagactccaaagactccctgagtatgggtgatgacacactcctgcggagtcttctgaaggatctgcagcagcaggctgaagtggaccgcctgggctccctgaagctggaggagcaggcagattcaattgctggagccatacaaagtgatcctgtagagggaagccaagaaagtcatgggagaggggccgagggacagctgagagagcaggcggatgccccagaggaaatgcttcaagatcacagactaccagaagtggatgacccagcagcgtacaaggaggtcagccgtctgagtttcaagcttggggacctcttgaaggaccatgggtctcctctattacctgaagctccccttctggaaaagtcctccagagcagagatgaagaagtcagagcagcctgaggaggtcttgtcttcggaagaggagactgccggggtggagcatgtgaagagccggacttactccaaagacctattggaaaggaagccgaactcagaaccccaaccctggaggcttgaggaccagttccaaaatcgagctccagaggtgtgggaggatgaacaaaacctcaagttggcagcacagggaccccctagtggaggccttcagctggaagtgcagccttcagaggaggaacaacagggatacatcctcacaggaaataaccctctaagtccagagaaggggaagcagctgakggatgaagttgcccatctcctccgggtaccttccagcttctttgcagatgtcaaagttttgggaccagcagtgatcttcaaagtgagtgccaacatccaaaacatgacaacggcagatgtcacgaaagctgcagttgacaacaaagatgagctggagaaggcaactggactgaccatcctgcagagtggaatcaggccgaaaggaaagctcaagctcctaccccatccagaagagcaagaggactcaaccaagttcattgtgcttaccttcctctccatcgcctgcatcctggccgttctcctggcttccagcctagcctactgcctccgccacaactcacactacaagctgaaggagaaattgtctggactaggagctgaccccagcgcagatgccaccgaagcctaccaggagctatgccgccaacgtatggctgttcggccgcaggatcactctgagggaccacatacatcccgcatcaacagtgtctcatcccagctcagcgatgggcccatgcctagtccttcagcccggagcagcacttcatcctggtctgaggagcctgcccagtctaacatggacatctctactggccacatgatcctggcctacatggaagaccacttgaagaacaagaaccggctggagaaggagtgggaggcactgtgcgcctatcaagcagagcccgacagctcactkgtggcccagagagaggagaatgcacccaagaaccgttccctggctgtgctgacctatgaccattccaggatcctgttgaagtctgagaacagccacagcaattctgactacatcaatgccagccccattatggaccatgacccacgaaaccccgcgtacattgccacccagggcccacttcccgccaccgtggccgacttctggcagatggtgtgggaaagcggctgtgcagtcatcgtcatgctgacacccctctctgagaacggcgtccggcagtgccatcactactggcctgatgaaggttccaacgtctaccatgtctatgaggtcaatctagtctctgaacacatatggtgccaggatttcctggtgagaagcttttacctgaagaacctgcagaccaatgagactcgcacggtgacccagttccacttcctgagttggtatgaccagggagtcccttcctccacgaggtcactcctggatttccgcagaaaagtgaacaaatgctaccgaggccgctcttgtccgataattgtccattgcagtgacggcgcgggcaggagtggaacctacgtcctgattgacatggttctcaataagatggccaaaggtgctaaagagattgatatcgcagcgaccctggagcacttgagggaccagagaccaggcatggtccagacaaaggagcagtttgagtttgcgctgacagctgtggccgaggaggtgaatgccatcctgaaggcccttccccagtaggcaccgaagctggagctgacgggaccccaccacgagtacttccaggaccacaacaggatatcatttctgcatcttctgtgtagtaagggggtccttcagactccatagtcaacacaggtggctagttatgtgtacttstgcttaaccaaatagcacatgtgtggaaacacccagttaggaggaaggaaagattcagcttatttgtatcacagtcttggcaaaattccttttccstaaagcacactttgacatggtcgcatcaatgacacagtaattagaaacccactgtgrcctcctcgggagggtggttatgtctgtaaggtgctggggggggagggagaatgcaaatggaccagaacagacagcgggactcctttgggaagcaccactatagaatcacatttggtgtttgccagtaagacaatctcatcatcaggggaaaccttcagggagaagatcagtgtcctgcatccctggggcaaatgacaggctctcaygrggctctgcctgtccctgctgatgtgcttccagcacaccggctggctgtgtccaccacacgtggattccaaggacaggaaaaaaaaaarrawttccccaagggtagacaccttaacccyccagaagtatgggtgctgtatctgttacagaagtgaggacccaagtaatagttcacctttgcaaagttacagaggaacggccctttggaacatttttagtattaggatcctgttttcctcattacaagaatgctgaagtatacaattccagaaccccatagtatgctgaagttacaattccagaacgagtacggttatttagcaagttccaagggttgccaatgtgtttcccatccagcatccccaggaagcactccaatggtactgaaaagtctctgatgctcctagtcctggaaagaagtctggccctttgcctcttcctcctgcttcctcccagataactttagtgaaacacattctcactggatgctccagtttgytgaaamatwkggscgttgggcttaccacmtkcccacacatdggaaacccacyccagtatccgcaaggcgctggtscccagwgaggtagaaggcatggctgtaasccccagtttgtttgtggggttgagtatgaaaaagcccatctcccgtgtcccctttgttccttccctttagcctcaacattkcaakttgcggtgygtaaaggaggtggctrccgtgcsggaagcgatgccgcagtgtgtcatgtctstaaytgtgttgtgtaymtgcttaacatctgcgacgttcctmttccatttcccccttcccggaatstaaatgataattaatagaaatgaatttatctgaatataggaagcatatacytaattgtaacttcttatgtttaaaggaaaaaccctcggtgtgatatacagatatmtttaattgtgtcctattaaacsttstgatttcawawwwrawrrwmwwwamttgggaaagtgagagcagttcagtcccacgagggcctttttatttcccaaagatgtaaatccaagcacagcccttctccagagcctgagaagcaccactggcttgtcttccgcaccaggctcataccaggggcttctacatcactgggatttcactatttaaaaattaccgagcgatcgttgagggctgcagaactccacaggatgggtgcactccgccctgctggaagctgcctccagccctcatcaaagctccacctcactgagactcgtcctcctgccccatccacattgtctatgtcagcctctcatgccacaggaaaatgcttctgcacagctcaagctctggtgacaggaacggatgtaattgggagcaaggcttcctgggttctttctttcctaagaatggtacatctattttgttttttttaattaactcattggtttatgtacaaaataataaaataatgaatttcatcatacacacacacacacacacacacacacacacacacacacacacacaaataaaccatctcgtgc

SEQ ID NO: 2968 - DNA, 1427 bp, Rattus norvegicus
ctttaagagtcttggccctggcagtggcacagctccgctcgccactcctgcccgccagtctcttcatctgtccyactaccccaggattcatcagagcagccactccacctctgtgccaagatgacatcagttgccaaggtctattacagccagacgacgcagacagagagccggcccctagtggcyccaggaatacgtcggaggagggtcctgacaaaagatggccggagcaacgtgagaatggagcatattgctgacaagcgtttcctctacctcaaggatctatggacgaccttcattgacatgcagtggcgctacaagcttctgctcttctcgscaacctttrcaggcacttggttcctctttggcgtggtgtggtatctggtcgctgtggcccacggggacctgttggagctgggacctcctgccaaccacacgccctgtgttggtgcaggtgcacacacttaccttggggcyttcctcttctccctcgaatcccagaccaccattggctatggcttccgctacatcagcgaggaatgccctctggccattgwgcttctcattgcacagctcgtgctcaccaccattctggaaatcttcatcaccggaaccttccttgcaaagattgcccggccraagaagagggctgagacgatccgtttcagccagcatgcggttgtggcttaccwcaacgggaagctttgcctcatgatccgggtggccaacatgcgtaagagtctcctcattgggtgccaggtgacaggcaaactgcttcaaacccaccagacraaggagggtgagratattcggctcaaccaggtcaatgtgactttccaagtagacacagcctctgatagcccctttctcattctacccctgactttctaccatgtggtagatgagaccagccccttgmaagatctccccctccgcagcggggagggtgacttcgagctcgtgctgatcctaagtgggacggtggagtccaccagcgccacctgtcaagttcgcacttcctatctaccggagrrgatcctctggggctacgagttcacacctgctatctcactgtcagccagtggcaaatacgtggctgacttcagcctttttgaccaggttgtgaaagtggcgtcccccggtggtctccgagatagcaccgtacgttatggagacccagaaaagctcaagttggaggagtcattaagagagcaagctgaaaaggaaggcagtgcccttagtgtgcgcattagtaacgtctgacatcctgttctctcctcctcagccctctggccttttcctctcccagtgtcctgggaaaaggatactatctgggttcgctggagagccctggaagtacccatcctctactttaccttaaaccggaggcctatgagcagtctaggcctgctggagtcctactcttt

SEQ ID NO: 2969 - DNA, 3884 bp, Rattus norvegicus
cctcagattggagtgaacaaccatcgccaccatgggggagcttttccgaagcgaggagatgaccctggcccagctctttctccagtccgaagctgcttattgttgtgtcagtgaattagragaacttggaaaggttcagttccgggatttaaatccagatgtgaatgttttccagaggaaatttgtgaatgaagttagaagatgtgaagaaatggatcgaaaactccggtttgttgagaaagagataagaaaagctaacatcccaattatggacactggagagaacccggaggtgccctttcccagggacatgatcgacttggaggccaatttcgagaagatcgaaaacgaactgaaggaaatcaacactaaccaggaagctctaaagcgaaacttcctggaactgactgaattaaaatttatactgcgcaaaamwmarmarwwwwwcgatgagatggcggatccagacctgttggaagagtcctcatcactcttggagccaaacgagatgggaagaggcgcgcctttacgacttggcttcgtagctggtgtgattaaccgggaacggatcccgacctttgagcgcatgctttggcgagtgtgccgagggaatgtgttcctgagacaggctgaaatcgaaaacccgctggaggatcccgtgactggcgactacgtgcacaagtccgtgttcatcatttttttccaaggtgaccagctgaaaaacagggtcaagaaaatctgtgaagggttccgagcctccctctatccctgtcctgagactccacaggagagaaaagaaatggcttccggagtcaataccaggatcgacgatctccaaatggttctgaatcagacagaggaccaccgccagagggttctgcaggcggctgctaagaacatccgggtgtggttcatcaaggtgcggaagatgaaagctatctaccataccctgaacctctgcaacatcgatgtgacgcagaagtgcctgatcgcggaagtctggtgccccgtcactgacctggactccatccagtttgcactgcgaaggggcacggagcacagcggttccactgtcccctccattctgaacaggatgcagacaaaccagacaccccctacgtataacaaaaccaacaagttcacgcacggcttccagaacatagtggatgcttatgggatcggcacttaccgagaaattaacccagctccgtacaccgtcatcaccttcccctttctgtttgctgtgatgtttggagattttgggcacggcattttgatgactctgtttgctgtgtggatggtgttgagggagagccggatcctctcccagaagaacgagaatgagatgtttagcatggtgttcagcggccgatacattatccttctgatgggactgttctccatctacactggactcatctacaatgactgcttttccaagtctctgaatatctttgggtcatcatggagcgtacggccaatgttcaccatagggaactggacggaggagacgctcctggggagttctgtcctccagctgaacccagctatccctggagtctttggtggcccttacccatttggcattgatccgatttggaacatcgcaaccaacaagctgaccttcctcaactccttcaagatgaagatgtcagttattcttgggatcatccacatgctgttcggggtcagcctgagccttttcaaccacatctatttcaagaagcccctgaacatctactttggctttattcccgagataatcttcatgtcctcgctgtttggctacctggtcatcctcatcttttacaagtggacagcctacgatgcccactcgtctagaaatgccccgagcctcctgatccatttcataaacatgttcctcttctcctacccagagtctggtaacgcmaygmkgtactctggacagaaaggaattcagtgtttcctcatagtggtggcaatgctctgtgtcccctggatgctgctgtttaagccgttgatccttcgccatcagtacctgaggaagaagcatttgggaactctcaactttggtgggatcagggtgggcaacggaccgacagaggaggatgctgaaattattcagcatgaccagctctccacccattcagaggacgcagaagagcctaccgaggacgaagtgtttgactttggcgacaccatggtccaccaggccatccacaccattgagtactgcttgggctgcatctccaacactgcgtcctacctgcggctctgggccctcagcctggcccatgcacagctctctgaagtactctggaccatggtgatycacatcggcctgcatgtccggagtctggcagggggactggggctgtttttcatcytcgctgcctttgccamcctgaccgtggccatcctgctgatcatggaaggcctctcagccttcctccacgcactgcgattacactgggtggaattccagaacaaattctacactgggactggtttcaagttcctccccttctcctttgagcacattcgggaagggaagtttgatgagtgagtctcaggcagggcgcatgctcagagcagctctcctgcctgcctctacagtgactgtgtctcttgcctgctggttgtgatccctggatactcgggcgtttgtgtcaccctacaacccctgtccccgctgtgactcatttaggttgtgctggccttccctgggtctctttctcccaagccttgggtgttacgtacagactttcgactgagagctggatggctgtgcctgatacccacccatccccatggcaccacttggcctcctggcctccagacagatagccctattccatcccctaatggtgagccaacctgcacagacacataggggcacggagccctcaggatgcaaggggtccctcatcagtccaggagttcttggtcacgccttggaggaagatggcaatgggttctctcctagaaggggatattgcttatggaacatacccgactccgctggcagggacagtcaggaagatgctgctgtcaccctttgtccagcctctccagtgagtattcaggaaactcagttggccctacctgggccatctcaaaggttccaggataacccccaccctcctagcccccaccctcctaaacactctcctcccccagccctgttggcacagcatagctagcatccgtagaatgggagggtcgcactgacttgcagcaccgggcttccggaccttagattcccttctytgtcagtgcgtgaatgggccttgccaacactacaccccaaggcagaagttaaaattggcacwctcccggcatatccctgagcccttctgcaccctgatcatgatgtcctgaggctgtggtcagtaaggttggttctgccggcaggcctgccttgatctgcccacttattactccctmymcaatccccatgctgaccccaggtttcaggagtggcgtcctggacagggaaggtcagtgkcatttacaatktgctaatcagaggcgactgttgggctaccagagcagatgtgggagcgctgctaagcccttgccgcstacctcatgtactgtggatctcagacccttytaatcatgtgctgaytccmgaaattcaytcactgccttccstgtggaggtaatactaaatyagcaaggcccctcccctcccccaccytggcgctcttgasccgctcccacggtgaattgttyagagcccctctgtccttttgtgcccagttwacatgatgatctctgctgttwacagagaggcccacagcagaggtctctgtggggaccctgcccaaggccttctgttcagacattcttatccggaataaagtgtgtttgactctgmmaaaaaaaaaaaaaaaaaa

SEQ ID NO: 2970 - DNA, 1994 bp, Rattus norvegicus
cggccgcggctccggggagggggtcggagtcgcctgtcaccattgccagggctgggaacgccggasagttgctctctccccttctcctgcctccaacackgcggckgcggcsgcggcacbkccrbggmccmgrkccsststyavgcctbysrkcmdcygybgbsgcascsccctsgcsgggmkcckgmmggscgscggmkgmggcagccgctgcgaggattatccgkcttctccccattccgctgcttcrgstgccaggcctctggctgctgaggagaagcaggcccagtcgctgcaaccatycagcagccgccgcagcagccattacccggctgcggtccavggccaagcggcagcagagcgaggggcatcagcgaccgccaagtycagagccattkccatcctgcagaagaagcctcgccaccagcagcttctgccatctctctcctcctttttcttcagccacaggctcccagayatgacagccatcatcaaagagatcgttagcagaaacaaaaggagatatcaagaggatggattcgacttagacttgacctatatttatccaaatattattgctatgggatttcctgcagaaagacttgaaggtgtatacaggaacaatattgatgatgtagtaaggtttttggattcaaagcataaaaaccattacaagatatacaatctatgtgctgagagacattatgacaccgccaaatttaactgcagagttgcacagtatccttttgaagaccataacccaccmymgykagaacttatcaaacccttttgtgaagatcttgaccaatggctaagtgaagacgacaatcatgttgcagcaattcactgtaaagctgggaaaggacggactggtgtaatgatttgtgcatatttattgcatcggggcaagtttttaaaggcacaagaggccctggatttttatggggaagtaaggaccagagataaaaagggagtaactattcccagtcagaggcgctatgtatattattatagctacctgttaaagaatcacctggattacagaccagtggcactgttgtttcacaagatgatgtttgaaactattccaatgttcagtggcggaacttgcaatccccagtttgtggtctgccagctaaaggtgaagatctactcctccaactcaggacccacgcggcgggaggacaagctcatgtactttgagttccctcagccattgcctgtgtgtggtgacatcaaagtagagttcttccacaaacagaacaagatgctcaaaaaggacaaaatgtttcacttttgggtaaatacgttcttcataccaggaccagaggaaacctcagaaaaagtggaaaatggaagtctttgtgatcaggaaatcgatagcatttgtagtatagagcgtgcggataatgacaaggagtatcttgtgctcaccctgacamamrakgatcttgacaaagcaaacaaagacaaggccaaccgatacttctctccaaattttaaggtgaarttatacttyacaaaaacagtagaggarccatcaaatccagaggctagcagttcaacttctgtgactccagacgttagtgacaatgaacctgatcattatagatattctgacaccactgactctgatccagagaatgaaccttttgatgaagatcagcattcacaaattacaaaagtctgattttttttttcttatcaagagggataaaataccaagaaaaaaaacttgaataaactgaaatggaccttttttttttkytttkttaatggcaataggacattgtgtcagattgcagttataggaacaattctcttctcctgaccaatcttgtttcaccctatacatccacagggttttgacacttgttgtccagytaaaaaagsttgtgtagctgtgtcatgtatatacctttttgtgtcaaaaggacatttaraatkcaaktaggatawmtaaaagwtggcactttcaaaaaaaaaaaaaaaaa

SEQ ID NO: 2971 - DNA, 4497 bp, Rattus norvegicus
cggcacgaggagactgctgctacctgcagggtgctccccaccccccacccccaacccaggcgcctgctttcgtcccctcccctcctgctttcgtcccctgcccccacctccttattggcaygmkggtttgsagcgcttggctcctgcgcctccgcttsgyrykwgaatctggatctcccctccgtattatgtctgcactccgaaggaaatttggggacgattaccaggtagtgaccacttcgtccagcggttcgggcttgcagccccaggggccaggacagggcccacagcagcagcttgtacccaagaagaaacggcagcggttcgtggacaagaacggtcggtgcaatgtgcagcacggcaacctgggcagcgagaccagtcgctacctttccgacctcttcactaccctggtggatctcaagtggcgttggaacctctttatcttcatcctcacctacaccgtggcctggctcttcatggcgtccatgtggtgggtgatcgcttatacccggggcgacctgaacaaagcccatgtcggcaactacactccctgtgtggccaatgtctataacttcccctctgccttccttttcttcatcgagaccgaggccaccatcggctatggctaccgctacatcaccgacaagtgccccgagggcatcatccttttccttttccagtccatccttggctccatcgtggacgctttcctcatcggctgcatgttcrtcaagatgtcccagcccaaaaagcgcgccgagaccctcatgtttagcgagcatgcggttatttccatgagggacggaaaactcactctcatgttccgggtgggcaacctgcgcaacagccacatggtctccgcgcagatccgctgcaagctgctcaaakswygrcwgwcacctgagggtgagtttctaccccttgaccaacttgaactggatgtaggttttagtacaggggcagatcaactttttcttgtgtcccctctcaccatttgccacgtgatygatgccaaaagccccttttatgacctatcccagcgaagcatgcaaactgaacagttcgaggtggtcgtcatcctggaaggcatcgtggaaaccacagggatgacttgtcaagctcgaacatcatacaccgaagatgaagttctttggggtcatcgttttttccctgtaatttctttagaagaaggattctttaaagtcgattactcccagttccatgcaacctttgaagtccccacccctccgtacagtgtgaaagagcaggaagaaatgcttctcatgtcttcccctttaatagcaccagccataaccaacagcaaagaaagacacaattctgtggagtgcttagatggactagatgacattagcacaaaacttccatcgaagctgcagaaaattacggggagagaagactttcccaaaaaactcctgaggatgagttctacaacttcagaaaaagcctatagtttgggtgatttgcccatgaaactccaacgaataagttcggttcctggcaactctgaagaaaaactggtatctaaaaccaccaagatgttatcagatcccatgagccagtctgtggccgatttgccaccgaagcttcaaaagatggctggaggacctaccaggatggaagggaatcttccagccaaactaagaaaaatgaactctgaccgcttcacatagcaaaacaccccattaggcattatttcatgttttgatttagttttagtccaatatttggctgataagataatcctccccgggaaatctgagaggtctatcccagtctggcaaattcatcagaggactcttcattgaagtgttgttactgtgttgaacatgagttacaaagggaggacatcataagaaagctaatagttggcatgtattatcacatcaagcatgcaataatgtgcaaattttgcatttagttttctggcatgatttatatatggcatatttatattgaatattctggaaaaatatataaatatatatttgaagtggagatattctccccataatttctaatatatgtattaagccaaacatgagtggatagctttcagggcactaaaataatatacatgcatacatacatacatgcatatgcacagacacatacacacacatactcatatatataaaacatacccatacaaacatatatatctaataaaaattgtgatgttttgttcaaawwwrwawwwmwmrwrcatgtttactttattagactaggaaggctgctggcattgattatgaataccaaatattttwgccttaaattatttgttatttaaaaatctgatttaatgttttctgctgttgagggtcaaggaatctttcaactgtattttatcatgaaagggtagcagatttgtggtgtttttgacaccatagtgacatcattattatgmatttaatttgtaaattttagagtgtaccagtacatggcacacatcactgaactttsttatgatttttagaagtcactagaacttgggtgggggcggggtgaataararttatttaactcatcaattctgaaactcactaatatctagaagttggtttkgtactccaataaaaatatgagctctgaacaaatgctgaatcattggaactgtcagtagccaggttattgtgactatgtcagagtctgtgtgaaactgacagggtaaatggtgcctgtgtcaaaatgagttggttgaaaatgttttcttctttttctggaacttttgtcatccataaagactcgtaggtatttcaggagacataacagcacaatgaaacagatgataaatacttgtgctggaaatgtgtacgtatgcctaacagagacttttatgctgctctcctgtttgtggcatttgttgtgaaaggacagattattttcctggtctggggaacctatcccaggtctgtcactcataatttagcacagacctgagagaaattaaaatcaaacgaattgacaatgtttgtacactcaggrmtctttttgattttgtttaggtgttgaacaattcttttactgttgccttgaatccctgacatccagaataattttagcagtactacctttcaacccccaacatctggctgttatcaaacttgatcagtagtatatctttaacacaatgctttagaataaaaagggtggttttttttttttttgaaagtgcacaagtacttctttgtgtactaacatagattttcctatacatttttgacggtatttataatccaccttggcccggaattaacccacttctcattaatatatagatcactgatggttggtttgagcacacagcattcctaatkgtttaatgatcctgcgataattttattagaggcaaattattacatctacagtatatcatccattatatcttctggctacctctgtatcaaccaaattctgtaggtgcaaacacataacagggaataactactggaaaaatggtcaacattagcatccatccactgtgaatcgagcagttgtcctaccccttgatcaccaaatgttcttatttgctagacggaggtgatgattaacagacagaaaagggggactagtggggaaagtatatttagcagtggaggaagctgcatagatcatttagtccaacacccttaaaactatacagagccatactattctttggagagtcattttaacttgtttttggtattgtgaaaaaccaaaagcaaactctctgaatttattcatttaacaaaattattgagtctaatatatttggaaaaaatgacttactgtattataaaaagatgatggaaaggctacataaaattaagatatgtattagagagtcaggtcagaagctaaagaaaagccgctcggttcagagccgagaggaaaatgaaatgagagaggagaaagagaacaaagaagaagaaaaaggtaaacataataggcatggtcttgctgacctctcagaaccgcagctgaggactctttgcatagaggtgtggcccgtgctagcagtgataggaggagttgatgctggtcttagagttggaggtcggtgtgttcacaagcaaactgggcgccatgccacgctgctgggagtggtcaaagaaggcagcacatctgccaaggtccagtgggatgaagcagaaattaccatcagcttcccaactttttggtcgcgtagtgatactccattgtataacctggaaccctgtgaaccactgctgtttgatgtggcgcgattccgaggcctgacagcttctgtgctgctggacctaacatatctgacaggcattcatgaagatattgggaaacagagcatcaagcgacatgaaaagaaacaccgtcatgagtctgaggaaaagggggacattgagcagaaacctgagagtgaatccattttagatgtgcgaacagggttaatatctgatgatgttaaaagtcagggtaccacaagctccaaatcagaaaatgaaatagcgtcgtgcc

SEQ ID NO: 2972 - DNA, 1324 bp, Rattus norvegicus
cacgaggggaccaacgggtagttgggagtcgcgggcagagcacagctaaccacttggagagtttttgctgctgactggagccaccaaggccagcttcgcgscgctgccctgcggcggcagaggaggctgcaccagagcagaggcagcgagcaggcttggggccggtagccagcggtgcggctggggcgctcactctctccagccagcggtccgggagccacgcgagctccgtgcccgcacgcgctacccggctcgcgcctttctttgcgtcagggtgcccggcctctccgcccactcgccggctcattasggctgccacggaccgagttgcagcatgaatctgagtttctgcgtgcaggcgctgctgctgctctggctctccttgactgccgtgtgtggagtgccactgatgctgcctccagatgggaaagggctagaagaaggcaacatgcgctacctggtgaagcccagaacttcgaggactggaccaggggcctggcagggaggcaggaggaaatttcgcagacagcggccccgtctctcccataagggacccatgcctttctaaagcaggattgaagggctctccaagtgccctcccggtgccagtctctttactccacagatgagttctcttctctggaaccctcacatctatttggctctcatcttgcacctgttatcgctgctgatggtcccagctcttcttctcacccaccaagttcctctaatggcgtggtctcacccctcatttggatgattccatttctcttgcaaggatccctttggcccatcttcctggccactccttggactgcccttggagacccagcttctcctggcctgctccaggcgctagttcctatcttttggctttagcctgctcttggtccctcccttttctcatttgccttgggcactggacaagaacactccsttyttcaatggrttcytgcacatccatactttbttatcaattkgrcctytygcctkgragggrgtacmgggrtktacmatgrgrctttkgttgrgrgggrttgggtkttggggtccmgrgraggtkcactggggraacmgtkggchtaaggaaggggtgrggrgaaatagctgtcatggcctyttccttagctctctctggccctgttaaaggaagrtgcaaaggrgaggaacccatgaagtgctatgtcactgtgtctcctaacatctytgctctctctgttctattgccgctggttcactccccaggtcaaaaggggaaagtgctgatcctgacatggttctatactcttctgggagtaattttgccaaaaaaaaaaaaaaaaaa

SEQ ID NO: 2973 - DNA, 3360 bp, Rattus norvegicus
gccttgmakcggcrcrdscamrcggagaggycgcgggasgcgcgamgccggcrgaaggcgagrgagagcsgagkgykkycatsstccwkscctsawgccaaacaaaaaaggcctacttcgaaagctgtcaacaatgaatgactctaaagatgcccctaagtcctatgacttcgacctgatcatcattggaggaggctcgggaggcctggcggcagctaaggaggcagccaaatttgacaagaaggtgatggtcttggacttcgtcacaccaactcctctcggaacgaatgggggtctcgggggaacgtgtgtgaacgtgggctgcatacctaaaaaactgatgcaccaggcggctctgttaggacaagctctgaaagactcacgcaactatggctggaaactcgaggacacagttaagcatgactgggagaaaatgacagaatctgtgcagaatcatatcggctcgctgaactggggctaccgagtagctctccgggagaagaaggtcgtctatgagaatgcttacgggaaattcattggtcctcacaaaattatggcaacaaataacaaaggtaaagaaaaagtttactcagcagagcggttcctcattgccaccggtgaaaggccacgctacctgggcatccctggagacaaagagtactgcatcagcagtgacgatcttttctccttgccttactgcccggggaagaccctagtggttggcgcgtcctatgtcgccttggaatgtgcaggattcctggctggtatcggcctcgacgtcactgtaatggtgcggtccattctccttagaggatttgaccaggacatggccaacaaaattggtgaacacatggaagagcatggtatcaagtttatcaggcagttcgtgccgacgaaaattgaacagattgaagcagggacaccaggccgactcaaggtgaccgctaaatccacaaacagtgaggagaccatagaagacgaatttaacacagtgttgcttgcagtaggaagagattcttgtacaagaactattggcttagagaccgtgggcgtgaagatcaatgaaaagaccgggaagatacctgtcacggatgaggagcagaccaatgtgccttacatctacgccattggtgacattctggaggggaagctggagctgacccccgtggccatccaggcggggagattgctggctcagaggctgtatggcggctccactgtcaaatgtgactatgacaatgtcccaacgactgtgtttactcctttggagtatggctgctgtggcctctctgaagaaaaagctgtagagaaatttggggaagaaaatattgaagtttatcacagtttcttctggccattggaatggacagttccatcccgggataacaacaaatgttatgcaaaagtcatctgtaaccttaaagacaacgaacgtgtcgtgggcttccacgtactgggtccaaatgctggagaggtgacgcaggctttgcagccactcaagtgcgggctgaccaagcagcagctggacagcaccattggcatccacccggtctgtgcagagatatttacaacgctgtcggtgactaagcgttctgggggagacatcctccagtctggctgctgaggttaagccccagtgtggatgctgttgccaagactacagaccattgcttgcttccttgtccacacccaggtgaagttcaggaaggctcttgggttcttggcaccaattcaaggtgctatcctaaggccaccaggtccctgggatcttgtgggtaggaggtggcaggtagaagaaggctgcagcatcgcactggggtcaccatgacggactcagactgacattcggcagagcatcacggtgcgtccatgaagtcactagcctcaagcccaagtggtgggcagtgacagaaagctgtcgatctgttgggttcaacctttycctgtagactgttttagtctcgccttcaagctatgtaatgtcaatwctgttttttcttttctccatggggttaatgatactagaggtagggaatgttagcaatcagtttttgtcatggctggactatccacagcacggtcgttactgtgtggaagggrgtcagatggcttatgagagccaaaccagtttatcctgagaaagacgaattaccctgtggctaaaatacactgtttttactaammwrwrwarmawwrwmycctttaataagtttaggtcttctgtccaaactgagaaaaaccatggtcactttggcaaatttccggcagtgtgtgtccctgccgctgcttagcaagggcggcggtgacttggctaatctactcagactcattgcatggctcttgggtatcaysragwattcsagcakagagcctgaccagcagtaaatgtctctcctggtacagttactgtctgctkgwctaagtgcgctgagatggttctcaatggagaatgcttaatttgcttttaacytcttgtttttgtgaggtgggtttagttttaagcttatgtcccataagaactccattcacaggcaagcagctctttccgcacacagcatatgcatcttctgaggtaatggctttataaggaagctgttcataacataagttattattattattgaacacaggtggatgtgarggattttttttcattgaaraaccaaakgrttykkcykttttctgttcagtgagcccacagagaccctggcaggaacagcattgctgscagcattgctgctgggcttttccagtgtagttcttgctcctaggtcacrygasagygaacacgatgcctgaggaccgcgcagacaggtttcccaccgcacagccgsccarggtcccgccatgrtycggyagckmsttttcttgtcytcccytctgcccatctccacctgcagtamtgagtggcgtttcccagtaccytktggggccacctcagggaacgggtttgcctggtattcagccagcggcacccaccytgccccacgaggctccctcagatccgccccacatccgtgtgttgaagaggagaaargaccagggaaccaaaggagtggactgttgagttttatttawttattwtttgtttttttttctcctaagtctgccagtctctgagatcagaacgacagtgtagggtagccgcctaatcatgttgtgattctattggtgggatgaaatgttccgcccccatggaaggagtacactcktcgtttatgttctgtaatcgcmcaatgtactgtarmccaaattccaattccatgtatttttattacagtttytctgggaaaaaaaaatgtgaamcaataaaaaggtgttgmwtcmcrdrwrwrmmwraaaaaaaaaaaaaaaaaaaaa

SEQ ID NO: 2974 - DNA, 3058 bp, Rattus norvegicus
  misc_feature (2793)..(2793): n is a, c, g, or t
  misc_feature (2795)..(2796): n is a, c, g, or t
ggcacgaggaaaggcgcaggggtgggagctgtcgccggagctgccacagcaaaagttctctcccctccccctcgccctcctcgccgggcccgtgggaaggtcggagctgcggccgtctgcagtcagtgaccgcgcgcctcggcgcagccgcggatagaagagaagaatcagtggcttggaaatttagccaagtgatctggcgggatgggctcatgcctgacacactttatagaggcatcggatggcacaagtgactgagaggatcctgtgagtttctggagcctgtgaaaggtagaaactcaaccatgatttctttctcaactcaacagcattcccttccttgaagtcttcagtttttacttcagcctcaggcagttatacttaagcatgaacattgacgacaaactggaaggattgtttcttaaatgtggcggcatagacgaaatgcagtcttccagggcaatggttgtaatgggtggagtgtctggccagtccgccgtgtccggagaacttcaggagtcagtacttcaagatcgaagtttgcctcaccaggagatccttgctgctgacgaagtgttacaagagagtgaaatgagacaacaggatatgatatcccatgatgaactcatggtccacgaggagacagtgaaaaatgacgaagagcagacggacacccacgagcggcttcctcaaggactgcagtatgcgcttaatgtccccataagtgtaaagcaggagattacttttactgatgtatctgagcaactgatgagagacaaaaaacaagtgagagagccagtagacttacagaaaaagaagaagcggaaacaacgctctcctgcaaaaatccttacaataaatgaggatggatcacttggtttgaaaacccctaaatctcacgtctgtgagcactgcaacgctgcctttagaacgaactatcacttacagagacatgtcttcatccatacaggcgaaaaaccgtttcaatgtagtcagtgtgacatgcgtttcatacagaagtacctgctccagagacacgagaagatccatactggtgaaaaaccatttcgctgcgatgagtgtggaatgagattcatacagaaatatcacatggaaaggcacaaaagaactcacagtggggagaagccttaccagtgtgaatactgcttacagtatttttccagaacagatcgtgtattgaaacataaacgtatgtgccatgaaaatcacgacaaaaaactaaacagatgtgccatcaaaggtggccttctgacatcagaggaagattctggcttttctacgtcaccaaaagataattcactgccaaaaaagaaaaggcaaaaacctgagaagaaatcgtccgggatggacaaggagagtgtcctggacaaatctgacacgaagaaagacagaaacgattacctgcccctctactcgtccagcactaaagtgaaggacgagtacatggtggcggagtacgctgttgaaatgccccattcctcagtgggagggtcccatttagaagacgcttctggagagatacacccacccaagttggttctcaaaaaaatcaatagtaagagaagtctgaaacagcccctggagcaaagtcaaaccatttcacccctatccacttacgaagacagcaaagtttccaagtatgcatttgagcttgtggataagcaggcattactagactcggaaggcagtgctgacatcgatcaagtggataacttgcaggaggggcccagcaaacccgtgcacagcagtactaattacgacgacgccatgcagttcctgaagaagaagcggtatctccaggctgcaagtaacaacagcagggagtacgcactgaatgtgggcaccatagcttctcagccttctgtgacacaagcagccgtggccagcgtcattgatgaaaacaccacagcatccatactagattcccaggcactgaatgtggagattaagagcaatcatgacaaaaatgttattccagatgaggtcctgcagactctgctggatcattattcccacaaagctaatggacagcatgagatttccttcagcgttgcagataccgaagtgacttctagcatatcaatcaattcttccgatgtacccgaggtcacccagtcagagaatgttggatcaagctcccaagcatcctcctcagataaagctaacatgttgcaggagtactccaagtttctgcagcaggctttggacagaactagccaaaacgatgcctatttgaacagcccgagccttaactttgtgactgacaaccagacccttccaaatccgmsrgcattctcttccatagacaagcaagtctatgcgsccatgcccatcaatagctttcgatcaggaatgaattctccactaagaacaactccagataagtccmactttggactaatagtcggtgactcacagcacccatttcccttttcaggtgacgagacaaaccacgcctytgccacgtcaacagcagactttttggatcaagtaacttctcagaagaaagctgaggcacagcctgtccaccaggcttaccaaatgagctcctttgaacagcccttccgtgctccataccatggatccagagctggaatagcaactcaatttagcactgccaatggacaggtgaaccttcggggaccagggacaagtgctgaattttcasaattccccttggtgaatgtaaatgataatagagctgggatgacatcttcaccagatgccacaactggccagacttttggctwraaaaaaaaaaaaaaaaaaaananntgtgtaaataatactggcactttagaacagattaatcgagagtggggttactctgtaaaatggagtgctgtacagatctaagagcagtgcgttcataacaagctgataagaatagcaagataatccagtaactgcatttcgtttggttagtccgcattccttgaactgccttacgtgtcgtcaccgttagagaagcgatgcattacctgttttagatcaggatcttgctattcacccacaccaagataaaaaaaaaaaaaaa

SEQ ID NO: 2975 - DNA, 1533 bp, Rattus norvegicus
atggagctgcgtgtgggaaacaagtatcgcttgggccggaagatcggcagtgggtcctttggcgacatctacctgggtgccaacattgcctctggtgaggaagtagccatcaagctcgaatgtgtgaagacgaagcacccacagctccacatcgagagcaagttctacaagatgatgcagggaggagtggggatcccatccatcaagtggtgcggggctgagggtgactataacgtgatggtcatggagttgctggggcccagcctggaagacctcttcaacttctgttcccgaaagttcagcctcaagacggtgctgctgctggccgaccagatgatcagccgcatcgagtatatccactccaagaacttcatccaccgggacgtgaagcctgacaacttcctcatgggcctggggaagaaaggcaatctggtatacatcattgacttcggcctggccaagaagtaccgggatgcccgtacacaccagcatattccctaccgggaaaacaagaacctgaccggcactgcccgctatgcctctatcaacacccacctgggcattgagcaaagccgtcgagatgacctggagagcctgggctatgtgctcatgtacttcaacctgggctccctgccctggcaaggcctcaaagcagccaccaagcgtcagaagtacgagcggatcagcgagaagaagatgtcaacgccgatcgaggtcctctgcaaaggctacccctctgagttctcaacttacctcaacttctgccgctccctgcggttcgatgacaaacctgactactcctacctgcgccagctcttccgcaatctctttcaccggcagggtttctcctatgactacgtcttcgactggaacatgctcaaattcggtgcagcccggaatcccgaggacgtagaccgggagagacgagagcacgaacgggaagagaggatgggacagttgcgagggtccgcgaccagagccctgccccctggcccaccaacaggggctaccgccaaccgactccgaagtgcagccgagcctgtggcttccaccccggcctcccgcatccagcaagctggcaatacttctcccagagcgatctcacgggcagaccgagagaggaaggtgagcatgagactccacagaggtgcgcctgccaatgtctcatcctcagacctcactgggcgacaagaggtctcccgaattgcagcctcacagacaagcgtgccawywswccatctkgkgamatgrgtcacactccagccacctgttctcaccaccgcccaccacgtgccgggccgccatcggaggtgcctgaagagcttgcatcagggagtggtttggccagtcaaagacaagtcctaggagatttcatcgagccttggatgacgcgccatcagccctcgggtgatgacagtggccagctttgtattggactttcccacaatcccctccctgagcatcccggtcaccacacacacttctcacctctctgcagagatcctgagggtgcagtgagatggtgaccatgat

SEQ ID NO: 2976 - DNA, 3694 bp, Rattus norvegicus
tcctagagctcaaagcccaagctccaagaggcctgctccagcatccaggaggtccgaccctgcacacgcctggagatgccggacaacctctacacctttgtgttgaaggtgagcgccagggctgtggctccttggggagacactgctgtctcctcaggtgcagagctatatgcctcctttctgcaggtgcagggccagacagacatcatctttgaggtgggagatgaacagcagctgaactcatggctggcagaactcagggcaagcacaggcctagggtgaggacctgcccatccctggttccctttgataacccctgctggcccccttctcaccagcctcttcccctacaggttggagcacctggacacagagttacctctttccttagtggcagagcctggcccagctatatccccaaggggaagcacggactccctggaccaaggtatgtgccagatccttggtctctgggtgtccttggacatgtggcccctctgcgggtcaccaccaccatctttctgccaggtgcttcacctggggtgatgttggacccagcctgccagaaaacagatcacttcctgtcctgctacccctggttccacggccccatctccagggtgagggctgcacagctggttcagctgcagggccctgatgcccacggtgtgttcctggtgcggcagagtgagtcccggagaggggaatatgtactcacattcaacttacaggggagagccaagcacctccgcctggtgctcacagagcgtggacagtgccgggtgcaacacctgcacttcccctcggtggtggatatgctccgccacttccagcgctcccccatcccacttgaatgtggagcagcctgtgatgtccgactctctggctatgtggtagtcgtctctcaggcaccaggtaggaagcccaaagttgtgtcaaggggtggtgtcacagcaagtacagcacgtacaaaacttccttcctggttacgccttcttcatggagtcatccatgttatctctccaggttcctccaacaccgttctcttccccttttcccttcctcactgggactcagagctgggccatccccacctcagctctgctggctgtccccctggccatggtgcagaggctctccgtggccaagtgacacctcctgagcagatcttccacctggtgccttctcctgaggaactggccaacagtctgcggcagctggagcttgagtctgtgagcagtgcccgggactcagactatgaaatggactcctcctcacggagccaccttcgggccattgacaaccagtacacccctctctcacagctgtgcagagaggcaaacttgtgaatgtaaccattttccttccctccagagaactacaggctgctgctgtcagccttccccagctcagatgtgcctgcttccaccacacacaaggctgtcacaggcttctgtcagccacagctagcctggcttcttcccactgtctgtagatgtagttcttgtgcacaggtgccactagctggcaccaaggcctcgttcccaacccagaggaggcggggctgcaggcccagagctggcagtggaaactgacagagctgatgacagacttcttaccaggtagggtcatcgggaagcacaaaacactaacagtccctggattctcacatggtgtccttccctgtagcttcattctgtggcaagtctaagtcccatgtcacaggcgtaggacacttcataatcctgcttctactcttagctttggacagaagctctgccagaggggcaagcttaaagatcaaaaatgatttaaacattttacctcagagtaattatttttaaagggttcaggtttccacttgatattatagcttacttcactgcactgccctgctaccccctgccactgtaaagttggggggagctgagtccccctgctttgcttaccttgagccaggctagcatgctagtgtccttgtctgctcaccctcaggacagttgcctgctacggggtagacactgtcctccctaatgtagagaatgaagtgtgtcaccctctcagggaaatccaggcagcttgcagagagaggagggtggcaggggacattccaccccagtgccttatgcattaaaaacaaaatcaggactgtggtttacagcagcgttagaggatgagatgaatgggtgggggaagacaaacacagatggaaggcctctaggcttctttagtgaacccacattttactccccccaaccccctcccagcatctaggggcttagtgagtttggcccatgctatgaagaaactcctgtaaccgctcctaggtgttcttatccatacaatctttccatctagacagagccaaaaactgtcatctttcctaagggatgcagttcacagggactggagcaggctgttcatggcacaaacagtgcttacagcagtggctttgggaaaccacaacttaattccttgaacattgagaggcagccatgctgctgccctgctgcagacagcagtgctgactccccctctgctcaccttgcactcgggaagcctgcgtgggctttggtgatggaagcagctgcacctcagcttcgacacccaccacaggtgtggacctgtgctcatcttaggacagcgccttccttcactgcacatcaggtatgaaccagagacgtgagcagtaacagccagtgggccaggccggctctaatccacacaggatgcgtggacggctgtgccctgcacctggccaggagctaaacccacttcaaacttggggcactcatttctcctgggccttcaaagagagacttgctaggtgctgtaagccagcaccttggccccttagtgctgggattcactcactgtggacagctttgtttcaaaaaatgtccaagatatcagaaaacaaggtaaaaaagtctcatgactctgtgacagagtgacaacactaagccagcaccttttctttaagctaaagtaggtcagttggctgacggggacagacgggtaccgggtatgagaactcctgggccagataccctgtgtcaaagccaggccccactcccaccctcagcagtgtcttctggccacacaaggcaggatgggtcagtggccactagagacagagcagctcaacagtcctgaacccctgctcccttctcccgagtactcaactcagactaacaagcaccagcaccaaagagttaggtcaactaacctgccttgtctttaccagcatccacatggctttatctgtataaatcttctgcctttgatcatttctggatggtgtaggaaaaaaggaatagtgaccattacagtcttgggccagacaacactatttttacctaagtctcttaacctaaattacgtcgcctcttcctgaggctcagtctcttgtttaaatgttaccttggtgcaaataaaagtgataaactgtcccccactgcctcctgacgagacacatctgtctaatggccagcgtgtggctggaataagcagcattgtgaccacaggatcaggggacttcatcttctatcattagagcagaaggtatttggcaaatctttgttttatgtactgtacgagtaacttattcttgaataatgcaaattttcctacaatgtacaaattgctgtatgtgaattaaaaaggttttcagaattamaaaaaaaaaaaaaaa

SEQ ID NO: 2977 - DNA, 3824 bp, Rattus norvegicus
agacctgccgggcgcatatttattcacagttttgtcccatgttaagtcggttagcatagtgaatctgagtgcatagtatgtcatttcattccgttgagtttctcgagtgttttctttaaatgtctgcagagtcgctacccttccttgaactatgaagcactgcaatcttcttaattctcagtatgaagagagatttttgagctttaagtctgaggggaactcagcaggcctggttggcgtctgcaatgaacatcaagaaaccatcgtgctgtgggaatgtgatcgtttttctccctttttgagagatctttccttttgatgccagttttcttccttgtttacacaagttcaacaatttgaaaggaaaaggcaattgtaagggttttaaaatggcagagaaatttgaaagtctcatgaacattcatggctttgatctgggttccaggtacatggacttaaaaccattgggctgtggaggcaatggcttggttttttctgctgtagacaatgactgtgacaaaagagtagccatcaagaaaattgtcctcaccgatccccagagtgtcaaacatgccctccgtgaaatcaaaattattagaagacttgaccacgataacattgtgaaagtgtttgaaattcttggtcccagtggaagccagctgacagacgatgtgggctctctaacagagctgaatagcgtctacattgttcaggagtacatggagacagacttggcgaacgtgctggagcagggccctttactggaggagcatgccaggctcttcatgtaccagctgctgcgtgggctcaagtacatccactctgcaaacgtgctgcacagggatctcaagccggccaaccttttcattaacactgaagacttggtgctgaagattggtgactttggcctggcccggatcatggatcctcattattcccataagggtcatctttctgaaggattggttaccaaatggtacagatctccacggcttttactttctcctaataactatactaaagccattgacatgtgggctgcaggctgcatctttgctgaaatgctgactggtaaaaccctctttgcaggtgcacatgaacttgaacagatgcagctgatcttggagtctatccctgttgtgcacgaggaagatcggcaggagcttctcagcgtgattccagtttacattagaaacgacatgactgagccacacaaaccgctgactcagctgcttccggggattagtcgggaagcactggatttcctggaacagattctgacgttcagtcccatggaccggctgacagccgaggaagcactttcccatccttacatgagcatctactctttcccaacggacgagcctatttccagccatcctttccacatagaagacgaagtggacgacattttgctaatggatgaaacacacagtcacatttataactgggaaaggtaccacgattgtcagttctcggagcatgactggcctattcataacaactttgatatcgatgaggttcagcttgacccgagagctctgtctgatgtcaccgatgaagaagaagttcaagttgatcctcgaaagtacttggatggagaccgagagaagtatctggaggatcccgccttcgacaccagctactctgctgagccttgctggcagtacccagatcaccacgagaacaagtactgtgatctggagtgtagccacacctgtaactacaaaacaaggtcgccatcatacttagataacctggtgtggagggagagcgaggttaaccattactatgagcccaagcttattatagatctttccaactggaaagagcaaagtaaggacaaatccgacaagagaggcaagtccaagtgtgagaggaacgggttggtcaagcgcagattgcgcttgaggaagcgtcccagcagctggctgagagggagaggggccaaggctttgactttgatgccttcatcgcaggcaccgttcagctcagtgcccagcgtgagtctgctgacgtagttgacaagttaaacgacttgaatagctcagtgtcccagctagaaatgaaaagcctgatatccaagtcagtcagccgagaaaagcaagaaaagggaaggsctaacctggcccagctgggagccttgtaccagccctcctgggagagccagtttgtgagtggcggggaggagtgcttccttatcagtcagttttgttgtgaggtcaggaaggacgaacacgtggagaaggagaacacttacaccagctatttggacaagttttttagcaggaaggaggattctgaaatgctagaaactgagccagtggaagaagggaagcgtggggagagagsccgtgaggcagggcttctgagcagcggtggggagtttctcctgagcaggcagctagagtccataggcaccccgcagttccacagtccagggggatccccactcaagtccatccaggccacgttaacaccttccgctatgaaatcttcccctcaaatccctcacaagacatacagcaacattctgaaacatctgaactaaacactcagcagacacttcttttgttcttcawraaawrwrwwrwrwmttttttatcactaatgttttaagtcattttttttttacttgaatcagaaggtgtcattaatttgcaaggatttttcttggttctcagtttgtaaaacacagagttttttctacatgtgagttagttttcatttgaactggcatgtcgtttgcacacacacaaagaatagagcaaaacaatgcagtgcaggaggagacaagatgcgctaggatggacagacattctcacagaccagtgacctgcttacaggaaacaaaaccttgccttgaaacttacacagtgagactgtacataattgcatgaaaagatctatttttttcctgaaacatttttcattcattagtattttcaagtttttcatactgtacacatttcttaagacacatgatrccagcagcaactgaaaacgaatgccgaatttggtacacatgtgttatctacctcaaggtaacaaaagtatgcgggcgaaacctaacccacccatagtsstccgcggcatatgcacttgtatctagccagcgttggccgcagtaaccaatgagactcgtccgccatttatcaatgtcctggtgttcatcctttacagtgaagtgttagatacatcacatcttatttatttttagcaaatcagtatattttctgtatttaattataaaaggtaacttwktttwwktttwtttgcaactgcccttcttcccgtttggcactatggtttgttgcctgccgagctgatctgagaagtcagcttgtcccgaggctgtccatgtacgttaagtaaagtgctcactgtgtatwggaatctgtattttggaggtgcttgatctatctacaaagaaraaaattaggaatttattataaaatgctcctagaagtcttaatggtgtttattttttaaaacyttgtaatgttagacttgtktgcatggaagtgattaaggtacatcattattgtagtktgaacattgtacatgdtaagcyttcccccacccccgtttttactgtatgttyttattgaatrawctattccccatcchtaggcaagcatgaataaaattaggttaaatgtarmawrwmamwrmwmartcttttagagttgtttcgtctgttttattttgctgaatcctgtctgtatctttggttatcctctttgaaggaaaaagaaaaataaagwtggccmkcrkgcamrrmwmmwrwwwramwmwwwrgaaggraaaaaaaaaaaaaaaaa

SEQ ID NO: 2978 - DNA, 1969 bp, Rattus norvegicus
gctggaccccagcctttcttcgctttcgcctcgcggtcgatgactccctagaccccctggcctacgatcatgaccacgtccctgcaagatgggcagagcgccgcgggccgggcgggcgcccaggactccccgctggcagtgcaggtgtgccgcgttgcccagggcaagggagacgcccaggacccggctcaggtccccggactgcacgcgctgtccccggcctcagatgcgacccgccgcggtgccatggacaggagaaaagcgaaagatctggaagttcaggaaacgccttccattcctaaccccttccctgagctctgctgttctccacttacatcggtgctgtcagcaggcctcttccccagatcaaattcaaggaagaaacaggtgattaaagtttacagcgaggatgagaccagcagagcgttagaggtgcccagtgacgtcacagcccgtgatgtctgccagctgttgatcctgaagaaccactatgtcgacgacaatagctggaccctttttgagcacctgtctcacacaggcgtagaaaggacagtggaggaccatgagctgctgactgaagtgctgtctcattgggtgatggaagaagataataagctgtatcttagaaagaattatgccaaatatgaattttttaagaacccaatgtatttctttccagagcacatggtgtcttttgcaactgaaatgaacggtgacagatcccttacacagatcccgcaggtgtttttaagctcaaacacatatcctgaaatccatggcttcctgcatgcaaaggaacaggggaagaagtcttggaaaaaagcttacttttttctcagaagatctggtttatatttttctactaaaggcacatccaaggaaccacggcacttgcagtttttcagtgaattcagcactagtaatgtttacatgtcactggcaggcaaaaaaaagcatggagcgccgactccctatggattctgctttaagcctaccaaagcaggagggccccgggacctgaaaatgctgtgtgcagaagaagaccaaagcaggatgtgctgggtgaccgccattagattgctcaagtatggcatgcagctctaccagaattatatgcatccatcccaagctagaagcgcctgcagttctcagagcgtatcacccatgagaagcgtatcagagaattccctagtagcaatggacttctcaggtcagaagaccagagtcatagacaaccccactgaagccctttcggttgccgttgaggaaggactcgcttggaggaaaaaaggatgtttacgcctggggaatcatgggagtcccactgcgccctctcagagctctgctgtgaacatggctctccaccggtcccagccatggtttcaccacagaatttctagagatgaagctcagcagttgattacccggcaggggcctgtggatggagttttcttggtacgggatagtcagagtaaccccagaacttttgtactgtcaatgagtcacggacaaaagataaaacactttcaaattatacccgtggaagatgatggtgaggtgttccacaccctggatgatggccatacgaagttcacagatctcatccagctcgtggagttctaccagctcaacaagggggtccttccttgcaagctgaagcattactgtgctmggatggctgtttagccaaactgtctgtgactcgttaaactatggaagatggaggatscaaagaagaatgattagagagagagagagagagagagagagagagagagagagagagagagagagaggagatcacaaggctggaaacaratcatggtgaaaagaagattcacctgtgggttacaaaaaaataggtcacgtattgcaaattagtgaagacttggattcgtattactctcgttactttaaatttattagttaaaattaaaccttmttaaaaartaaaaaaaaaaaaaaaaaa

SEQ ID NO: 2979 - DNA, 1343 bp, Rattus norvegicus
caagakggcagcgwskgaagaagagttactgctgycgcggcttccggagctsttcgaaaccagcaagaaacttctggaggagttggaagtagcaactgaacccaccggctcccgaacaatccaggataaggtgtccaaaggactasaactccttgagaaggctgccggaatgttatcgcagcttgatttgttcagccgaaatgaagatttggaagagattgcttctatcgacctgaagtacctgatggtaccagcgttgcaaggagctctcaccatgaaacaagtcaaccccagcaagcgtctagatcatttgcagcgggctcgagaacacttcatacatttcttaactcagtgtcattgctatcatgtggcagagtttcagctaccccaaaccaagaataactcagctgaaaataatactgctcgctcctccatggcctatccaaatctcgktgctatggcatctcaaagacaggctaaaatagagagatacaagcagaagaargaggtggagcataggktgtctgcactgaaatctgctgtggaaagtggtcaagcagatgatgagcgtgttcgtgaatattacctccttcaccttcggaggtggattggtatcagcttagaagagattgagagcattgaccaggaaataaagatcctgaaagacaaagactctccaagagaggaatcagcttgtcagtcatctcttccagagaagcctccaatgaaaccsttcatcctcactcggaacaaggcacaagccaaagtatttggaactggttatcccagcctggcaactatgamggtragtgactgktatgamcagcatcagaagtacggagccttaccagatcggggaatagccaagccgccatcagctgattttcaaagagcagctcagcagcaggaagatcaagagcaaaaggatgaagagaatgaggagaaagccttgcacaggatgcgagagtgggatgactggaaggacacgcatcccaggggytatggcaaccggcagaacatgggctagtcattccagarggccaaaggacaasgtggtgcacmccttcacaccaaggacaacttcaggagggtgcagtgagggcasccatgtggagtcttgcatkgcatttgatagtgtcaaataatkgcttgwmccctaggtaatgmccagtgaatttttgtttggctttattaatytcawmawrrwrwawwmwrawwwmwwaarmrrwmaraaaararcaccaagaaatggctctatrtaatcaacgatagtatgaagtaattctcttaaaaaaaataaaacccccctattatgtgggcctatgcmmaaaaaaaaaaaaaaa

SEQ ID NO: 2980 - DNA, 1959 bp, Rattus norvegicus
  misc_feature (1899)..(1899): n is a, c, g, or t
ggaattcggcacgagcagcaagcgctgttgctccgagctactcccaggcttctgaagtyackkctsaagtgctgtggaggagcaatcaccggtgcggacacagagctcccgcctcccacagccatttccagggtaacgaagtaggagaccccctcctgcgaccccctcacgatcgccggtgcagtcatgagccccgcctccccctggtgcacggagaggggcggggcctggaacgaggctgcttcgtgacccactatgtcttcccccacaagttctctggacactcccttgcctgggaatggttctccccagcccagtacctcctccacttcacccactattaaggaggaggkacaggagactgatccacctccaggctctgaagggtccagctctgcctacatcgtggagccagaggatgaacctgagcgcaagcgsaagaagggtccggccccgaagatgctgggccatgagctgtgccgcgtgtgcggggacaaggcctcgggcttccactacaatgtgctcagttgtgaaggctgcaaaggcttcttccggcgtagcgtggtccatggtggggccgggcgctatgcctgtcggggcagcggaacctgccagatggatgccttcatgcggcgcaagtgccagctctgcagactgcgcaagtgcaaggaggctggcatgcgggagcagtgcgtgctttctgaggagcagattcggaagaaaaagattcagaagcagcaacagcagcagccaccgcccccgaytgagccagcatccggtagctcagcccggcytgcagcctcccykggcacttcggaagcaagtagccagggctccggggaaggagagggcatccagctgacagcggctcaggagctgatgatccaacagttagttgccgygcagctgcagtgcaacaagcgatctttctccgaccagcctaaagtcacgccctggcccttgggtgcagaccskmaskmssgagacgctcgkcassarsgctttgcccacttcactgagctagccatcatctcagtccaggagatcgtgsacttcgccaagcaggtsccagggttcytgcagctggsccggraggaccagatcgccstcmkgmasgmrkccaccatcgagatcwtgttgctagagacagccagacgmtmcaaccacgagrcagagtgcatcacgttcstgaaggacttcacytacagcwaggacgacttccaccgtgcaggcttgcaggtggagttcatcaatcccatctwtgagttctctcgggctatgcgtcggctgggcstagacgatgcagagtatgccttgctcattgccatcaacatmtyctcagmggaccggcbkmawrwgcwggagcccasccgtgtggmggctmtgcwsyagmmmtatgtggakgccctcckskcctrcasgarkatcragcdkcmgsrvsacsmkctgcgcttcccacgaatgytcatgaagctggtgagcctgckcaccctcagctccgtgcactcggwgcaggttttcgcattgcgtctccaggacaagaagctgccgcctttgctgtccgagatctgggatgtgcatgagtasgggccgccacaagtgccccakcmttggtggtgtctacttgcagatggacgcttcctttgcctttcctgrggtgggaggacactgtcacagcccagtcccctgkgctcggrctgagcgagtggcagttggcactagaaggksccamsmmwycsgctragwsttccagragtggtgagggtmacaggcybtakccthtgwtctktrccagywgcccttcctsccgakcttacacctcagsctaccacaccatgcaccttgagtggagagaggttagggcaggtggctccccwcagttgggagaccwcrkgccmnytcttctgccccttttatttaataaaamavdhrrmhwmmwmtrwrvmdmrwdmmraattc

SEQ ID NO: 2981 - DNA, 4457 bp, Rattus norvegicus
ccgagtctcctgcctcccgccccccacccctccagcgcctgctcctcctccgctccccatacacagacacgctcacacccgctccttcacttgcacacacagacacacgcgcgctcacacgctccgcacacacactccactctctcccgcgcgctcacacccctctctctcggcgccctcgccggtgtcgcgccgcgccgcgccgcagccggacgcccctccagggctcactttgcaacgctgacagagcgggcagtggccgtggaggtgggaaacgtggcgacatcctagcccctggtcgcagccggagactggacgctgcggaacctctcggcggcgctctcccatgagttgggatcgcagcatccccagccagccgctgctcaccgcctctgggagccgctgggtttgtgcaccgcagcccttccgggacagcagctgtgactctcccccaatccagatttcggggtcgctctctagaaactcgctctaaagacggaacctccacagaacccaaagcccactgcgggagagcgcagcccgacaagcccgggcgctgagcctggaccctcaacagagcgggccagcacagcggcggcggctgcttcgcctatcccgacgtccccgcctcctacactctcagcctccgctggagagacccccagccccaccattcagcgcgcaagataccctccagatatgccctgcgtgcaagcccaatatagcccttcgcctccggggtccacttatgccacgcagacttatggctcggaatacaccacagaaatcatgaaccccgactatgccaagctgaccatggacctcggtagcacggggatcatggccacggccacgacgtccctgcccagcttcagtaccttcatggagggctaccccagcagctgcgaactcaagccctcctgcctgtaccaaatgccgccttctgggcctcggcctttgatcaagatggaagagggtcgcgagcatggctaccaccaccaccaccaccatcaccatcatcatcaccaccaccaccagcagcagcagccgtccattcctcctccctctggccccgaggacgaggtactgcccagcacctccatgtacttcaagcagtctccgccgtctacgccgaccactccaggcttccccccgcaggcgggggcgctgtgggacgacgagctgccctctgcgcctggctgcatcgctccgggaccgctgctggacccgcagatgaaggcagtgcccccaatggccgctgctgcgcgcttcccgatcttcttcaagccctcaccgccacaccctcccgcgcccagcccagccggcggccaccacctgggctatgaccccacggccgcagctgcgctcagtctacccctgggagccgcggccgccgcgggcagccaagctgctgcgctcgagggccatccgtacgggctcccgctggccaagaggacggccacgttgaccttccctccgctgggcctcacagcgtcccctaccgcgtccagcctgctgggagagagccccagcctaccatcgccacccaataggagctcatcatccggcgagggcacgtgtgctgtgtgcggggacaatgctgcctgccagcactacggagtccgcacctgcgagggctgcaagggcttcttcaagagaacggtgcagaaaaacgcaaaatatgtttgcttggcaaataaaaactgcccggtagacaagagacgtcgaaatcgatgtcagtactgcaggtttcagaagtgtctcagtgtcgggatggtgaaggaagttgtgcgtacagatagtctgaaagggaggagaggtcgtctgccttccaarmcaaagagcccactacaacaggagccctcgcagccctcyccaccatctcctccgatctgtatgatgaacgcccttgtccgagctttaacagacgcaacgcccagagaccttgattactccagatactgtcccaccgaccaggccactgcgggcacagacgctgagcacgtgcagcagttctacaaccttctgacggcctccatcgacgtgtccagaagctgggcagaaaagatccccggattcactgatctccccaaagaagatcagacgttacttatagaatcagcctttttggagctgttcgttcttagactttytatcaggtcaaacactgctgaagataagtttgtgttctgcaatggacttgtcctgcaccgacttcagtgccttcgcggatttggggagtggctcgactccattaaagacttttctttaaatttgcagagcctgaaccttgatatccaagccttagcctgcctgtcagcactgagtatgatcacagagcgacatgggttaaaagaaccaaagagagtggaggagctatgcaacaagatcacaagcagcttaaaggaccaccagaggaagggacaggctytggagccctcagagcccmwsgtscttcgcgcactggtggaactgaggaagatctgcacccagggcctccagcgtatcttctacctgaagctggaggacttggtgtccccaccttctgtcatcgacaagctcttccttgataccctgcctttctgagcaggggaagcctgagcagagagctacttgctctgctggcactggtcattaagtgagcaaaaggatgggtttgaacacctgcccctctatccttcctccaggggaaaaagcagctcccatagaaagcaaagacttttttttttcctggcacctttccttacaacctaaagccagaaaccttgcagagtattgtgttggggttgtgttttatatttaggctttggtgggtgggctgggagggggtaaaatagttcatgaggcttttctaagaaattgctgacgaagcacttttggatgatgctatcccagcagtggggtggggagaaaggataatataactgttttaaaaactctttccgggggaatatgactatggttgctttgtatttaaaaataagaacagccaagggctgttttaccagggtagggctgtgtcttaagactgatccctttagtatgtacttcccggatcgaggcacataagtggtgcaaatgaggcggggaaattcttcatttcttcatttctttcttcttcttaaaataaaatggcaaaaaaaaaaagatggaagattatctacaaatcagacttagcaaaatgataatggctattcgcttccacatacaagtgcaattttttagagtgctgtcttactaagtcttgtttgtgaactctccctcattttatatgaaaataagaaggaggcagtcatgttatcaaacggcgtgctcattttcctagctcacccttggtccacctgccctgtagaacccttcggaggtatggcccttctaagactttcaggccactcttgatggaattcgacacccctcccctcaacccatgactatccagatgtcctgaatggggatcaggttataaaatggattgcatatgactgtgttcgctgtgtgtttgtcaacctggacagagttctctaaaccttctttagttgtagcaagttcctgattcctccattcagaagcccaaggagcattgggtgactcgatcaagggttaaccctaggagaacatgcaaataagtaggaactgggtcagacagggtaagcaccagagatgataaggatttatatataaatatatataaaattaatttttgttattggttatagacaattttggaaagcaagagaatcwtytyttttttttttttaaagaggaaaagatagtattgatgtattagcaaagattagtgggktacggttcaacattccgtgtttgtgcccccttttctatgtttctactgttgatggcatattattatgaaatgattcgttgcatagtgtccttatttgtatgaacatttgtatgcacgttctattgtaatcgctttgcctgtatttattgcaagaccaccagctcctggaggctgagttacagaataatcaaatggggtgttcgtggtgacttggatacaccggttagaaattaaataagcatatatatatatataaaaacatagcaggttacatatatatttataatgtgtctttttattaaccatttgtacaataaatgtcacttcccacgcagttattttatcctttgtttgcagtgacctttaaggcagcactgtttagcactttgatatgaaattttttgcttatttttttgctaaattcaaataacgtttgaagatttttaggtctaaaagtctttatattatatacwctgtatcaagtcaagatacctttggccgttttgctaagactcaaactttgaatgtcaaaccaatgtcacggtagcttctgttagcttttaatcatttttgctttagtctttttttttaaaaaaaraaaaagaaaaaaaacaaactatactgtttatattgtcattaaattatacaatcaaac

SEQ ID NO: 2982 - DNA, 2391 bp, Rattus norvegicus
ccgcccgggcaggtgcggacggaaccaggggtccagcaatccgctagccatggaggaggctgaccggcaactcctgcggcgatgcagggtacgccttgtgcgcgaactgcaagtcgcggagctgtgggacgctctgctgagtcgtgagctcttcacgcgcgacatgatcgaggatattcagcgggcaggctctgggtctcggcgggatcaggccaggcagctggtcatagatcttgagactcgagggaggcaggcccttcctcgcttcatctcctgcttagaggacacaggccaaggctctctggcttcattcttgcaaagcagtgggcaagcagccaagcaggatccagaagcwgttacacccctagaccacctggtgcctgtggtcctgggaccaatgggactcaaatcaaaggagcagaaagtagtgaagctggacccatctcagcctgccttgggaaacctcaccccagtggtgctggggccggaagagctctggcctactcggctcaggccagaggttctcacaccagaaacacccaggccggtggacattggttctggcagagctcatgatgtctgtactccagggaagatcgagagacatgcagatatggcatacaccctggactcggatccctgtggccactgcctcatcatcaacaacgtgaacttctgcccttcctcagggctcagcacacgcattggctcccacgtggactgtgagaagcttcagcaccgcttctgctggctgcgcttcatggtggaggtgaagaacgacctgacygctaagaaaatggtcacggctttgatggagatggcgcaccgcgaccaccgtgccctggactgcttcgtggtggtcatcctctctcatggctgccaggccagccacctccagttcccgggtgctgtctatggcacagatggatgctctgtgtccatcgagagaattgtgaacatcttcaatgggaccggctgccccagcctgggagggaagcccaagctgttcttcatccaggcctgtggtggtgagcagaaagaccatggctttgaggtggccttcacttcctctcaagacaaggccttcgacagtgactctgagccagatgctgtcccataccaggaaggcccaaggaccttggaccagctggacgcagtgtcaagtttgcccacccccagtgacatccttgtgtcctactccaccttcccaggttttgtctcctggagagacaagaagagcggttcctggtacatcgagaccttggatggtgtcctggagcagtgggctcgctcggaagacctgcagtccctccttctcagggtcgccaatgctgtttctgagaaaggggtttataagcagakkcctggctgttttaacttcctccggaagaagctgttctttaaaacttcatgagtyaggggctgctctctgcctcatttttctcccaaaagccttcatggcctggagtagsccaaggtcagaactgtcccgtgaagcaaggatttcgaactggggcaggctgctcttccccgtttcccatgcagacaggctcctagcagcttccaggttggaggagacgtgggacggtgggaggggaggaacaragtactgtggatgctgcctggccgcttcatctgtggttagggactgtggcctgggacccccaggcctctctagaacagggcttctctgccgatgtaccacggacacatgaggttgtgtaatyckgycadrrramwrmmmmrwrwgttgtagtgttttgagctgtctctggtctccacctgagcacccctcctgagttctgccaaccagacatgtcttcaggcattgtcatgtgtgccctgggggacattacagcacccccctcccagggccatcgcccacaggggtctgtggctgcagacaccagcatcactgcttcccagacccacagtccagctggcccagtgtgaatacctggatctggactgcgtctcatcaaagtttccagaagggttaattcttccttgagcacagtatttatccttaaacaataaatcttagscaaaarramwrwmwwwwrmmtgtatcatccccaccctcactytgctcttcctacaatggagactagctttttcctgagtatttctctgtgttccaaggtctcggcctgagcccaggagttgactgaggtgggagccagagtccccactgatcaagtctcctgtctgttggttaccctagtggggacacctggacagtgtctcccagtgtcttccttgctaagtgagcctggtcctccagtggcagtgactgggcaacagtgacatgctggcctcccctgggaagggtaccatccccgtctttaaagctgttctgcttyaaaaaaaaaaawaaaaaaaaaaaaaaaa

SEQ ID NO: 2983 - DNA, 3435 bp, Rattus norvegicus
gcctggctcggccccgcgtggagcagcggtggcctgtgagggtcaaagcttgtgattctcgatggagagtgaaagcacagcttcatgatgagaaccagcccccggcggccactgattctcaagagacggaggctgccccttcctattcaaaatgccccgagtgaaacctcagaggaagaagcaaagagatcccctggacagcaggagcctactcaagcacaggcctcccaagatgtggcagagtccagctcttgcaaatttccagctggaatcaagattatcaaccacccaaccgtgcccaacacacaagtggtggctatccccaacaacgcggacatccagagcatcatcacagcgctgactgccaaagggaaagagagtggcagcagtgggcccaacaagttcatcctcatcagctctggaggggcctcatctcatcctcctgatcctcaatctcaagcccaaaccagcactgattccaagagaacagaactgatcaccgagacgttgggaccaaagccaggggctaagggtgtgcctgttcccaagccacctggagctcttccaaggcaaagacaggagagctgtggtggtgaagcggccggctgcacactggacaacagcttaaccaatatccagtggcttggaaagatgagttctgatgggctgggccgctgcagcattaagcaggaactggaagagaaggagaattgtcacctggagcagaatcgggttaaggttgaggcgccctcaagagcatcagtgtcttggcaggactctgtgtctgagaggccaccctactcctatatggccatgatacagttcgcgatcaacagcactgagaggaagcgtatgaccttgaaggatatctacacttggatcgaggaccacttcccttattttaagcacattgccaagccaggctggaagtgttggcaccaggcctaccacaagctcgggccacagaactctattcgtcacaacctttctctccatgacatgtttgttcgagaaacatctgccaatggcaaggtctccttctggaccattcacccaagtgctaatcgctacttgacattggaccaagtgtttaagccactggaaccagggtctccacaatcgcccgagcacttggaatcacagcagaaacgacccaatcctgagctccgtagaaatgtgaccatcaaaactgaactcccactaggcgcacggcgaaagatgaagccactgctcccacgggttagctcatacctggtgcccatccagttcccggtgaaccagtccctggtgttacagccctcggtgaaggttcccttgcctctggcagcatctcttatgagctcagagcttgcccgtcatagcaagcgagtccgcattgcacccaaggtgctgctatccaacgaagggatagccccacttcctgccacagaacccatgaaggaggagaaacccctgcttggagaagggctattgcctttgcttcctattcagtccattaaggaagaagtaattcagcctggggaggacataccacacttagagaggcctatcaaagtggagagccctcccttggaagagtggccctctccgtgtgcatcagtgaaagaggaactgtccaactcctgggaagattcttcctgctctcctaccccaaagcccaagaagtcctattgtgggcttaagtccccaacacggtgtgtctcagaaatgctggtgacaaagcggagagagaagagagaggtgagccgatctcggaggaagcagcaccttcagccaccctgtctagatgagcctgaactcttcttctcagaggactccagcacatttcggccagccatggagatcctggcagagtcttcagagcctgcaccacagctcagctgccctcaggaggagggagggcccttcaagacccccatcaaggagacattgcctgtctcctccactcctagcaagtctgtgctctctagagaccctgagtcctggaggctcacacccccagccaaagttggggggttagatttcagcccagtacgaaccccccagggtgcctttggccctctgcctgactcgctggggcttatggagctgaataccacacctctgaaaagtgttcccctcttcgactcaccccgggagctccttaactcagaagcctttgaccttgcctctgatccctttagcagttctccaccaccacatttggaagccaagccaggctcccccgagctgcaggtccccagcctttcagccaaccgttctctcacagaaggccttgtcctggacacaatgaatgatagcctcagcaagatccttctagacatcagtttccctggcctggaggaggaccctctgggccctgacaacatcaactggtctcagttcatccctgagctgcgatagaggcagggtcttacccttgccactcaagccaccagttatcctggcacttgtgtggctggatagtgcaaggctcagtgtaccccaaaccgtctgagggagctagcaggcaagggctgagcggtgccctttgacctaattatgccaaggtaaaagccacgtctaagccactgctgggacctatgcaagcaataggatctcccagagtcctccactccctgctggcaagtgaagtgggtgtgacagagccgtgaggaccaggaaatgcccacccattagtcacctgctgctcctggcaggataacccttgtaaatggtgtcagttccccaagttgtcctgtaattataaatgtagccatattcccttagctctcattatccagagactgccaggatgggtagggtgacaaggggttgcattagcttctgcttgtgscctttgggggcaggacctgcagttcagcctcttcacactgtgggttctgctgtaggcttctagacacacaggtgtccttgccaggaccccacttactgccctttcctcacagctccccctggttctaagccagtggtactgcatgaagaaatcctgcggcaaagcctattgkctctgggtgtgtggggacgggtgtgcctgaagcaaaagcatgggtactcacgtgagtcctttaggtgtttctctgatcgtgttcccaatcaygscasggagkckarcaktgagaactcaggctgaggcctgaggaggaggaggaagtgaccactgacttgcctggcttccttagcttgcacctgagttttgcaaaaagccaccctagaccccactctacaagctagcacaagaacactactgtaactacctactgaataaagcccaggtggcctgatctcggaawwrarwrarrrrwrawggagcccggagatgatgggcaggcctgcacctgctgcatgggccttgcacaggttgtctctccacatccttctttgactctgaaaaaaaaaaaaaaaaaaaaaaaaaaaaaaaaaaaaaaaaaaaaa

SEQ ID NO: 2984 - DNA, 3736 bp, Rattus norvegicus
tgactccactcagatccatcctggggacctgagcagaagaggttctcgccgcacctaacccttgcctgggagcccgattcttctttgccgctgggcctcggcccagaagccacaacgggcgacacggagccgccagtgctggagggggagccatgggtgcggggcagcgtgggggcagaggccccgggacgcccgccgccccaggcccgtctccgcccgggcacccacggtctccccccttcttggtctgagcagtgcgagtgtgctagggagcccagcggggggggcgggcggttggaaactggcgtgggctggggggtccgagccgcggggggcagtgccatgcacaagcaccagcactgctgtaagtgccccgagtgctatgaggtgacccgcctggccgccctgcggcgcctcgagcctcctggctatggggactggcaggtgccggacccctatgggccaagtgggggcaatggggccagctccggttatggaggctacagctcgcagaccctgccttcacaggcaggggctacccccacccctcgcaccaaggccaagctcatccccacaggccgagatgtggggccagtgccccctaagccagtacccggcaagaacaccccaaaactcaacggcagtggccccagctggtggcccgagtgcacctgtaccaatcgggactggtatgagcaggccagccctgcacccctcctagtgaaccccgaggctctggagcccagcctatcggtgaatggcagtgatggcatgttcaagtatgaggagatagtcctggagcggggcaactctggcctgggcttcagtatcgcaggtggcatcgacaaccctcatgtccctgatgaccctggcatctttattaccaagatcattcctggtggagcagctgccatggatgggaggctgggggtgaatgactgtgtgctacgggtgaatgaggtggacgtgtccgaggtggtgcacagccgggccgtggaggcactgaaggaggcaggccctgtggtgcggttggtggtgcggaggcgacagcccccacctgagactatcatggaggtcaacctgctcaaagggccaaaaggcctgggtttcagcattgctgggggcattggtaaccagcacatcccaggagacaacagcatctatatcaccaagatcattgaaggaggagctgctcagaaagatggacgcctacagattggggaccggcttcttgcggtgaacaacaccaatctgcaggatgtgaggcatgaggaagctgtggcctcactcaagaacacatcagacatggtctatctgaaggtggccaagccaggcagtctccacctcaacgacatgtatgctccccccgactatgccagcactttcactgccttggctgacaatcatataagccataattccagcctgggttatcttggggcagtggagagcaaggtcacctaccctgctcctcctcaggtgccccctactcgttactctcccattcccagacacatgctggctgaggaagactttaccagagagccccgcaagatcatcctgcacaaaggttctacaggcctgggcttcaacattgtaggaggagaggatggagagggcatttttgtttcattcatcctggcaggaggcccagcagacctaagtggggagttgcgaaggggagaccggatcttatcggtaaatggagtcaacctgaggaatgctacccatgagcaggcagcggctgctctaaaacgggctggccaatcagtcaccattgtggcccagtatagacctgaagagtacagtcgctttgaatccaagatccatgacttgcgagaacaaatgatgaacagcagcatgagctcggggtccgggtctctccgaaccagtgagaagaggtccttgtatgtcagggccctgtttgattatgatcggactcgtgacagctgcctaccaagccagggactcagtttctcttatggtgacattctacacgtcattaacgcctctgatgatgagtggtggcaagcaaggctggtgactccacatggagagagtgaacagattggtgtgatccctagtaaaaagagggttgaaaagaaagagcgagctcgattgaaaactgtgaaattccatgccaggacagggatgattgagtctaatcgggacttccctgggttaagtgacgattattatggagcaaagaacctgaagggagtgacatccaacaccagtgacagcgaaagcagttccaaaggacaagaggatgctattttgtcatatgagccagtgacacgacaagaaattcattatgccaggcctgtgatcatcttgggcccaatgaaggaccgagtcaatgatgacctcatctctgagttcccgcataagtttggatcctgcgtgccacataccacccgacctcggcgtgataacgaggtagatggacaggattaccactttgtggtttcccgggaacagatggagaaggatattcaggacaacaagttcatcgaggcaggccagttcaatgataatctctacgggaccagcatccagtctgtgcgggcggttgcagagaggggcaagcactgcatcttagacgtgtccggcaacgctataaagagactgcagcaagcacaactttatcccattgccattttcatcaagcccaagtccatcgaagcacttatggaaatgaaccgacggcagacatacgaacaagcaaataagatctttgacaaagccatgaaactggagcaagaatttggagaatactttacagccattgtacagggtgactcactggaagagatttataacaaaatcaaacaaatcattgaggaccagtctgggcactacatttgggtcccatcccctgaaaaactctgaagaatcccctccaaccattctcttgtgaacagaagaaatcaagtccctcttccctccttcctcttcattcctgtcccacggggagaacaaatgactactgttcttgtccccctttttagatatgtcaaaaattgagttttctagtcctgttcttttttaaaaatgttgtttggttttggtttattttttgggatgatgccatctcactcatcatgtgaccgtgcccattcctgcatggacctttcccgcgctagaccaggtgcaaacccatcagagttgttgttctcataaacacccagcagaagcgcagagaagagacgaggacgatcggaaagacagactctggacaactgcacagcttgtgaagtgagcgaaacagcccacgtgatgaggtgcccctgggactttctaccctgtactgctggcttgcagctctgaacagtgcaagctaacggctacagaaagtatcttatttatatatagatatatatatgtaatttatataaatatatagaattattatatatatatattatacactcttctataatatatatatatattcacatacattggactagaaaaatctatggagatgtccatcaatggtacctatgttattagagaaagtttaattttcatattcccaatcagatgacatcctatgttccactggttgggaaggggttgacaacagtagtaagtgctataccaaagacttggatttggtattctcttcagagctaaggtttgctccaggtggggccaacctacaggaagagaaggggctttggctgggagcttgagcttggagacttgactgaaagcagttctgcccctgcag

SEQ ID NO: 2985 - DNA, 2251 bp, Rattus norvegicus
ggcacgagccctggagctgcgggccgggccgggcggcagcatggcggagagcgaagcggagaccccgggcaccccgggcgagttcgagagcaagtacttcgagttccatggcgtgcggctgcctcccttctgccgcgggaagatggaggacatcgccgacttcccagtgcggcccagcgatgtgtggatcgtcacctaccccaagtcaggtacgagcttgctgcaagaggtggtctacttggtgagccagggggctgaccctgatgagattggcctcatgaacattgacgagcagctgccagtactggagtacccacagcccgggctggacatcatcaaggaactgacgtctccccgcctcatcaagagccaccttccctaccgcttcctgccctctgacctccacaacggggactycaaggtcatctacatggctcgcaacccmaaggacctggtggtatcttactatcagttccaccgctcgctgcggaccatgagttaccgaggaaccttccaggagttctgtcggaggttcatgaacgacaaattgggctatggctcctggtttgagcacgttcaggaattctgggaacatcgaatggacgcaaatgtgcttttcctcaagtatgaagatatgcaccgggacctggtgaccatggtggagcagctggccagattcctgggtgtgtcctgtgataaggcccagctggagtccttgatcgagcactgccaccagctggtggaccagtgctgcaatgctgaggccctgcctgtgggccggggaagagtcgggctgtggaaggacatcttcactgtctccatgaacgagaagtttgatctagtgtataaacagaagatggggaagtgtgacctcacgtttgacttttatttataataccagaatccgcaaacttgcatgctcacggtccccagacgctctactagctaaaagtcctgtttgcgttcatttattccttgctggacactccggaagttgcttggaaacagcagggggcgagcctggtggagagagccgaggagtgagatgatgctgtctacagcagccgcctggccgtagcgtttgagtctccacgtgctggccataccacacgcacgggcaggcaaatgtctgcccctgkaccccatgttattcactgtattttatagcgcttttcactgaaaatcgaaataaatatgtcaaccaaawrmaarwmmawwwmcamgkgkgagcaggagcgagctgtgcckggatgctmkgaarctcksaggggtcackgtratttttatagtcttctctctaggcacagccatcccaccttgtcmcgagrtcaaaggacasgttggsgggagctgsagaggtggsygwagcctgtgsagytcagttttctggaaccatmctgacaccaagccaggtcctgtyccargtstctgagcccagtacagaatgttctggaagggamgctggcctgaggctgcggatggcatctgaaggcatcagtggtgtgwgaagcgtrcccacagacaccagactgcaccaagaactagwwtatctsatagccttyactkgctccccaaggccskgactgkcmcactcccaatggcaagagayatgacataccatggytytgaagtscctagtcatcgtcacgkstgtgscacctgtgccaaggctytygctcgggagacccagtctgmaggttgactgtcctccatgcasataggattgscaagcccacctgwctgagggggcmcytagccctcaaggdkgkytgagggagcaatggscccwkgtactgtccaccctgrcacbwaccggctctgkswtmcagctccaatttgsytmaagtgatgaccasatgatgggkggaccassarattgctgcttgtggggaccaayttattytgttcyttaccaggatgggaagarkcttaacgkggtggggggaggctctggctgtggaaggtgcctgctgtgcgccatctctgaagcaggtttggttgtagcagcgttacctctgtctagaggaaagcttgtgtgggtctggtgcatggttctctgaggtgggcatggcagtgcctttcctgtgtgtctggggaggaaggctgctttctgtgaaattttctttctatttttctatttttagtactgtacggatgttctggaaccacacacggtactctgtgcttgcttgcatctttaataaaagacacctcccctgwmaaaaaaaaaaaaaaaaaaaaaaaaaaaaaa

SEQ ID NO: 2986 - DNA, 1582 bp, Rattus norvegicus
cacgaggcaaatattgcgtgggctcggcgcgctgcgggctgcgggagggtccggacccggcgtccgattgcagcgccatccagtttgcatgaaactttcacctgcgctcccgggaacagtttctgctccgactcctgatcgttcacctccctgttttcccgacagcggrgactgtcttttccaacccgacatggatgtgctcccaatgtgtagcatcttccaggaactacagattgtgcacgaaacgggctacttctcggctctgccgtccctggaggaatattggcaacagacctgcctggagttggaacgctatcttcagagtgagccctgctacgtgtcagcctctgagataaaatttgacaaccaggaagacctgtggaccaaaatcattctagcacgggagaggaaggaggaatcagaactgaagatttcttctagtcccccagaggactctctgatcagctccggctttaattataacttagagaccaatagcctgaactctgatgtcagcagcgaatcttcagacagttcggaggaactttcgcccacgaccaagtttacctctgaccccattggtgaagtcttagtcaattcaggaaatctgagttcctcggtcatttccacacctccttcttctcccgaagtaaatagggaatcttctcaactatggggctgtgggccaggagacctgccctcacctgggaaggttcgaagtgggacctcggggaagtctggcgacaagggtagtggcgacgcctccccagatggcagaagaagggtacatcggtgccattttaacggctgcaggaaagtttacactaaaagctcccacttgaaagcacatcagcgcactcacacaggagaaaagccttacagatgctcttgggaaggttgtgagtggcgttttgcaagaagtgatgagttgaccagacacttccgaaagcawactggtgccaagccytttaaatgctctcactgtgacaggtgtttctccaggtctgaccacctggccctgcacatgaagaggcatctctgagggagcagaggatgaatcctgtaggctaaaagaggcttccaggctaagaggcggccatggaaggagggatacctgtaccagccaaagcatgccattgcttcctacccagttacctccagaggcctctctttggaaggtcttttgagggctacaaaagtcatgtcagaagcggcatagcacccacggtgcatggtgtttgggtgaccccggactcaccactggtttctaaccttctgagaggctctaagcttttcgccgtgagcatgcgcactgagaatgttaatgggtgggaatgactgactgtatgttgaggatctattactgactgtatggcgaggcagactttttttttycccccttgtggtagcaaatmcctgcaagrgacagaaaaaaaaagcagtttgaatkttttgtgtgtgaggagtattccaagggatgagttgaccmccaatcatttcctgaaggktgkmwgcacmwwrrraaaaaaaawaaaamcaaaaaaaaaaaaawaaaaattaaaattaaaaaaaaaaaaaaaaa

SEQ ID NO: 2987 - DNA, 2155 bp, Rattus norvegicus
cggccgcgcgcwccctgctgarttscrsgswrttyckcycggctgcaagatgcccaagaagaagccgacgcccatccagctgaacccggcccccgatggctccgcggttaacgggaccagctcggccgagaccaacctggaggccttgcagaakaagctggaggagctggagctggaygagcagcagcggaagcgccttgaggcctttctgacgcagaagcagaaggtgggagagttgaasgatgatgactttgasaagatcagtgaactgggggctggcaatggtggagtggtgttcaadgtctcccacaagccatctggcctggttatggctaggaagctaattcacctggagatcaaacccgcaatccggaaccagatcatccgggagctgcaggtgctgcatgagtgcaactccccgtacatagtgggcttctacggggccttctacagtgacggcgagatcagcatctgcatggagcacatggatggtgggtccttggatcaagtgctgaagaaagctggaagaattcctgagcaaattttaggaaaagtcagcatcgctgtgataaaaggcctgacatatctacgagagaagcacaagattatgcacagagatgtcaagccttccaacattctagtgaactcacgtggggagatcaaactctgcgattttggggtcagcgggcagctaattgactccatggccaactccttcgtgggaacaaggtcctacatgtcgcctgagagactccaggggactcactactctgtgcagtcggacatctggagcatggggctctctctggtggagatggcagttggaagataccccattcctcctcctgatgccaaggagctggagctgctgtttggatgccaggtggaaggagacgcggccgaaacgccacccaggccaaggacccctgggaggcccctcagctcatatggaatggatagccgacctcccatggcaatttttgagttgttggattacatcgtcaatgagcctcctccaaaactgcccagtggagtattcagtctggaatttcaggattttgtgaataagtgcttaataaagaaccctgcagagagagcagatctgaagcagctcatggtacatgctttcatcaagagatctgatrscgaggaggtagacttcgcaggctggctctgctccaccattggksttaaccagcccagcacaccaacccacgctgccagcatctgagcctttgggaagcagcagagaggaatcctctrsccagtggcatgccatgttgctttcaggcctctcccatgcttgtctawgttcagatgtgcatctcatctgtgacaaaggatgaagaacacagcatgtgccaaatcgtacttgtgtcatttttaatattgtctttatcgctatggttactcccctaagtggawtggctttgtgcttggggctatttgtctgttcatcaaatacatgccaggttgaactacagtgaaaccctggtgacctgggtggtcttcttactgatgtttgcgctgctgttcatcgtgactcactagctggctgcctgtaytgtcaggattctcggacccttggtacttcactcttgctggtgacctctcagtctgaggagagggggccttctgagacccttcacaggcagtgcatgcatgaaaagcatgctttgctgctactgaaatgagcaccagaacgtgtacatcatggtattttatttttgcttttggtatagaactcagcagttcccatttaaaaaaaaaatctaaccagagcccatcactgccatgatagctggggcttcagtctgtctactgtggtgattttagacttctggttgtatttctatatttatttttaaatatactgtgtgggatacttagtggtatatgtctctgagtttggattagtgtttctaaattggtagttattttgaatgtcacaaatggattaaggaatcaacstmkcaagagttctatctttcttccagtctaagtaccaatgctattgtaaacgtgtatagtgcctacaaattgtatgaaaacccttttaaccactttactcaagatgtttatcaaatctaatctcttattctaataaaaatactatcaagttaaagtaaaaaaaaaaaaaaaaaaaacggaattc

SEQ ID NO: 2988 - DNA, 1027 bp, Rattus norvegicus
cagagctccttccaggctgaactttggacgtgtgtatctcgtgtgagcaatgcaggaaggcttttaggtggaggaagtgggctctggctgtcttgtgactatcactcgctcatcacagaagccacagtacagataggaacggagacacagagacacagcacagcgaagggactctcggcatagaactgtaccatgcccaactacaaactgctttattttaatatgaggggaagagcagaaattattcgttatatatttgcttatttggacatcaagtacgaagatcacagaatagaacaagctgaytggcckaaaatcaaaccaactcttccatttggcaaaatccctgttttggaggtggaaggacttacacttcaccagagcctcgcaatagcaagatatttgaccaaaaacacagatttggctgggaagacagagctggagcagtgtcaagtggatgcagtggtggataccctggacgattycatgtcactctttccatgggcagaggaaaatcaagatctaaaagagcggacgttcaatgacttgctcacacgtcaagcacctcatcttctgaaagatttggacacatacttaggagacaaagagtggtttattggcaattatgtaacttgggcagatttctattgggatatctgcagcaccacacttttggtcttaaagcccgacctgttgggcatctaccccagactggtgtcactacggaacaaagtccaagctattcctgctatttctgcctggatcctaaagagsccrcaracmaaactctaaatgattctggacccatcatcagatgagaagtccatcagccggctacagcatytgcaaacttctcgccaccavtaggccttcctctcactttgtagtattgtgcttgctgtgtaggattcctttgttgtgactttgtctttttytgtaggcatttagtttccaatattttttcaaaacttcacacgttttataayymcagggaaatagttcmcrwwwwwaaaaaaaaaaaaaaara

SEQ ID NO: 2989 - DNA, 828 bp, Rattus norvegicus
agctcggcaaggcgcagggacggcggggctctgcttgccatggcccycggcctgcggggcctcccgcggcgcggcctctggctgctgctggytcatcatctcttcatggtcactgcctgccgggaccctgactatggtactctcatccaggagctgtgtctcagccgcttcaaaraggacatggasmcsakagggaagactctgtggtgtgactggggaaagaccatagggagctatggggagctcactcaytgcaccaaactcgtggcaaacaagattggctgtttctggcccaatccggaagtggacaagttcttcattgctgtccmccaccgctacttcagcaagtgcccrgtctcgggcagggccctgcrggaccctcccaacagcatcctytgccctttcattgtgctccccatwacggtcacactgctcatgactgccctggtggtctggaggagcaagcgcacagagggcatcgtgtaggtktcccaggtgatgggggattggggaaccatgggcctggyccagcaacagcatcagkgacagaccccacattgcatcctgctytagcctagttrgcacaggatktgaaagcagatytgcattacactraacctgccccarccagaggcttstaacaggggagcagrgacctgcctctgtttacctctgaaagagcgctaagcgccaggtctctggtrtacttcatcaccaccatcatgtgggcatyccgacctctgaggaagactgcacagatgtgtytstggatgcatagtttgtsattaaacgagcgttcttaaamwwrraaaaaaaaaaaaaaaaaaa

SEQ ID NO: 2990 - DNA, 772 bp, Rattus norvegicus
  misc_feature (608)..(608): n is a, c, g, or t
  misc_feature (617)..(617): n is a, c, g, or t
  misc_feature (624)..(626): n is a, c, g, or t
gtcgccatctcgcccaaggcgtgatggctccgctccgggtagagcgcgccccgggtggatcacagctcgctgtgaccagcgcccagcggcccgcagcgctccgcctccctccgctgttactgctgctgttgctgctgctgctgggcgctgtctcaacctctccggagtccctgaatcaatctcatcctactgaggacagccttctgtcaaaagggaagatggaggactacgaaacaaatgtcctaccttgctggtattattacaagacttccatggactctgtcaaggactggtgcaactggactttgattagcaggtattacagcaacctgcggtattgcttggagtacgaggcagacaagtttggcctgggcttcccaaatcccttggcagaaagtatcatccttgaggctcacctgatacactttgccaactgctccttggtgcagcstaccttctccgatcccccagaggatgtgcttctggccatgatcatagcccccatctgcctcatccctttcctcgttacgcttgtggtgtgkaggagtaaagacggyratgckcaggsgtaggmwsmgcctmtswrcagccmhywbbkmhmtgbvssnwgskkkmanmmbrrknnnwmvtsscctccbtacccmcwtactcccatccttcccmcagacyttsggattggtggaaatggaaraaaggggaactgwtagcmcaatgtccgtcgtctttaaaataaaatatgttyttgkhmaawmvwmaaraaaaaaaaaaaaaa

SEQ ID NO: 2991 - DNA, 3307 bp, Rattus norvegicus
cgagcgcaaagaaggaaagaaagaaaacgagcgagcgagcgtgcgagctagcagggagagcgagcaagcgcgcgcgcgaaaactcccgtcaggtccttgggtgccactgggtagaaacgtgacacttcaggtcatctgtgtatcgcagcagagccctcagcctgctcatcactcggggaagagaacacccatgtgctgtggagatgaacggcgagcagcagcttgatgcagatctcgggtctggtgtagaagtagaggagttcagctgggaagattatctggaagagacaggcgccaccacagctccctatgcatcgtttaaacatgtggatatatgtttgcaaagtgggtttgcccctgggatgaagctggaggtggctctgaggaaggaccctgaaacttactgggtggccaccgtcattacggcctgtgagcagctgctcctgctccgctacgaaggctatggggaggaccggaaggcagacttctggtgcgacatcaggagagctggcctctaccccatcggctggtgtcagcagaacaagaagaccctcgaagctcccgaaggcatcagagataaagtgtctgactggagtgcattcctacagcggaccctgacaggagcctgtggtccccctgtggctctgctagagggcctccgtaacggaaggaatcctttagatctcattgctccgggatccagactagaatgccaagattttcgggactctgtaagcacgtggatagttactgttgtggagaacattggaggacggttgaagctgcattatgaaggacttgaaaggcatgatggttttgaacactggctatattacttagatccgtttcttcatcacattggctgggctgctcagcaaggatacgaactccagcccccattagccatcaggcatctgaaaaatgaagctgactggcaagagattttggccagagtgaaagaggaggagccattaccctcttacttatttaaggataagcaagttattagaacccatgagttttctataaacatgaagttggaagctgtggacccatggtctccttttgggatttctcctgctacaattgctaaggtttttgatgataagtactttctagtggaaatagatgaccttcgaccagaagaccacgcaaggcggtcatttgtgtgccatgctaacagtcctggcatctttcctgtgcagtggagtctaaagaatggtttacacatcaaccctcctccaggcttccggagccaggactttgactgggccgactacctcaagcagtgtggtgctgaagccgctccccagaagtgcttcccgcagtcagtgtctgagcaccagttcaaggagaacatgaagctggaggcagtgaaccctctcttccctgaagaagtgagcatagccaccgtgactgcagtgagaggctcttacctgtggctccagctggaaggttctaagaagcctgtacccgagtttattgtaagtgtggagtcgatgaatatatttcctttgggctggtgtgaaaccaatggccatcctctcagtactcctcgccgggcacgagggcataaactgaggaaaattgcagtggttcaacccgaaaaacaaatactgtcttcaagaactgtccatgaaggcctgaagaatcagctgaactccccccactcagtgatgatcaatggaaaatactgttgtccaaagatatacttcaaccaccgttgcttctcagggccgtatcttaataaaggaagaattgctgagctgcctcagtgtgtaggacctgggaactgtgttctggtccttagagaggtccttactttgcttatcaacgcagcatacaagcccagccgtgtcctccgagagctccagctggacaaagactctgtgtggcatgggtgtggagaagtcctgaaggccaaatataaagggaagagctaccgagctactgttgagatagtgagaacagcggaccgagtgacggaattctgccggcaaacatgtatcaaactggaatgctgtcccaacctctttggtccacgcatggttctggacacatgctctgagaactgctctgtcctgacgaagaccaaatacacacactattatggaaagaagaaaaataaaagaattgggagaccacccggtgggcatagtaatttatcttgtgccctgaaaaaaaccagtaagaggagaaaaaggcggaaaaatatttttgttcataagaagaaacgctcttctgcatctgttgacaataccccagtgggctcaccccagggaagcgggggtgaggatgaggatgatgccgatgacggagatgatgattcgctcactgagggcagtacatctgagcaacaggacgagttacatgaagagtctgaggtgtcagaaaaaaaatcatgctccccttctcccacccagagtgagatgtccaccccactgcccccagacacacagacggayamragrgwgrcccagacttcctcactctcagatggtgaaaacaagcctccttcaccaaaggaaataagaattgaagttgatgaaaggcttcacctggacagtamcccactgaagtggagtgtgsccgacgtcgtgcgkttcatcaggtccaccgactgcgctccgttggcaagaatattccttgatcaggaaattgatgggcaggccctcttgctccttaccctccccactgttcaagagtgcatggacwtaaagttgggccccgccatcaagctctgccatcacatagagagaatcaagtttgcgttctatgagcagtttgccaactgagaaggacaagcagactgagctgggtctttgaagcacagtgcagcaagccctttgccctgctctacgggcagctgcagtcgtcctgggctatcggcctgcaagtgctggcttgctatctttgcactttcagggaaggagggagcaaaaagagcacaaaatggctytcctgcaatggaattgtggacttctgtttagaagattccagtttaaaastcgtgaggaagaaaaaaaacccttaaaagtctgagtgaccattaacgggacctgaaatcaaagaatgactgtgacagctggaccacaccaatttggttattttcattctgttccttccctctgtagattgaactctgttctctgctttctctttgttraaaaaagaggacatagctttaagtcggcactggcttgggatggtgcctaaggcacggcagtgccccactgttgttgtgtttttaagcttttctaaattaaagcagttcattttggggawamwraaaaaaaaaaaaaaaaaa

SEQ ID NO: 2992 - DNA, 2132 bp, Rattus norvegicus
ctkytgwagcggctgggrgcacgaggcggtcccgcagcggttccagctgaagtggcaccggtcttttgctaccccttgttcctgggtagctatcctggaagaccgtcctcgacttttctttatccttaymcgtktatcctcctactcccttcatcacagcccccagcacctgaatatccaccactccgggcgaccccacggttttcctttcccgccgcaaaacccgcgacctycaacagcccgcccccgcgggcccgatcccgtttggcggctctagctgcagcctcctctgccttcccactctcccagggatcgctctactaccccaccggtgtctgccctcaaacttccccgtccctcctcccgctccctcggagccccctcccccgccctggccatccggcatgcaggtgtctatcgcgtgtaccgagcagaaccttcgcagccggagcagtgaggaccgtctctgtggacccsggccgggtcctggaggcggtaatggagggccagtgggcggagggyatgggaaccctccggggggtggaggattgggctccaagtcacggactgcagtggtcccccgacccccagcacctgctggggcccttcgagagagcaccggccgaggcactggcatgaaatacaggaacctaggaaagtctggactccgggtgtcctgtcttggcctcggaacctgggtcacatttggctctcagatctcagatgagacagcagaagatctcctgacagtagcctatgagcacggtgtaaacctgtttgacaccgctgaagtgtacgcagcaggaaaggctgaaagaaccctaggcaacatcctcaagagcaaaggttggaggagatcaagctatgttatcaccaccaagattttttggggaggacaggcagaaactgagcgaggcttgagtcgcaaacacatcattgaaggcttgcaaggatccctggaccgcctccaactggaatacgttgacatagtatttgccaatcgttcagaccccagcagtcctatggaggagattgtaagagccatgacctatgtcatcaaccagggcctggccctatactgggggacatccaggtggagtgctgcagaaatcatggaggcctactccatggccagacagttcaatctgatccctcctgtgtgtgaacaagcggagaaccacttctttcagagggagaaggtggagatgcagctgcctgagctctaccacaaaattggtgttggctcagtcacttggtctcccctggcgtgcagcctcattactagcaagtacgatgggcaagttccagatgcttgcaaggccactgtcaagggctaccagtggctcaaagaaaaagtgcaaagtgaagatggcaagaagcaacaagccagagtgacggaccttctccccatcgctcaccagctaggctgcaccgtggcccaacttgctatagcctggtgtctccgaagcgaaggtgtcagctcagttttactgggggtgtccagtgcagagcagctgatggaacatctggggtccctacaggtgctgggtcagctgacgccgcaaacggtgatggaaatagatgcgctcwygrggaacaaatcgcattccaagaaatagtccgttgtgggcgcgggaacccaacgcggagtgattgcaccctttggaaaaccactttcctgcatcctgcaatcagctctggatccccaccaaccaaaccctgctcccacgcagcgccgcggcagaatcagggtagccccgccccaccaacgagtsccggcttcgagtascgattcscatgaacaaagccatatcctttcaccgtggggcaccgggcmssasasggaaagtwgatctcccgcccaccctctacgcccctgctgtttcctarggctaggccttctcgctaatccagggcatgagccttctctccgccatttggtctcgcaccgctctgctcatttcttccccctgttgctgaaacctagaaaacatggagcagctaaaagaaacattgaaagcatctcaaaaatgggccttgaaatgtcatsaagggggcaagaaccyacactgggaagggggctttgtagtatttgtccaatagaagccaggctggccctggcagaaagtaaa

SEQ ID NO: 2993 - DNA, 5191 bp, Rattus norvegicus
aacaccggagccaggcgtcgcgtcctttgtgcccggaaccgtggggatgtgtccgcgctaaggagccagctccagtatgggggccgaatctgtctgggcctcaggcctcctggtgctgtggctgcttctcctagtgtctggggatcaggacacacaggacaccaccaccacggaaaaggggcttcacatgctgaagtcggggtcaggacccatccaggctgctttggcagagttagtggccctgccctgcttctttacccttcaaccacggcaaagccccctgggagacattcctcggatcaagtggacgaaagttcagactgcatcaggccagcgacaggatttgccaatcttggtggccaaagacaatgtggtgcgtgtggccaagggctggcagggacgggtgtcattgcctgcctatccccggcacagagccaatgctacacttctgttggggccactgcgagccagtgactctgggctgtatcgctgccaagtggtgaagggtatcgaggatgagcaggacctggtaaccctggaagtgacgggcgtcgtgttccattatcgggcggcccgggaccgctatgcgttgaccttcgctgaggcccaggaggcttgtcacctgagctccgctaccattgcggctccaaggcacctgcaggctgcgttcgaagatggctttgacaactgcgatgcgggctggctctcagaccgcacggtccggtacccgatcactcagtcgcgtcccggttgctatggtgatcgcagcagcctgccaggtgtccggagctacgggagacgcgacccgcaggaactctacgatgtctactgctttgcccgcgagctagggggtgaagtcttttacgtgggccccgcccgccgactgaccctggcgggggcgcgggcactgtgtcagcgtcagggtgcagcgctggcctccgtgggacagttgcacctggcctggcacgagggcctggaccagtgcgacccgggctggctggcagacggcagcgtgcgctacccgatccagactccacggcggcgttgcgggggctccgctccaggtgtgcgcacagtgtaccgcttcgccaaccgcactggctttcctgcgccaggagcccgcttcgacgcctactgcttccgagctcatcaccatacaccacaacgtggggactccgagatcccctcatctggagatgagggggagattgtgtcagcagaggggccgccagccccagaactaaagcccagattgggggagcaggaggtgataacacctgacttccaggaacctctcgtatccagtggagaagatgaacccctagatttgacaaggacacaagcatctcaggagacgctcgcctctaccccagggggtcccacactggcttcatggctgcttacaggtgtcacaagctccacgggtgtccccagccccagcagcctgggagtagacatggaagagacaacaccctcaggcacacaggtagcccccacccccacaatgaggaggggccgctttaaagggttgaatggtcgacacttccagcaacagggcccagaagaccagcttctggaggcagcagaggccagtgcccagcctcccaccctggaagttactgctgaccacatggggccttctgcagccacagaggccttggagagtgaccagagccacagtccttgggccattctgaccaatgaagtggatgtgccaggggcaggctctcttggcagcaggagtctcccagagtcccggaagtggtccccgtcgctgatttcacccagtactgtcccgagcactgacagtactcctggcctgaagccaggggcagatgaggcccctggtgtgaagtcagccatccaccacccaccctggttgccctcagaacccgctgtcccatcctccattccctcagaggccctaagtgctgtctccctacaggcatcccctggtgatggctctccagacttccccattgtagccatgcttcgagcccccaaactgtggcttctgccacactctacactcgtcccgaatgtgtccccaatcccactctccccagcttctccactcccctcctcggtcccagaagaacaggctgtcagacctgtcagctttggagcagaagaccccgagaccccatttcagaccaccatggctgccccaggtgaagccagccacggatcccctgaggcagactccatagaaatcgaggggatcagctccatgcaggctacaaagcaccccatctctggcccatgggcttctttggactccagtaatgtgacagtgaatcctgtcccttctgatgctggcatcctagggactgagtctggggtcttggacttaccagggagtcccacatcagacggacaggccactgtggacawggtgctggccacctggctaccactgcctggccacggactggacactggctcccagtccacacccatggaagcccatggagtaaccatgagtgtggaacctacagtggctttggaaggaggtgccaccaaagacccaatggaggccaccatggatgtggtccccagcactgttgatgccacttcggggtctgaacccaaaagttccatttctagcacccatgtggttgtgactgcagctggggmccagggcacacccacactgacccctacaagctctgaaggtcaggtggtggcccaggagtcactgggaaccctcaccagtctgccttctcatccctggtcatctctggcctccagcatggacgaagtggcctcggtttcctcaggagaacccacarggttgtgggacatccccagcactctgatacctgtgtccttgggcttggatgaatcagacctgaaggttgtggctgagagcccaggcttggagggcttctgggaagaggtggccagtgggcaggaagaycccacggatccctgcgagaacaacccttgtctgcacgggggcacctgccgcacaaatggcaccatgtacggctgtagttgtgatcagggctatgctggggagaattgtgaaattgacattgatgactgcttgtgcagcccttgtgagaatgggggtacctgcattgatgaggtgaatggtttcatctgcctctgtctccccagctatgggggcaacctgtgcgagaaggacacagaaggatgcgaccgtggctggcacaaattccagggccactgctaccgctactttgctcatcggcgggcctgggaggacgcagagagagactgcaggcgccgagccggccacctgacaagtgtccactccccagaagagcacaagtttattaacagttttggacacgagaattcatggattggcctgaatgacaggacagtagagagggacttccagtggacagacaacacaggactgcaatatgagaactggagagagaagcagccggataatttcttcgcaggtggggaggattgtgtggtgatggtggcgcatgagaatggacgctggaatgatgtcccctgtaactacaacctcccctacgtctgcaagaagggtacagtgctgtgtgggccccctccagcagtggagaatgcctctcttgttggtgtgcgcaaggtcaagtacaatgtccatgccactgtgcgataccagtgtgatgaaggattctcccagcaccatgtggctaccatccgatgccgaagcaatgggaagtgggaccggcctcagattgtgtgcaccaagcccaggcggtcacatcggatgcgtcgacaccaccaccatccacaccggcatcacaagccacgcaaggagcacagaaaacacaagagacacccagcggaagactgggagaaagatgaaggggatttctgctaacgatccagactaatcaagcacaagctcccacacctcctccagagcattcccctggggacccagaacccagacaaccaccagagagagggtggggacaccctggagccccacacccctgcagtcggtcctctgtacaaagctcagatcaccctctccttccttactgaggtcctcctggcaggggtggcgggacctgagaggccattctggtctggctgagcccttaggattacttcccagctgtcaaagggagtctcgaagtctgtatccatgaggggcaaacagtatgtctgtgggcgctgggtagtgactttcacaccagagattcaggcttcgtaaacagcggactatactgaatccatggcaaacctttggttaaagtcactgtatttgagtggaggaccagcagagcaaacaggatgctctgtggtcccctgggatcccctaagggcaggcttccatccctccgtctttcttttttccctttctccttcctccctctcaattccaacactgtcaggactcaacctaggctgggcttgaactgactattgtagaaggatgtccttgaagtctcaatcctcctgcccctgtgccaccatgcctacctggtttatttggtgctggacatggaacccagcgctgggcaagtgctctctctactaaccagctctggtctttggtcttggtgcagaccactaaatctagtgtgggaactcttgtatattgaattttagtgatgtctcttagcctggcctccgtggcttcctaggggaggttcctcagagcaatgggggtggggagggttactctattgctgactccccacgtctagtgcagcgctgagatctggtggttctattttgggttgtttttgttttgagacagggcctcactgtgcagctctagctggcctggaacttgctatgtagaccaggctagcctggaactcagcgatctgtctgcctctgcctctctagttactatgcccagccttcttttgttttactgacctaggatctctatagcccaggctgggtttcagtccacagcgatcagatcctttctcaaccacctaagagctgaggtgacaggcacaccatcacgtgtggcacttttgtgggtgtgtgatggcaaatctcccacacccatgtgtccagacgtgagacagcagagtagagtgtactggatgctgctgtatccctctcctccatctctcagggagacagacaaccttctgcccggaccaagatgctgccatgttttctaacccagagcctgtctttactaaaaccctctcagcagacctcagtaaatctcctgcctcagatcccggaattc

SEQ ID NO: 2994 - DNA, 4295 bp, Rattus norvegicus
ccggactacctctggaccccctcccctgtccccaacgctgagccgaaaccatgcatgggcgcctgaaggtgaagacgtcggaagagcaggcagaggccaaaaggctagaacgagagcagaagctaaagctctaccagtcagccactcaagctgtcttccagaagcgtcaggctggtgagctggatgaatcagtgctagaactgacaagccagattctgggagccaaccctgattttgccaccctctggaactgtcgaagagaagtactccagcacctggaaaccgagaagtcccctgaggagtcagctgctcttgtgaaggcagaactgggcttcctagagagctgtcttcgtgtgaaccctaagtcctatggcacttggcaccaccgctgctggctgctgagtcgcctgcctgagcccaactgggcccgggagctggagctatgcgctcgcttcctcgaggccgmtgagcggaactttcattgctgggactatcggcgatttgtagccgcacaggctgctgttgcccctgcagaggaactagccttcactgacagcctcatcacccgtaacttctccaactattcctcctggcattatcgctcctgcctcttgccacagctgcacccccagccagactctggcccacagggtcggctccctgaaaatgtactgctgaaagagctggagttggtgcagaatgccttctttactgaccccaacgatcagagtgcctggttctatcaccgctggctcctgggtcgggcggagccccacgatgttctatgctgtgtgcatgtgagccgggaggaggcctgtctgtcggtctgcttttctcgtcccctgacagtgggctccagaatggggaccttgctactcatggttgatgaggcacctttgagtgtggagtggaggactccagatggcaggaaccggcccagccatgtctggctctgtgacctgcctgctgcctctctcaatgaccagttgccccagcacacgtttcgtgtcatctggacaggaagtgatagccagaaggagtgtgtgcttttaaaagaccgcccagaatgctggtgccgagactcagccactgatgaacagctattcaggtgtgagctgtcagtggaaaagtccacagtgctgcagtctgagcttgaatcctgtaaggagctgcaggaactagagcctgagaataaatggtgcctgctgaccatcatcctgctgatgcgagcactggaccccctcctctatgagaaggaaacactgcagtacttcagtaccctcaargctgtggacccaatgagagcagcttayttggatgacctgcgcagcaagttcttgctggagaacagtgttctcaagatggagtacgctgatgtacgcgtgctgcacctggctcacaaggatctcacagtgytctgccacctggaacaactgctcttggtcactcatcttgacctgtcccataatcgactccgagccttacccccagccctggctgcthtgcgctgtcttgaggtgctgcaggccagtgacaatsccctggagaacgtggatggtgtggctaaccttccccggytacaagagctgttactatgtaataaccgcctccaacagtytgcagcaatccagcctcttgtctcctgccccaggytagtcctcctcaacctgcagggcaactcgctgtgccaagaagagggcatccaggagcgtttggcwgagakgytaccgtctgtcagcagcatcctcacctaggaggccctgcctcaycctcacctttaacttactgggactgaataaagtgtggagaggcccctytwmmamwwrammrmwrmmawramaamamwammwccattaccrscactgwkktgaagaaaggaagggaggggctctgtggtgagggtctactgccctgtgatactctctacccagagcctctgtgttcatgkctggtcaggaccacrgctggatttgagttcatcatcagttttggggctgtcatgggagcytagcttragactgggatagaaatcgggctcgggttatratttgggctgagcctcaraacagctgtctctagstggaagagactgtgaacctttctctygtgagtctgccaacttcagactttgtgtcctgacccctgcttcattcacaacggaataggctcaggacctcagtgtttgagaaagaatgtgtcagggcatcttgccccacctggttaagatgacaatattggtccttgtggattacattctatggttgaaaagcccttgggaacccttggtcccgtttgatcctcatacactcagggatgggatgattagaacatttgaactgatgaagagactgttcygacccgcccagggttaytgagctytgcatgcggaagccagatactaaccacgttgcttcagtgatttascccttttcctgtttctgtattaatgtagaatgattaaacagaggcccggcctcaactcgccaarrwawwwarawarrarmmwamtcytgagttgcatccacaccccaccactcggtgttgtgactttgaaagctgcagggaacaaggcctccagggagtggctcaagggtttgggcactgagtcaaacttggcatagtgagggaagatggtgactgattaaaacgagaagagtgtarmaaammarrmawwwwwmwgtttcatgggaatctgcctgggcacacatgtgctcacatgccccgcccctggaaaccccgcctcttcttgtatcccaggtgatacacaaacactctcagagtgtagccctttggctgacccaccacatacctgccttgaattttggtttccagtggtatgtgttggaagtggcacaaatcctgagtaggttccagggcttgccagctgaacagggggggaaaactcacacaatgcttacttagtctgtcggctttcttctgtaatcccagcaactgggaggctgaagcaggaggattaccgtgagctcaaagtctacctgggctctatgtgagaccatttcgaaacaaaccaaaaaagtcagtgtctatgtagatcctggagcttctgttcttactccccaagatacctatgtacaggatacatttccaaacaggttgctgccaagtatgctgctttgtcttgttgctgctgctgttgtcgttgttgccaaatcctattttcactatctttgatcatggcccacagatagagctaaaataccaatgggatggagtggggagccctgactggcggtgccacggacagggccagagagagagcctccctaaagatgtctggctcttctctgccttggggctgttttaatgacatctctgaaggttcacccagaactggagctgcgaagtacagagggtaggttcctggagccggtcagtctggattctcaggaagaattccaggctgcaaatgaggggaaatgctcacctccagctgatgagacagtctcagggaaagaagggaacaccaggtagcctggggaggaggcccctgtccacccaggtctgaacacaaggacctaagccttcccaaaacttgcaagctgggagggggaaacaagacatcatttctcttgtgacccccttaatctcaaacttagaaggaccagagggacagcccactcatactgggggctgtggaacaactagacacagagacagatgggggtgtagtatgccgagaggcgtgagaagacccggtagagctggctggtcagggactggcaggtggagccagtttgagagcctggatgctgatgtcatctgtctgcagccctgaggtgctgggaccttcctaggcaaaaggagttccagtccaagggaccagtttcaccaggccaagcctggtgagtgctgcaagacagcttgtcagcagggccctgtgagaacaaaagtatgcatctccagcttggaaacaatctgccctacagggctgtgagtggaagaagatcccttctcttttgctctctgaacacctagtgtggcaagaatcaaattggtatgggatctgtcaccaaacaccttccctttttacctcagccccaggtctgacagaactttgactgggaccatcccccccccaaccccccagcatgacctcagttcctagaaaggagaaggtgggtggagtcagactttcccgtccctaccaggggacagcccccagagactggcctcttgacaggagggatgaagcaactatcttccctttttcccagaagctcagccccgcctcccctcccctcataaactactcacggacccgccctacaccttcc

SEQ ID NO: 2995 - DNA, 862 bp, Rattus norvegicus
gcacgagctgcaggcggagactgcaccaygrssccagacccctggttctccacgtacgattctacttgtcagattgcccaagaaatcgctgagaagattcaagaacgaaatcagtgtgaaagaagaggtgagaagacacctaagcttaccctgacaatcagaactttgttgaagaatctgaaggtaaagatcgacctcttgaaggacttacttctaagagctgtgtcgacgcgccagataacacaactggagggggatcgaagacagaaccttctggatgatcttgtcacccgagagagactgctcctggcatcgtttmasrakgagggttccgagccggatttgatcaggtccagcctgatgagtgaagaagcaaagcgaggaaytcccaacccttggytctgtgaggasccggaggagaccagaggcttgggttthgatgagawccggcaacagcagcagaaaattattcaagaacaggacgcaggtmttgatgccckttcctstwtcataagtcrccaaawgcaaatgggccaggagattgggaatgaaytggacgaacagaacgagatcatcgatgaccttrccaacstggtggagaacacagatgagaagcttcgcactgaagccaggcgagtgaccctggtggacagaaagtcagcttcctgtgggatgataatggtgatcttattgctgmtcgtggctattgtggtggttgcagtgtggccaaccaactgatggcaataaggggaccacccgcagtgacacarycaacaatgagtgaaagcccagcacccttttggtacacaacacctcmtytcaataaattcwscacgctcccgrmwaaaaaaaaaaaaaaaaa

SEQ ID NO: 2996 - DNA, 2891 bp, Rattus norvegicus
gggcgcggcctggcgggccgggcggcgctgcagcccatggagctcgagaacatcgtagcgaacacggtgctactcaaggcccgggaaggtggtggcgggaatcgtaaaggcaagagcaagaaatggcgccagatgctgcagttcccccacatcagccagtgtgaagagctccggctcagccttgaacgtgactaccacagcctgtgtgagcgtcassccattgggcgcctgttatttcgtgagttctgcgctacgaggcctgagctgacccgctgtactgccttcctggatggggtggctgagtatgaggtgaccccwgatgagaaacggaaggcatgtgggygtcggctaatgcagaattttctgagccacacgggtcctgacctcatccctgaagttccccggcagctggtgagtaactgtgcccagcggctagagcagggaccctgcaaagacctcttccaggagctgacccggctgacccatgagtacctaagcatggccccttttgccgactacctcgacagcatctacttcaaccgtttcctgcagtggaagtggctggaaaggcagccagtgaccaaaaacacctttaggcagtaccgagtcctgggcaaaggtggctttggggaggtgtgtgcctgccaggtgcgggcaacaggcaagatgtatgcgtgcaaaaaactggaaaagaaacgaataaagaagcggaagggggaggccatggctctcaacgagaagcagatcctggagaaagtgaacagtaggtttgtagtgagcttagcctacgcatatgagaccaaggatgcactgtgcctggtgctgacattgatgaatggaggcgacctcaagttccacatctaccacatgggccaggctggctttcccgaagcacgtgctgtcttctatgctgccgagatctgctgtggtctggaggacttacaccgggaacgcatcgtgtacagggacctaaagccagagaatatccttctggatgaccatggccacattcgaatctccgacctgggcctgrctgtgcatgttcctgagggccagaccatcaaaggccgtgtgggcactgtgggctacatggctccagaggtggtgaagaatgagcgctacacattcagtcctgactggtgggcgctaggctgcctcctgtacgagatgattgcgggmcagtcgcccttccagcagaggaagaagaagatcaagcgggaggaggtggagcggctggtcaaggaggtggctgaggagtacaccgaccgcttctccccacaggcacgctcactctgttctcagcttcycaacaaggaccctgctgagcgcctggggtgtcgtggaggtggtgcccgtgaggtaaaggagcacccccttttcaagaaactgaatttcaagcggctgggagctggaatgctagaaccaccttttaaacctgacccccaggccatttactgcaaggacgtgctggacattgaacagttctccacagttaaaggtgtggatctggagcccacagaccaagacttctaccagaagtttgccacgggtagtgtgtccatcccctggcagaacgagatggtggagactgagtgcttccaggaactaaatgtctttgggctggatgggtctgttcccccagacctggactggaagggscagcccactgcaccccccaagaagggattgctacagagactcttcagtagacaaaggattgctgtgggaactgyagcgacagtgaagaagagctccccacccgcctctagcccccaggccgaggcccccaccggcggctggcggtagcagctactcagtgactgacgttgacagttttgcacagtgctgtttccagttgtccacgccagtcgtggtctgtggaacacagmcggaactgtccccagtgtcctccgttcctcagccactggcccagctgagtttgacgaggcctgggccatcttgggacaaaggtgcgtcccttcagctcttctctgtggagctcggggctttatgtgtttatgtatttgtacgaatgtatatagctaccagagcgttmttaactccaccctgggtctggcaccccagggcaactagccctggccaggagagccaggagctggcaagaggaaccagtgccaacctccaggstaatggggcccagtccagatgagcaagcagwgtgtgggccaggtcagacctctgaccacagcattgctccggccaccatcagactcaagtgagactcgtgcctgtctgttgtggactgaggccaccatgctccagttgcccaatgctttcattccgtctcagygtttgtcagagctggagacgggggctttgtgttctccgggcytgggtcacagtgtgactgcaaaytgagctgacgggvacswrkcacaccactgccccagatgggttgctttttgccttccagctcccagagcacattggtccttattctgggtcatatccaggccatrrsagrggttagaattagccctccaacattccagaatccctcataaaagtrgacatgtssccagcaataawmmaammwwmmwrtgtgtgccygcgggaggcgggtktgagtdtatwycattgtgtgaagrgagtaggktaagkytgtgcytaagccccagamcstagccytrrcctttcccaractgtgatggytgtcctgatgctwgtaaggacagtatgggaccatamggccctggcgtttccatktttaaasmcmatgtgagctsccatstktctatgaccaatgtaagctgccatgtgtctgyctgtgtgaatacagtbtgwgcwcaarrmwrrmmarmhvmhvmwrmwvmmwcwytraaaaaaamraaamwmmmtcttaaaaaaaaatctcgcggccgcaagcttat

SEQ ID NO: 2997 - DNA, 2117 bp, Rattus norvegicus
tgccaacaggcccctcactgtgtccaaacagtggtgtgagttgaggggtgggacaggtggggacctcagaaccattgttatccacagaccatggccttgccaacagcccaacccctgctggggtcctgtggaagccccatctgcagccgcagctttctactgcttctccttagtcttgggtggttgccacttctgcagacccagactacaaggacaagccaggaggccgcacttctccatgctgtgaccggcaccgttgactttgccagtcttcccacaggcctctttcttggcctcacgtgtgatgaggtatctggcctaagcatgggacacgccaaggagctggctatggctgtgagacagaagaatatcgtgctccaagtacatcagctgcgctgtctggcccgtcgcctccctaagcacctcaccaacgaggaactggatgctctcccactggacctgctgctcttcctcaatccagccatgtttccggggcaacaggcttgtgcccacttcttctccctcatctctaaagccaatgtaaatgtactcccacggagatctctggagcgccagaggctgctgaccggggctctgaaatgccagggtgtgtatggatttcaagtgagtgagacggatgcacgggctctcggaggcctggcctgtgacctgcctggggaattcgtggccaaatcttcggaagtcctcctcccctggctggcaagatgcggaggacccctggaccaaggccaggcaaaggctgtcagggaggttctgaggagtggaagagccccctatggtcccccatcgacgtggtcagtctccaccctggatgccctgcagggtttgctggtagtgttggatgagtccattgtccacagcatccctaaggatgttatcactgaatggctgcaaggcatctccagagagccctccaggctggggtctaagtggactgtcacacacccaaggttccggcgggacacagaacagaaagcctgccctccagggaaggagcctaacgtggtggatgaaaacctcatcttctaccagaattgggagctggaggcttgtgtcgatggtaccctgctggccggccagatggaccttgtgaatgaaattccctttacctacgagcagctcagcatcttcaagcacaaactggacaagacctacccacaaggctatcccgagtccctgatcaagcagctgggccacttcttcagatacgttagccctgaggacatccggcagtggaatgtgacttcaccagacacagtgaatactctgcttaaagtcagcaaaggacaaaagatggatgctcaggtgattgccttggtcgcctgctatcttcggggaggaggcaagctggacgaggacatagtaaaagccctggacaacatccccttaagttacctatgtgacttcagcccccaggatctgcacgctataccctccagtgttatgtggctggttgggctccatgacctggacaagtgcagccagaggcatctgggtatcctctatcagaaggcctgytcagcyttccagaacgtgagcgggctggaatactttgagaaaatcaggacatttctgggtggggcytccagggaggacctgcgggccctcagccagcacaatgtgagtatggacatagccactttcaagaagctgcaggtggatgccctggtggggctgagtgtggctgaggtacaraaacttytagggccacacattggggacctgaagactgaggaggataaaagccctgtccgggactggytyttccgacagcagcagaaagacctggacagtytgggtttgggacttcagggtggcatccccaatggctacctgatcctagacttcaatgtccgagaggccttytccagtggagccccactccttgggccaggatttgtgtttgcatggattccagytytgctytcagctttaagactgagctgagaccaccactcctaaggctcctggtcccagctytattgtcgagccccatyttgaccaggargggataccaggggtcattgccaaagtttgaggattyttgaacccaataaacagtggcatgtgcccccttraaaaaaaaaaaaaaaaaa

SEQ ID NO: 2998 - DNA, 2757 bp, Rattus norvegicus
gcgtacctgctgtgggctgagacccaattttcctggggccaatctctgcttacgcctgctgtgccctctccgcggtcctgcctgaagtttgccctaacgcacaatggaaggtcctcgctcagacgtgggccgctggggtaggagcccctggcagcccacgacaccgtcgccagagccagagccagagccagagccagacagaagctcgcgctcccgccgaggaggaggccgctccttctgggctcgctgttgtggctgctgctcctgcgggaacagagctgatgatgactggggacccgaaccttctggctccagaagccgagggaccagctcccggggtggaggctcccggggtggggactctcggggtagggactctcgaggtggccgaagacctgagtctcggggcagtggtgtgaatgcagctggagatggcaccatccgagagggaatgctggttgtgaatggtgtagatctgctgtgctcgcgatcagaccagaaccgccgagagcaccacaccgatgagtttgaatatgacgagctaattttgcgccgtgggcagcccttccacataatcctcttcctgaaccgggagtatgagtcctctgatcgcattgcccttgagcttctcatcggaaacaatcctgaggtgggcaagggcacccacgtgatcatcccagtgggtaagggaggcagcggtggctggaaggcccaagtgactaagaccaatggacacaacctaaccctgcgcgtccacacctcccctaatgccatcattggcaagtttcaattcactgtccgtacacgctcagaggctggcgagttccagctgccctttgacccccgcaatgagatctacatcctcttcaatccctggtgtccagaggacatagtgtatgtggaccacgaagactggcgacaagaatatgtgcttaatgagtctggaagaatctactatgggacagaagcacagattggcgaacggacctggaattatggccagtttgaccatggggtgctggatgcctgcctgtacattctggatcggagggggatgccatatggaggtcgcggggacccagtcagtgtctctcgggtcgtctctgccatggtgaactccctggatgacaatggagttctgattgggaactggactggcgactactctcgaggcaccaatccctcagcgtgggtgggcagtgtggagatcctgcttagctacctacgcaccggctattccgtcccctatggccaatgctgggtctttgccggtgtgaccaccacagtgctccgatgtctgggccttgctacccgtactgtcaccaacttcaactctgcacacgacacggacacgtccctcactatggacatttattttgatgagaacatgaagccactggagcacctgaaccacgattctgtttggaacttccacgtgtggaacgactgctggatgaagaggccagatctgccctcaggctttgatgggtggcaggttgtggatgccacaccccaggagaccagcagtggcatcttctgctgtggcccctgttcagtggagtccatcaagaatggcttagtctacatgaagtatgacacacctttcatttttgccgaggtaaacagtgataaggtatactggcagcggcaggatgacggcagcttcaagatcgtgtatgtggaagagaaagccattggcacactgattgtcacaaaggcgatcaactccaacatgcgagaggacatcacccacatctataagcacccagaaggctcagaagcagagaggaaggctgtggaaaaggctgcggcccatggcagcaaacctaatgtgtatgccacccgggactctgctgaggatgtggcaatgcaggtggaggcacaggatgctgtgatggggcaggatctgactgtctctgtggtgttgaccaatcgtggcagtagccgacgcactgtgaagttgcacctctacctttgtgtcacctactacactggtgtctctgggcctaccttcaaggagaccaagaaagaagtggtattagccccaggagcctcgsacaskgtggccatgcctgtggcctacaaggaatacaagccccaccttgtggaccagggggcaatgttgctcaatgtctcaggccatgtcaaggagagtgggcmggyackagscaagcaacacaccttccgtttgcgcaccccagacctctctctgacattactgggagctgcagtagttggccaggaatgtgaagtccagatcgtgttcaagaaccccctgcmtatcaccctcaccaacgttgtcttccggctcgaaggttctgggttacagagacccmasgwsstcaatgttggsgacatcgggggtaacgagacggttacaytgcgccagacatttgttcstgtgcgamcaggcccccrccagctcattgccagtctggacagtccacagctttcccaagtacacggtgtcattcaagtggatgtsgccccatcctctggaggcagaggtttmtcagaggctgtwrstgacwktmsctsygskgakaayawacctwtkkyawtkmrarrwsgasmtkmgscmkgggccaggagcaatargactgaaatcagatgaacaaggacattgccccaagatggggtcctaccmtaaagtagctcccctggctcggacaagaaggytggggcacccggggaggctgttactctttacctgtgctgataataaaccgttttttmwtgaaaaaaaaaaaaaaaaaa

SEQ ID NO: 2999 - DNA, 3389 bp, Rattus norvegicus
cttccaagccacttgtgagcccactcagggtttggaggcggacggggtgggggtggggtggggaaatgcagaaaagtgggcggaggctctcaagagcctagggaggataaggtctggaaagaagaggacctgggaggagttagattgaggagtgggagagtagaaggggagggaaataggcggggctggaggccggggagacccgcgcaccgaaaagcccaaagggagagtccaggcagggggaggtcaaaaagggttagcgttgacatccaggaccctgggtgcagagaaagactcctcctctcagtcctcataccctcatagttcagaattagctgccaagactttctgcctaagggcggtgggtcggaaccagagcctgaaggctctgtacctcccccctcccttcccggaggaggggatgggacgggctgggggcgggattgaggaagggggttgcgtgcgctgtgcctctgggtccgggctgcgcgttccagctgcgagaacagatggaggcagcgcggctcacctcgggggctccgtgcccgctgtgcgccgaagtccaggctgaggaggaggtctagagcccccggctctcccgtctcccaccaggctgcggggaactggctgccgcacccctcctccaagtgggggtagaacggagtctcacccccataggtcccagaactaaggggaacatagggccggttcctcccactgctcagccatccccaggggcttgtctaggactatagctctccaaatcccccttcccctggcttccatcctgggcgcatctcagaagcggacccctgcccggacgcgccccgcccccggcccccgccccgacgacgtcctattagcatgagcgacgccagtggccggggcaccactcgggggccgagactcaccgcgtcatagccccaagtggagggagaaagaaaaaaaaagaggcggcggtggaggaagaggcaagagcggacgsgcggggagggctggagagacggcgggcggcggcagcatgcccctgggcgggtgcacacggcctctctgcaccgcaggggctgcttctgctctctctgggcaccacgcgtccagtctcccgcctcagcccctcggcttgccggcctttgcggttgcgctcgaaacatcgtccactggtccccgaagcatctaagagcagcggcgccgcgcgggacaatccttgcttttttctgagctcggggatatgagccccacagccacctgaagcgcagggggcgctacgcggctaggaccgcgcccccgaagtaccttatcctagcctctgcactgcgggacgccgacacccgactccggtggaggcatcttagggaaagcagccggtaggggcatggaacccaccgcgccaaccggtcaggcccgggcggcggccaccaaactgtcggaagcggtgggagccgcgctacaagagccccagaggcagcggcgcctggtgctggtcatcgtgtgcgttgcactgttactggacaacatgttgtacatggtcatcgtgcccattgttcccgactatatcgcccacatgcgcgggggcagcgagggcccgaccctggtctctgaggtgtgggaacccactctgccgccgcccactctggctaatgccagtgcctacttggccaacacgtcggcgtccccgacggctgccgggtcggctcggtcaatcctgcgacctcgctaccccacagaaagcgaagatgtgaagataggtgtgctgtttgcctccaaggctatcctgcagcttctggtgaaccccttaagcgggcctttcattgatcgcatgagctacgacgtgccgctgcttataggcctgggcgtcatgttcgcctccacagtcatgtttgcctttgcagaagactatgccacgctcttcgctgcgcgcagtctacaaggcctgggctcggccttcgcggacacgtctggcattgccatgatcgccgacaagtatcccgaggagcctgagcgcagtcgtgccctgggcgtggcgctagcctttattagctttggaagcctagtggcgccaccgtttgggggcatcctctacgagttcgcgggcaagcgtgtaccctttctagtgctcgccgctgtgtcccttttcgacgcgctcctgctcctggcggtggctaagcccttctcggctgcggctcgggcgcgagccaacctgccggtgggcacacctatccatcgcctcatgctagacccttacatcgctgtggtagccggcgcgctcaccacttgtaacattccccttgcgttcctcgagcccaccatagccacgtggatgaagcacacaatggccgcatccgagtgggagatgggcatggtttggctgccggctttcgtgccacacgtgttaggcgtctacctcaccgtgcgcctggcggcgcgttatccacacctgcagtggctgtacggcgctctcgggctagcggtaattggagtgagctcttgcgtcgtacctgcctgtcgctcattcgcgccgttagtggtctcgctctgcggactctgcttcggcatcgcgttagtggacacagcgctcctacccacgctcgcctttctggtggacgtgcgccacgtatccgtctatggcagtgtctatgccatagctgacatctcctattctktggcctacgcgctcgggcccatagtggcaggccacatcgttcactctcttggctttgagcagctcagcctgggcatgggcctggccaacctgctctacgcaccaktccttcttcttttgcgcaatgtaggcctccttacacgctcgckttcggagcgcgatgtgttgcttgatgaaccgccgcagggtctgtacgacgcggtgcgcctgcgtgaggtgcagggcaaggatggcggcgaaccttgtagcccacctggcccttttgacgggtgcgaggacgactacaactattactcccgcagctagcagacccgcttctcctccaggccacctacccgccccatttaggtcaagatggtcattctgcaagagcactgtccaactttggcttggggcccacctcctctaatgaataccctagcccctcgcccgtcctgaattcctttgctggaatcscwyswssatgacccctcccagtctaggcccctccccaaacacactcgtattcattggggaaatggagcagggaggcagaagaagctgttgggctcttggcagaggtgaagaggtgtgcgggtgatcgccaatcacctactgagagcccccaaatagagtcatgcatctgtttgtccttcctgcggatctttccagtgccaaacttggtctctgcactccggtgcctccggcctgaattaataaaccatatctatctgaraaaaaaaaaaaaaaa

SEQ ID NO: 3000 - DNA, 992 bp, Rattus norvegicus
gaattcggcacgaggcggcgctgaccgagtgctggaccgacggctgkyggcacccgggcctgcgcgcactgctgctccgggtcscccsgccgaggcgctggccacggtagacctcagggagggctcgggctgccgggccgggcgccatgtccatggaggaccccttctttgtagtgaaaggagaggtacagaaagcagtcaacactgcccagggattgttccagagatggacggagcttctgcagggcccctccgcagcaacgagggaagagatcgactggaccaccaacgagctgaggaacaatctccgcagcatagagtgggatctggaggacctggatgaaaccatcagcatagttgaagcaaatcctagaaaattcaacctggatgcgactgaattgagcataagaaaagccttcatcacaagtactcggcaaattgtcagggacatgaaggatcagatgtcagcttcatctgtgcaagcgttggcagaaaggaaaaacagacaggcgctactaggagatagcagcagccagaattgggatgctggagtgacggatcgatatgggcgccttgatcgggagctgcagctggccaactcccatttcatcgaggagcagcaggcacagcagcagttgattgtggaacagcaggatgagcagttggagctggtctctggcagcatcggggtgctgaagaacatgtcccagcgcatcggaggggagctggaggaacaggcagtcatgctggatgatttctctcacgagttggagagcactcagtctcgactggacaacgtgatgaagaaacttgcaaaagtgtctcacatgaccagtgatcggcgccagtggtgtgccatagccatcctcttcgcggtcctgctggtcgtgctgaccctcttcctagtgctgtgatggtggtgccttggcgcttctgcacgaggacccagggaagaggagcagcaagcactcggccacttacactcgtgccgg

SEQ ID NO: 3001 - DNA, 2426 bp, Rattus norvegicus
ggcattctctcccccaagctgcaggccttcctctgttcgattttaagtagagacgtccctggagcatctaagagaaaaacgcagctagcaaccaaggatcgtactgtcgcaggagcagtcggccatgcaccttcccctcccttgatctggaggtctacagccggggcctcggtactgatcgagatttccaaagttgtctgacctctgcaaaagtgtttctatcaacagcctctgattacaacatggctgagatcacaaatatacgccccagctttgatgtgtcaccagtagcggctggcctcatcggcgcctctgtgctggtggtgtgtgtctctgtgactgtctttgtgtggacatgctgccaccagcaggcggagaagaagcacaagaccccaccgtacaagtttattcatatgctgaaaggcattagcatctacccagagaccctcagcaacaagaagraaatcatcaaagttcggagggacaaagatggttctcatagggaaagtggacgagggaacctgttagtaaatgcggagtctggcctcctgagccatgacagggatcccagagggcctagccctgcatcttgtatagaccagttacccatcaaaagagactatggggaagaactgaggagccccatgaccagcctgacccccggtgaaagcaagcccacctccccatcatcgccagaggaagatgtgatgctagggtcccttaccttctcggtggactacaactttcccaagaaagctctggtggtgacaatccaagaggcgcatgggctgccagtgatggatggccagacccagggctccgatccctacatcaaaatgaccattcttcctgacaagcggcatcgagtgaagacccgggtgcttcgcaagaccctggaccccgtgywygakgagaccttcaccttctacggcattccctacagccagctacaggacctggtgctgcacttccttgtgctcagctttgatcgcttctctcgggatgacgtcatcggggaggtcatggtgcccttggctggagtggaccccagcacaggcaaggttcagctgaccagggacatcatcaagaggaacattcagaagtgcattagcagaggggaactccaggtatctctgtcataccagcccgtcgcacagagaatgacagtsgtggtcctcaaagccagacacttgccgaagatggatatcaccggtctctcaggtaatccttatgtcaaggtgaacgtctactacggcagaaaacgcattgccaagaagaaaactcatgtaaagaagtgcactttgaaccccatcttcaatgagtccttcatctatgacatccccaccgatctcctgcctgatatcagcatcgagttccttgtcattgacttcgatcgtactactaagaatgaggtggtagggagsctsatcttgggggcacacagtgtcacaaccagtggtgcagaacactggagagaggtgtgcgagagtccccgcamgcctgtasccaagtggcacagtctgagcgagtactaaccctggggccaggcggggaggcacacacggggagaggtgacagagaagctgactcaaaacctcattttagtcgtagaagatttcttacagaacaaaccacacgaagaacctcacactccacacggctgcagattggttcttagcgtgaggattgctttcttctctgcaaggcactagacgatcttttgttttttaaaatgaggggggaagagaagggaagaccccaagtctatatataacaatgtaaccttatacttgcatgtctaatacaaacaagaaattagcctaamaawawmaarwwrmagattttaatccatgaaaattgtgttttgtgccgaactgtatttgctgatcccctgaaattggcctctctttatcaggcttctctgggttattccagttttccatcaccgcaggagaaaagtctgctcttgtaaagccccatgtccccatcatccagtcccttttgctgtcacctctcacatctctgctctttggctgagttacaaatcctgaggtctgtagtaagtgaggaaatgagtggggtttccaggagaaagagtggttgagaatgggatgtgtgggtagtaggcagccagtgactagagattcccctgatgagctcaggaggagtggggctggacttaggactctgatttctccagaaggagcaatggagggttcacctagagcgaggtacctgtgaacagtaccagcgcgtcctgaaagctgcttgcaggtcaggggaccaggggatgaaataagatgtccatgtggccctctgtggtgggctcttcatcagtggtcagcagtcccaggtttgtaaggttacactggcttttacttttccagaactgtgccgggcgctcaggcatctcttcattatgtagc

SEQ ID NO: 3002 - DNA, 3950 bp, Rattus norvegicus
ctgaggctggcagctactgaaactgacacacacagggttaaacctatttgctgtggccatccctcctccccctagtcccccttttcactgtaggctggcagcagtcctaactgcctactgaagccaaatgcttgaggagagagagagtaaggagccagccatgaatcctttccagaaaaatgagtccaaggaaacgcttttttcacctgtctctactgaggagatgctgcctagacctccgagccctccaaagaagtcacctccgaaaatctttggctccagctacccagtcagcattgccttcatcgtggtgaatgaattctgcgagcgattttcctattatggcatgaaagctgtgctgaccttgtacttcctgtatttcctgcactggaatgaagacacgtccacctctgtctaccatgccttcagcagcctctgctatttcactcccatcttgggtgcggccattgctgactcctggctgggaaaattcaagacaatcatctatctctccctggtgtatgttcttggccatgtattcaagtctttgggtgccataccaatactgggaggaaaaatgctacatacaatcttatcattggttggtctgagtctaattgctctgggaacaggaggtatcaaaccctgtgtggcagctttcggcggagaccagtttgaagaggaacatgcagaggcacggactagatacttctcagtcttctacctcgccatcaatgcggggagcttgatttccacgttcatcacacccatgctgagaggagatgtgaagtgttttggccaagactgctatgcactggcttttggagttccaggattgctcatggtgctggcacttgttgtgtttgcaatgggaagcaagatgtacaggaaaccacctcctgaagggaacatagtggctcaagttatcaaatgcatatggtttgctctctgcaaccgcttcaggaaccgttctggggaccttccgaagcgacaacactggctagactgggcagcagaaaaatatccaaagcatctcatcgcagatgtgaaggccctgaccagggtactgtttctttatatcccactgcccatgttctgggcacttttggaccaacagggctcgcggtggactctgcaagctaacaagatgaatggtgacttgggtttttttgtacttcagccggatcagatgcaggtgctaaatccctttctggttcttatcttcatccccttgtttgaccttgtcatttaccggctgatctccaagtgcagaattaacttctcatcactcaggaaaatggcagttggtatgatcctagcgtgcttggcttttgcagttgcagcacttgtcgagacaaaaataaatggaatgatccatccccagccagcttcccaagagatatttttacaagtcttgaatttggcagatggtgatgtaaaggtgaccgtgctgggcagtagaaataattctctcttggtggagtccgtcagctcttttcagaacacaacgcactattcaaaactacacctggaggcaaagagccaagatttacattttcatctgaagtataacagcttgtctgtccacaatgaccattctgtagaggagaagaactgttaccagctgctcattcaccaggacggggagagtatctccagcatgctggtcaaggatacaggaatcaaaccagccaatgggatggcagccatcaggtttattaacactttgcataaagacttgaacatctccttggatacagacgctcctctcagcgtgggcaaagactacggagtgtctgcatacagaactgtgctaagaggaaagtatcctgcagtgcactgtgaaactgaagacaaagtcttttctctcgatttaggtcaactagactttggtacaacatatttgttcgtgatcactaatatcaccagtcagggtcttcaggcctggaaggcagaggacattccagtcaataaactatccattgcatggcagctaccacagtatgtcctggttacagcagcagaggtcatgttctcagtcacaggacttgaattttcttattctcaggcaccatctagcatgaaatctgtgctccaggcggcctggttgttgaccgttgcagttgggaatatcattgtgcttgtcgtggctcagttcagtggcctggcacagtgggccgagttcgttttgttttcctgcctcctcctggtggtctgcctgatcttctccgtcatggcctactactacgttcctctaaagtcagaagatacccgtgaggcaacagataagcagattcctgccgtgcaggggaatatgattaacctagaaaccaagaatacaaggctctgatgacttgctgatggatacctgacccctggctctgatttcagccactgcttattttcaagcaacaaccattttcctcaggccaggttaggagaaggagacagcatctatctgaatggattgcctccagttccctaccacagtagaggcaattctaggactaagttttcagatacatctttaaacagggatccgagactccgtgccctacaggccgttgatcaacttggtaaacgtcaggtgatgtctctcaggctggcccagtatctccgagtgcccatgaaaaatacaaatgtgtaraararawaarwmwmwygggtctgctaagtttgagggattcctttaccaggtatttggagcstatagctctacttgtcgatgtgttggttacagaatactggttttccaagtttctttatcagtcgtataacttcgctattcatgaggatgtcaaaaaacgttacatatagtatgacycaatccagaggctagcttgtcagctaggaagtctaacatgattttaatagatggcagactatagaatggcgttgtatctacacatggaagatacctcttttctgatttaccacagtggtttatcaacttacccaaccaggcttttctcagatcctgaaaaccacaattaaggacagtagtcagaatcgtggggacacgggggtgcacataaactattcattctcctgtactacaggataytaaagaactctcctgctcctggcctgggcgtgctcctctgtgaacatctgtctaaraaactaactataactttgcaacccaggcttttccgtggcgctgggacagcttatctttttcagtgcatcttattctgcgtattacagcargtyttcaataacaaaatgttyttytaacccaactycctgwaatttttttytatttagctcctttgttatgcatctttacttttcctgtaatttttgtttacatttctccctttgggcttagcagtttctkgkttattgaaaagggataatactaacatcctaggtytgaagcgstaaactgtgctagtcatcaaatggacaaggacctgcatdagaaasttattaaaaatytgtggcdaggtgggacaggtgcaggttttgtttgtgcgtgtgaacaaaaggagttgagagrcattgtctcacgtgtaataacgtgggtcaggggacgagtttgggatgtcaggactgtgtcatgtattcctaggagaaaacgttccctgcccctatatgaaagacctctcatttctgttccttttactacactgttcccttcaacggccatgttgaattgcacattattagtaatgtaatatattcttaagcgaatmtgctccagttmgtcaagctttaaatacttcagtatttaagtaccgagatttcagaaagcataaawgaggtcacaataccatctactttcctcagatgacttaatgagaacctgtccagactcctttagaaggtgttcactttccagaagctttaactcaaactctttgatgaattttgttttaaaagatgttaacactgatctgtgaataaaattttttacatacaggtaaawwwaaaaaaaaaaaaaaaaa

SEQ ID NO: 3003 - DNA, 724 bp, Rattus norvegicus
atggcttgtcttggactccagaggtacaaaactcacctgcagctgccttctaggacttggccttttggagtcctgctttctcttctcttcatcccaatcttctctgaagccatacaagtgacccaaccttcagtggtgttggccagcagccacggtgtcgccagctttccatgtgaatatgcatcttcacacaacactgatgaggtccgggtgacggtgctgcggcagacaaatgaccaagtgacagaggtctgtgccacgacattcacagtgaagaacacgttgggcttcctagatgaccccttctgcagtggtacctttaatgaaagcagagtgaacctcaccatccaaggactgagggctgctgacaccggactgtacttctgcaaggtggaactcatgtacccaccgccatactttgtgggcatgggcaacgggacccagwtttrtgtyrymgatccagaaccatgcccagattcagacttcctcctttggatccttgctgcagttagttcggggttgtttttctacagtttcctggtcaccgctgtttctttgaacaggacgstarwgwaaagaagtcctcttacaacaggggtctatgtgaaaatgcccccaacagagccagaatgtgaaaagcaatttcaaccttattttattccaatcaactgaaaggccatttgtgaagaagagggagcattcttcagtctctaaaagctgaggc

SEQ ID NO: 3004 - DNA, 1298 bp, Rattus norvegicus
atgactgaacgctttgactgccaccactgcaatgagtctctctatggcaagaagtacattctaaaggaggagaacccgcactgtgtggcctgcttcgaggagctctatgccaacacctgtgaggagtgtggaacacccatcggctgtgactgcaaggacttgtcctacaaggatcgscactggcatgaaggctgcttccactgctcccggtgcgggagctcgctggtggacaagccctttgcggccaasgaggagcagctgctgtgcaccgactgctattccaacgagtactcgtccaagtgccaggagtgtaagaagaccatcatgccaggtacccgcaagatggaatacaagggcagcagctggcacgagacctgcttcacctgtcagcgctgycagcagcccatcggaaccaagagcttcatacctaaggagaatcagaacttctgcgtgccctgctatgagaagcagtatgccctgcagtgtgtgcagtgcaaaaagccaattaccacaggaggtgttacttaccgggatcagccctggcacagggagtgctttgtgtgcacagcctgcaagaagcagctatctgggcaacgcttcacmgcccgggatgrrtttccatactgcytgacytgcttctktgacctgtatgytaagaagtgtgytgggtgcmccaaccccatcagtkgtctgggtkgcacaaagtacatctcttttgaggaacgccagtggcacaacgactgctttaactgtaagaagtgctccctgtcyttgstgggrcgmggcttcctyacagagagagacgacatcytctgtcytgactgtggaaaggacatctgaaggcgacacagaagccacagcgcgtggcamtgagatttgggtgttttctttcataaccaggsaatkcwgygkkctggtttccaccarmcaccccgaggctccctmtmgmtgtcccggcttcatgtttgytgaaacccctttagttcttcagtttcagtggggacaagattcatctgtaaaccccggawgggaarwtggcttakaattttatagaaatgcaaggcagattaaatggaaaggtcytgagtgtctttawattgcatcctttcttcacatcctatttaatttttaagtgcaattaacatttgttatgaacytgaatgtattttcaarggaragctgggawttgcagctatgtaacttccgtttttgtgtaaaacctagagtgagattwatgtgactcmcaataaaattattcggawtaaaamawwwwrmmaarmaaaaaaaaaaaaaaaaaa

SEQ ID NO: 3005 - DNA, 2693 bp, Rattus norvegicus
cttttttttaaaatttatttatttaatgtatatgaatatactgtcgctgtttcagacacaccagaagagggcattggatctcattacagatggtgtaagcaccatgtggttgctgagaattgaactcaggacctctggaagagcagtcggtgctcttaaccactgagccatctctccagccccaccatgagtcatcaaaatacccaaactatccgtggtttaattttctcatcagtaaagtaagaacagttatagagcctacttgatagagaacctgtggtaccatcaacaggtataaagtccttagaacagtgcctagcatagaataaagtctagataaacatttgctataatgaaatacagacagagttaagatgattatcagtagtttacattttcaaaagtccttcagtgtgttgacttgctgttgtcctatgaaaaattcatttcccatgtttctacacccataaacttatatgatcttcctgtaatttaattatcttcagtggcctgcctctttatctgtaaacctgaatgtctccttgtgtacacaatcattgtgaagctgttaaacagtaatctcactaggtcctagtttcccaatctgtgtgctgagtgggttggaccagataaccctccaagggtttttctagctctggtaatcttagggatgggacaggaggaaaaataggccccaccccaagtcccacccccaacaagatgccctctggctgccaagaggaagggtgacagagtcagctgggctcagcttcaagggcacccggtagagtcttgccaaggttcctaggcaagggtggtggtggtggtgctcctgggctggaagcaggcgtgaagtggggctgcatcagggggaaataagagtacaaagaactagaacaaaggtgagaggagagggaggacagagctgtggtggtgagttagatgacaatttgagcctgggtgtcttccttttagatggtgctggtaagcctccaccctcttcagctagccaggttctgcaggacagaggaagttgcagaacatcattgactgcctacctgagcccaagctctgtctgatgccatcagtccctgggctggactaaggaagctaggtaggagctgagctaaggaagctgggtaggagttgggctaagggtgttgggtaggggctgggctaagggtgttgggtagaggctgggctaagggacctgggtaggggctgggtaggcctgggttgcacatggagctccttcttgctctcctgggtgcttttccttttttgttgtaggttcatcaggactggaaaactaaagctmwrtcwgatgmcatsastcyctgksctgkwctaagswwgctagggggccatgaccagtgcagaatccttgctattcacatcactaggtcccagcccaagttctggagatggtgattgtaggtttaatgaggagttcaagttcatcctgttgcctatgagctatgcagttgtgtttgtgctgggcctggccctcaatgctccaaccctctggctgttcctcttccgccttcgaccctgggatgcaacagccacctacatgttccacctggcattgtcagacaccttgtatgtgctgtcactgcccaccctcgtctactactatgctgccagaaaccactggccctttggcactggcctttgcaagtttgtccgctttctcttctattggaacctctactgtagtgtccttttcctcacctgcatcagtgtgcaccgatacctgggtatctgccacccactgcgggcaatccgctggggccgccctcgatttgcaagccttctctgcctgggtgtttggttggtagtagctggctgcctcgtgcccaatcttttctttgtgacaaccaatgccaatggaactaccatcctgtgccatgacactactctgccagaggagtttgaccactacgtctacttcagttcggcagtcatggtgctgctctttggtttgcccttcttgatcaccctggtctgctatggactcatggcccggcgactgtatcgacctttgccaggagctggacagtcatcttctcggctccgttccctccgtaccattgctgtggtgctgactgtctttgctgtctgcttcgtgccyttccacatcacccgcacaatttattaccaggcaagactgttgcaagctgactgtcatgtgctgaacattgtcaatgtggtttacaaggtgactcgacccctggccagtgctaatagctgtcttgatccagtgctctatctcttcacgggggacaagtatcgaaaccagctccagcagctatgccgaggcagcaaacccaagccccgaacagctgcctcctccctggccttggtgactctacatgaggaaagcatcagcaggtgggcggacacccaccaagacagcaccttctctgcttatgagggagatcgattgtaaccctgctgctggatatgaagggaactaactgcagggcagaggggagggagcttgttagtatcacttgacaggggcatcagctgtcctcttttatagccgaagtttgaaggagctactcctctgcctctactttctcttcttctatccctacctggggccactgttcctgtttctagaacctcagtatcatttgcccaggtccttccatggcatggatttctctgaccagagtagagaattc

SEQ ID NO: 3006 - DNA, 1077 bp, Rattus norvegicus
  misc_feature (908)..(908): n is a, c, g, or t
  misc_feature (1031)..(1031): n is a, c, g, or t
ggctcgtgcaagatggctgcggcgtgtyggagcgtgaagggcctggtggcagtaataaccggaggagcctcgggccttggcctgtctacagccaaaagactggtgggacaaggagccacagctgtacttctggacgtccctaactcagagggtgagaccgaagccaagaagttaggaggaaactgcatatttgccccagcaaatgtgacctctgagaargaggtacaagcagctttgactctagcaaaagaaaagtttggccgtatagatgtggctgtcaactgtgcaggcattgcagtggccattaagacataccacgaaaagaagraccaggtccacamcttggaggacttccagcgggttatcaatgtgaatctcataggcaskttcaatgtgatccgcctggttgctggtgtgatgggccagaatgaascagaccagggaggtcaacgtgrwgttatcattaacayksccagkgtggctgcttttraggsccaggttgsacragstgcataytytgcatccaaagggggcwtagtgggcatgacactgcccattgytsragatctggctcstwtaggcayccgtgtggtaacaattgctccaggtctgtttgccaccccahtgyttaccactbtgccagacaaagtgcgcaacttyttggccaghcaggtaccsttccycarccgwbtaggtgaccccgcggaatatgytmathtggtacwgatggtaatcgagaayccattcttgartggagagktcatccggytggatgggsccattsgaatgcasccttaaaagbycaaggcaggaaaaacaccggctcsttttcagtttgaaggaaacytarcagccactttgtaacthtgmtccattcaccctytgtgcytaataaattctcaawtytnmrdrawaaaawrraaaaaaaaaaatggaagcggccgcaagcttattccctttagtgagggttaattttagcttggcactggccgtcgttttacaacgtcgtgactgggaaaaccctggcgttnaccaacttaatcgccttgcagcacatccccctttcgcccagctggc

SEQ ID NO: 3007 - DNA, 2115 bp, Rattus norvegicus
  misc_feature (172)..(172): n is a, c, g, or t
  misc_feature (1765)..(1765): n is a, c, g, or t
cacgaggggcggagcgagcagatttcgtcgccggaggtgtccttctccagcagtgcctaggaggatgcttggctgacacacagagaacctcagctaatactccttgaaaccaacagaaggaaccttctgctttcatctggaggacccagcgttctgcctgagcgtgagctangacccccctcccagggaacgcccaggtgccttgggctttcgccctcctgscaacmtyswgyytycawstksgcaagagccagagggaaggagctgccaaccaggcacagcggagaacactggmaccatgacaaccagtcaccagcctcaggacaggtataaggctgtctggctcatcttctttgtcctgggtctggggacactgctcccctggaatttttttataacagcaacccagtatttcacaagccgcctgaacacgtcccagaatatatccttggtcaccaaccaatcatgcgaaagcaccgaggccttggctgacccctcagtgtccttgccagcccggagttctctcagtgccatcttcaacaatgtcatgaccctgtgtgccatgttgcccttgctgatcttcacctgcctcaactctttcctgcatcagaaggtgtctcagtcccttcggatcttgggcagcctgctggctatcctgttggtgttcctcgkcactgccaccctggtgaaggtgcagatggatgccctgtccttcttcatcatcaccatgatcaagattgtgctcattaactcatttggtgccattttgcaagccagccttttcggtctggcaggcgtcctgccggccaactacacagcccccatcatgagtggccagggcctggctggcttcttcacctctgttgccatgatctgtgccgtcgccagtggctctaagctgtcagaaagtgcttttggttacttcatcacggcctgtgcagttgtcattctggccatactgtgttacctggccctgccttggatggaattctaccgacattacctgcagctcaaccttgcggggcctgcagagcaggagaccaagttggatctcatcagtgaaggagaggagccaagaggaggaagagaggaatctggggtgccaggccccaactctctacccgccaacagaaaccaatccmtcaaagccatactgaagagtatctgggtcctggctctgtctgtctgtttcatcttcacagtcaccattgggttgttccctgctgtgactgctgaggtggaatccagcatcgcaggcacaagtccctggaaaaactgctacywcrwssctgtggcctgcttcctgaatttcaatgtctttgactggctaggccggagcctcacagctatttgcatgtggcctggtcaggacagccgctggttgccggtcctggtcgcctgcagggttgtgtttatccccctgctgatgctctgcaatgtgaagcagcaccactacctgccctccctctttaagcatgatgtctggttcatcaccttcatggccgcctttgccttctccaatggctacctcgccagcctctgcatgtgcttcgggcccaagaaagtcaaaccggctgaggcagagactgccggaaacatcatgtccttctttytgtgtctgggcckggctmtggragctgtgttgtcyttcttgttaagggcacttgtgtgagcgaccctgtgtggacaraggaactacactgcstgcttcctgctcacttccttcgctgttagggacgagcaggggtccaragggctgctyttntgctttcctccggtgmtggrcccrratgtccaggaacaaaggagggagcctctgaggatggacttgggattgggggtcaragtggtagggggacaatggtctytgacggacagctctgactgatccctgcytaagccaagcacaaragactccmcaaggatggggtggagacaratggctgactgtgtatcatgatbtgatgtccsttgcccttctttyttytgtgsctgttccaggtccccgatccttgtcattttactgccttttttatactgacaraadccaggtsccttcaraggccatstgattaaataaacatttttttcctccwwaaaaaaaaaaaaaaaaaa

SEQ ID NO: 3008 - DNA, 3827 bp, Rattus norvegicus
atggccggtggagttgtgatcctcctgtgtggctgggtcctggcttcctgtcatgggtctaacctggatgtggaggaacccatcgtgttcagagaggatgcagccagctttggacagactgtggtgcagtttggtggatctcgactcgtggtgggagcccctctggaggcggtggcagtcaaccaaacaggacggttgtatgactgtgcacctgccactggcatgtgccagcccatcgtactgcgcagtcccctagaggcagtgaacatgtccctgggcctgtctctggtgactgccaccaataacgcccagttgctggcttgtggtccaactgcacagagagcttgtgtgaagaacatgtatgcgaaaggttcctgcctccttctcggctccagcttgcagttcatccaggcagtccctgcctccatgccagagtgtccaagacaagagatggacattgctttcctgattgatggttctggcagcattaaccaaagggactttgcccagatgaaggactttgtcaaagctttgatgggagagtttgcgagcaccagcaccttgttctccctgatgcaatactcgaacatcctgaagacccattttaccttcactgaattcaagaacatcctggaccctcagagcctggtggatcccattgtccagctgcaaggcctgacctacacagccacaggcatccggacagtgatggaagagctatttcatagcaagaatgggtcccgtaaaagtgccaagaagatcctccttgtcatcacagatgggcagaaatacagagaccccctggagtatagtgatgtcattcccgccgcagacaaagctggcatcattcgttatgctattggggtgggagatgccttccaggagcccactgccctgaaggagctgaacaccattggctcagctcccccacaggaccacgtgttcaaggtaggcaactttgcagcacttcgcagcatccagaggcaacttcaggagaaaatcttcgccattgagggaactcaatcaaggtcaagtagttcctttcagcacgagatgtcacaagaaggtttcagttcagctctcacatcggatggacccgttctgggggccgtgggaagcttcagctggtccggaggtgccttcttatatcccccaaatacgagacccacctttatcaacatgtctcaggagaatgtggacatgagagactcctacctgggttactccaccgcagtggccttttggaagggggttcacagcctgatcctgggggccccgcgtcaccagcacacggggaaggttgtcatctttacccaggaagccaggcattggaggcccaagtctgaagtcagagggacacagatcggctcctacttcggggcctctctctgttctgtggacgtggatagagatggcagcacygacctggtcctgatcggagccccccattactatgagcagacccgaggggggcaggtctcagtgttccccgtgcccggtgtgaggggcaggtggcagtgtgaggccaccctccacggggagcagggccatccttggggccgctttggggtggctctgacagtgctgggggacgtaaacggggacaatctggcagacgtggctattggtgcccctggagaggaggagagcagaggtgctgtctacatatttcatggagcctcgagactggagatcatgccctcacccagccagcgggtcactggctcccagctctccctgagactgcagtattttgggcagtcattgagtgggggtcaggaccttacacaggatggcctggtggacctggccgtgggagcccaggggcacgtactgctgctcaggagtctgcctctgctgaaagtggagctctccataagattcgcccccatggaggtggcaaaggctgtgtaccagtgctgggaaaggactcccactgtcctcgaagctggagaggccactgtctgtctcactgtccacaaaggctcacctgacctgttaggtaatgtccaaggctctgtcaggtatgatctggcgttagatccgggccgcctgatttctcgtgccatttttgatgagactaagaactgcactttgacgggaaggaagactctggggcttggtgatcactgcgaaacagtgaagctgcttttgccggactgtrwsgargatgcaktgagccctatcatcctgcgcctcaacttttccctggtgagagactctgcttcacccaggaacctgcatcctgtgctggctgtgggctcacaagaccacataactgcttctctgccgtttgagaagaactgtaagcaagaactcctgtgtgagggggacctgggcatcagctttaacttctcaggcctgcaggtcttggtggtgggaggctccccagagctcactgtgacagtcactgtgtggaatgagggtgaggacagctatggaamtttagtcaagttctactacccagcagggctatcttaccgacgggtaacagggactcagcaacctcatcagtacccactacgcttggcctgtgaggctgagcccgctgcccaggaggacctgaggagcagcagctgtagcattaatcaccccatcttccgagaaggtgcaaagaccaccttcatgatcacattcgatgtctcctacaaggccttcctaggagacaggttgcttctgagggccaaagccagcagtgagaataataagcctgataccaacaagactgccttccagctggagctcccagtgaagtacaccgtctataccctgatcagtaggcaagaagattccaccaaccatgtcaacttttcatcttcccacggggggagaaggcaagaagccgcacatcgctatcgtgtgaataacctgagtccactgaagctggccgtcagagttaacttctgggtccctgtccttctgaacggtgtggctgtgtgggacgtgactctgagcagcccagcacagggtgtctcctgcgtgtcccagatgaaacctcctcagaatcccgactttctgacccagattcagagacgttctgtgctggactgctccattgctgactgcctgcacttccgctgtgacatcccctccttggacatccaggatgaacttgacttcattctgaggggcaacctcagcttcggctgggtcagtcagacattgcaggaaaaggtgttgcttgtgagtgaggctgaaatcactttcgacacatctgtgtactcccagctgccaggacaggaggcatttctgagagcccaggtggagacaacgttagaagaatacgtggtctatgagcccatcttcctcgtggcgggcagctcggtgggaggtctgctgttactggctctcatcacagtggtactgtacaagcttggcttcttcaaacgtcagtacaaagaaatgctggacggcaaggctgcagatcctgtcacagccggccaggcagatttcggctgtgagactcctccatatctcgtgagctaggaatccactctcctgcctatctctgcaatgaagattggtcctgcctatgagtctactggcatgggaacgagttccctayagctctggactagcctggggaaygtcccaggcgtgatgtcatacctcctgagatgggagatttttatgcttttgccgaagtgtcagacttcagtgctgatccacttttttttgcaagagcagggatggggtcagyataaatttayatatggagaagatttagcayccaatatagactgacaggagtatgctcagtatccaatgtgttgcttgtatgtattttttaaaaaataaatatgaaaatgcaaaaaaaaaaaaaaaaa

SEQ ID NO: 3009 - DNA, 2060 bp, Rattus norvegicus
gcctgggaaagagtaagttaaaaaacttaggtggccatgtccactgtgagggggaaagacaatcttgaaaatacacttgtacactgatagatttttatataaaaaacaactgtattcctaactgaaattctagcttaggtttgttttttttcccacttttaactcttaacaatcacctgatttccactaccaaggcaaaaaatgaaatcacccacaacacacatctgtgacttgaggttaagctagaatgctcataacaggcttggttggcccacttaatacacacagagggaaacagtatcttatgaaaacttggccaacgcctctaataaaagaggaaattatcataatacacatttacagctatcttctggtctactaatttaatccacttctaaccaaaacaaataaatagtaaagtagcttgctgggccacaagcttacaatcgcgtataagaaagaaaattgcttctcgcctagtaaaaacctttaagttgtagctggyggccaggaagctaaccatcacagagcatatgccacttagcaatttgtctcctggggaagtcacagatctccttccagtgccccccaccacttccttctgctgtggcacccaggaccaaccgcccgatcacctcatttcgggatcccctttcagaatccaaaactaaaaattcaacacttatttcttcaagactctcacaaggaatatcaaagacaaacagttcgttgaacactgcgttgggagtgcactttttcacrtgagtcttctttttagagattctcttcttggcatggtacaggttcactttgacgtagggatctgaaagtccagacacatcagatttcggtaggtgccgcgcttttaagacaaccacagtgagcgtgtttgtagtggactgataacagagggagaccagaagttcaccccgtscmgaagacttcttagcatttctcttgatgatctctctggtcattaacattttcccgtctgacaattcaatccctgaaagaggaacgaggacttctccaatgacatcatctcttgagaacctgtcaaaactcaggacggtgaagtgcagggacagctcttggatgtggggataagggaccccatagaatgtgaaggtttcgtcaaacacggggtccagcgtcttcctcagcactctggttttcactttgtgcttcttctctggtaagattgtcatcttgatgtatgggtcagaggtcatggattgttcatccatggctggtaagccctgggcttccttgatgttcaccacaaatgctttcttctcgaagttgtactctagagacaagaagagagtgcccagcttctcttgtttctcctctgaagtgagggaagtgctggacttcaagctctcaggggagacggcctccttttccgtctccggaaagagctttggggtgacattttccagatcagaagagctgccagctttggggttggttttggggaaattgccattgaggtctcgcttctcgagatcaaggtgcagggaaaggttaggcaaagctgctttacgctttgcttcactcttgtcatctcctccaaacttctttttgctacttaggttttctgggtagatatcaactcctttaagcacgtgcacaaacttgtatggaggagtcttgttggacttagcggatcttctctggcagcagatccaggcaaagagagacacagtgaagaccaggccaaaagcactgaagatgcccaccactgtgggaatttcatcgaattccacgcggctggtggtgataggagccatgttttctgcgtgctctgtccgaggtgctgaaagaactccaggcagattcacctggaaggaccctgaaacaaggcttccaggggaaacacgggggatccggggaccggcagcggcagcgggaggggctggaggaaggtccgcgctctctatcagcaatgtgccaccctgccctgttcctgttgggtcttctmrkcttrttssgagaytccagcstctwmaccsgaakgwcmatttcactgattgaaagtaagagggaattcctgcagc

SEQ ID NO: 3010 - DNA, 3256 bp, Rattus norvegicus
aagcaggctgcgccgtggctggccccacagtgggctgggaaaggattggccacggtgacagccgccccgtggccagcacaatgaagtgctcccttcgagtgtggttcctctctatggccttcctgctggtgttcattatgtctctgctcttcacgtactcacaccacagcatggctaccttgccctacctggactcggggactctgggcggaacacaccgagtgaagctggtaccgggctatactgggcaacagcgccttgtcaaggaggggctttcggggaaaagttgtacctgcagtcgctgcatgggtgatgccggcacctctgagtggtttgacagccactttgacagtaacatctcacctgtctggacgagagataacatgaacctcaccccggatgtccagcggtggtggatgatgctgcaaccccaattcaagtcacacaacaccaatgaagtgctggagaagctcttccagatcgtgcccggtgagaacccctaccgcttccgggacccccagcagtgccggcgctgtgctgtggtcgggaactcaggcaaccttcggggctctggctatgggcaagaagtggacagccacaactttatcatgaggatgaatcaggcaccgactgtaggctttgagaaggatgttggcagccgaacaactcaccatttcatgtacccggagagtgccaagaacctgcctgccaacgtgagctttgtgctggtgcccttcaaggccctggacctgatgtggattgccagcgccctctccacaggacagatccgattcacctatgctccagtgaagtccttccttcgagtggacaaagagaaggtccagatttacaacccagccttcttcaagtacatccatgacaggtggaccgagcaccatggccgctacccctccacaggaatgctggtgctcttctttgcactacacgtgtgtgatgaggtgaacgtgtatgggttcggggccgacagccgtggcaactggcaccactactgggagaacaaccggtacgcgggcgagttccggaagacaggcgtgcatgatgccgacttcgaagcccacatcattgacatkctggccaaggccagcaagattgaagtctaccgagggaactgagcagcctcaggcgccttcagaaccagtcacttcagggtctggcaagcgccggttgccgcccaccaatcagactgcgccgtccccagcwmysaawmarwrmwrmarwwrrgaggagcttctttcttagccaatcacacaactcaaggagaacttccggcgccgccgtctccaccaatcatggccttgggaggcggcgggcctggaccccctcccccaacccccaacccccaaccccgctttggatgagaatttttctgctttttaagaggccggtctgggtctgggagggagcaccttgaactgctcatttccagcttagtcccgatgggtgagtgaagcccgccaaagaaatgtggtcccggcgagatactttccagggcattctgtggctcaccagctagtagggggttgtattcactccctagttgggttaactcattaagaatgggaaattattatgtggacactgaagggaagtgttttctggggcctgaggcattcactgaagccctttctcccaaatgaacctcaactttgacctaggtcaagtcatgcaaatagcttccagttgtaacccgattcttgactcaccagccctttaggagctggaaagtaggttagaacaggcgagtaagcatggtaaaggggcggacaggaggagccatgcatggcagataccaatctgctcctccccagcaaagctccgagccatctgcaaggcctgcaaacaactgtcaagcgatcttggttggatagccatccctggcagctggagggtaactaaagtatgaatccaaagcaaatccaamacccaagcaagaggctgcctgctcctctttggggtgacaatgaaagaaaaagatacatgcacagggcactcctttccagcctactgtccaaccctgctgctctcgccttagggctaaagacttgggccgcgwgtgtgagagcacaagcagcggagtcccggtggtctcattttgtctccaaatcaacaggtgagctggagaggagacccaggacctaaggacagacgctgagaaggtggtggggaacaggagtgagggcacacgtgagagaagcacctkgcaygwgrcmsrrwrsagcttccywycmgttccwsayamtaatkwssccytarkgagktygacattaacaagcagcttcctggttgggggacagtcacacgtaaggagtgtgttaaagkttggtatgaggcaartacccytaaaaactaatwtatgaagaactttgcttgaatttgttcctkccaagtttcaaaagcaggggtagagaaaaagggagtataccgagaagggctgtagcggaacctytcagggctmtaatcatcgtgcagtcactgtaccagtggccgttmytgcctgtctccgctytcccaagaagctgctgtgatgagaagtgggaaagtactkykwttwykwywwwywbkaktgmgamgaagaatttatttttcctccttttgttttgcttaaaccatgagtcaccattctagaaaaggtaggtcccagcacccacatcstwtttcttstacagttatttaaacattcaatttttccctctgtttcttttcstgaattaaaaagaacraagtccwwrrarwwavwmawmwrwwmwgaactgtacccytcataggtgattctgaggaggtaaagatgtttgggggaacaaggcaactctgataacctckyacrmskgagaagccttttcatgggctctgcactcsgaagtccccccacagagggmtgagtattatggtttrgaaaaatcaatttattatgccaggcatggtggtatgtgcctttaatcctagcagttaggagtctgcagcaggaaagtaagttaaagghtagcctmagctatatggtaactttcaaactaacctgggmtatatgagaccctttctcaaggggaaaaaagggaacaaaaaaaaaaaaawmcattgtcccctcttcagattcctctaaaagagtaatgccttgggaagaatttctggttcacctgaaatggccttttgtaaatacagggtctttattacagrctmawrwwrrwwwawmwmagcacccataaagcggtcctcttcctgtgaaaaaaaaaaaaaaaaa

SEQ ID NO: 3011 - DNA, 4164 bp, Rattus norvegicus
gagatagggtgcgctcctctccagctcagcttctgctcttgcagccagacatcctcgctgttgctgctgctgctgctgccgcctgcctgcctgcctgcctgcctgcctgcctgcctgcccaccctcctggacttgcagcctaccgcttgactttttctccaattctactgccagctgaggagactccccacagctgctggctcctgcctgggaccatgtgtgcgaatgctgcacgggaaaagcaaggcgtttgctcctggcatggatcccagcgcagtttctcctgttgacttctggaccgcagatgcagctgctgaggtatttcctggcatctctccctctgctatcaccagctaaggactggccccaaatcaagcaggcaagtgtcgggatgggccacgctacaccaagccaacgctagggcgcgaggtgtgaagagttggccagaatgaccaactcctcctccacttcgacctccaccaccaccggaggatccctgctgctgctctgcgaggaagaagaatcgtgggcgggccggcggatcccggtgtctctcctgtactcggggctggccatcgggggcacgctggccaacggtatggtcatctatcttgtgtcgtccttccgaaagctgcagaccaccagcaacgccttcattgtgaatggctgcgccgcggatctcagcgtctgcgccctctggatgccacaggaggcggtactggggctcctgcccgccggctccgcggagcccccgggggactgggacagtggcggaggcagctacagactgctccggggcgggttgttgggcctcgggctcactgtgtcccttctgtcccattgcctcgtggctctgaaccgctacttgctcatcaccagggcgcctgccacctaccaggtgctgtaccagcggcgccacacggcgggcatgctggcactgtcctgggcgctcgccttgggtctggtgttgttgctcccgccttgggctcccaagccgggagcggagcccccgcaagtccactaccccgcgctcctggcggcgggagcgttgctggcacagacggcgctgctgctgcactgctacytgggcatcgtgcgccgcgtgcgcgtcagcgtcaagcgggtcagcgtgctcaacttccacctgctgcaycagctaccgggytgcgccgccgccgccgccgccttccccgccgccccgcacgctccgggtgccggaggcgccgctcatcccgcgcagcctcaacccctgccggccgccctgcagcctcgtcgggcgcagcggcgtctcagcggtttgtctgtgctgctgctctgctgcgtcttcctgctggccacgcagccgctggtgtgggtgagcctggccagcggcttctccctcccggtgccctggggcgtgcaggcggccagctggctcctgtgctgcgccctgtcggcgctcaacccgctgctctacacttggaggaacgaggagttccgcagatcagtgcgttcagttctgcccggcgtcggggacgcagctgcggccgctgcagccgccaccgcggtgccagccatgtcccaggcgcaactgggtacccgggcggctggccagcattggtaacacacctttcttggaggggcttcctaagctacttgccgcaccgcaccacctccttcttttgtaagctatccccgtcccctgggaagatcccggtggaggagattttcgtcttctttcctagtgcaatacctgaaccaaggtcttcccctaaatggagcccaattgtgtgcggccattcgacttttacctttttgttgctgtgttctaaagacacccttaggtccattcagacacccagatcgcaaggacttgtaaactggcattttaaaagaaccggttaatttatttcaagcttgcttttgaaaaagaactttcatagcaaacaacccttccgacctccaccgtcttacattcgaagcgccttgagtgtgtgggtgtgcatgagccaaaggtaacaccgtggaggaatacattgtgtgtgtgtgtgtgtagacagtattctaaccatgcttccttctgttgtagtttagtctttgtatattgacctcgaagagtgaaaccacaggtgtgtacacgggcgtgagttgccattgagcccccaagccctttattcttaaaagggtttgttttttttcttttctttttaaattgagtcatttttgaaatgagatcgactctcaagccagtgaggaaacaaaccaaatgtattattttactctcctctttattcccttctaaggtggaaagttaccgtcgagtattaaagtggaaaaaaatgtcaarwwwwrrawrrwmmraamctmgwratggaattttgaaagcaaaaaaaaggggggggaggggctatctattttaggtcgcagtttcacattttctaaggcatgcatacttcttgctaccctcatttgtaaccgacttatttgcctctgagtgtgatcgcaactttgaacattctgtactataatggttgctagggaggatgactcctgtattctctttaagatatctcaatgcacrwgrcataattaaacactgataccataattgcatagctaatgttagctgctattgcatgctcctagatgctagaacttatcgggcatgtggcatacaaagcaatacccattagacaaggacattttacttcttccagaagaaaaggcctttcagtcatttgaaaagagacttagacgaacctgtggctacctagagttcttgtcttgaactggtttgtgagaaaactcccatttggggactttatctccccagtgaaaccaatggtcaggatgataccctaatacagtctggatccacaaaggtattgtgtactttaggggttacacaagccacacgttaggaaatagcactgtcttatgttgttcatataatatatatatatattacagaaacatttactattatatcatgtctgttgaagagggaatcatgcaggcagttatgcaggaggagaatggtccaaacgggactctgttctccagtgtatcagttgaggtccgacatcttcatctttgacttcctaaatgtggttagatgcatttataatgtacaataacatgcgacatcattttgtaaaattaacaggggagaaagtaacaagaggtgtagatcagtctgttagtcacatcaaatctgaggccaaatagcctcgattaacccggtagttcaggagcgcagacagcttgctttgctgcactcttggaccaagaatggtaaggacgcttgtatatttgaaaacgtatgggaggcacgaggaaacggacattttgtagtaagacaaaataaaataaatatgtttgtcactaacagtacatcagcagtcatgtcattaammaaamwrwrwrmawgtatcatttttctcttatggagattttctttttctgtttccagtttcctggattcagatgttgaattaaagtttagataatgcttctcttggctctagctcttctttcttgggtatcttctctctgtctgtcttgaggatactgtaccagaagacactgttccaaaacacgactgatacagagtgacttcttttgttggctgtaagtttattttcagtttctaaaatgcctttttactttatataackrcayragstccttacattggtctgagaaaagaaatagccatgttttctttctgtaaacactgaggaatgggttataaagagacagagaggtggtgattttctaaagctctgtcaaccagccactctagataagcgttgttcttgtttctcaaagatgatgcaaaccagtttcctctctgtccttacaatgtgcaacatatataaagagctttgtgaatgggaatctgataccttgccatgtttctggtagcgctcccgggytggcaytgcgccacgtgggagacttttgattaatttactagtaattaacyccacaggactgactccttttagttttaaagtagcgctgacgtatytaaaaacgcctaggcgctgcctgcgagtgttggagttactgctttgacaaattaaagtaatggagattgtgttcttatttaaatgaaaccacatwttatccactcaggawtaaaaaaaaaatcctaaytsctwaaaaaaaaaaaaaaaaaaa

SEQ ID NO: 3012 - DNA, 1207 bp, Rattus norvegicus
tgcctttcccggggccagatcctcttcggagcgaccgggtcagtttgtcaaagtcatgtaggaaattgtgggtcatgtgaagatgggactcttggtatttgtacgcaacctgctgctagccctctgcctctttctggtcctgggatttttgtattattctgcctggaagctacacttactccaatgggaagactccaattcactgattctttcccttgactccgctggacaaaccctaggcacagagtatgataggctgggtttcctcctgaagctggactctaaactgcctgcagagctggccaccaagtacgctaacttttccgagggagcctgcaaacccggctacgcttcagccatgatgactgccatcttccccaggttctccaagccagcacccatgttcctggatgactcctttcgcaaatgggctaggattcgggagtttgtgccaccctttgggatcaaaggtcaagacaatctgatcaaagccatcttgtcagtcaccaaagaataccgcctgacccctgccttggacagcctccactgccgccgctgcatcatcgtaggcaatggaggggtcctcgccaacaagtctctggggtcacgaattgacgactatgacattgtgatcagattgaactcagcacctgtgaagggctttgagaaggacgtgggcagcaagaccaccctgcgcatcacctaccctgaaggtgccatgcagcggcctgagcaatatgaacgagactctctctttgtactagctggcttcaagtggcaggacttcaagtggctgaagtacatcgtctacaaggagagagtgagcgcatccgatggcttctggaagtccgtggccacccgagtgcccaaggagccccctgagatccgcatcctcaacccgtacttcatccaggaggctgccttcacgctcatcggactgcccttcaacaatggcctcatgggcagagggaacatcccaacccttggcagtgtggcagtgaccatggcactcgatggctgtgatgaagtggcagtcgcgggctttggctatgacatgaacacacccaacgcccccctgcactactatgaaactgtgcgcatggcagccatcaaagagtcctggacacacaacatccagcgagagaaagagtttctgcggaagctagtgaaagcacgcgtcatcactgacttaagcagtggtatctga

SEQ ID NO: 3013 - DNA, 2512 bp, Rattus norvegicus
  misc_feature (1870)..(1870): n is a, c, g, or t
ctcggaggaatggcgccgccgggttcaagtgctgtcttcctgttggccctgacaatcacagccagcacccaggctctgacccccacccactacctcaccaagcatgatgtggaaagactgaaagcctcactggatcgccctttcacgagcttggagtctgccttctactccattgtgggactcaacagccttggggcacaggtgccagatgtcaagaaagcgtgtgccttcatcaagtcaaaccttgatcccagcaacgtggattctctcttctatgctgcccaatccagccaagtcctctcaggttgtgagatatctgtttcgaatgagaccagagatctgcttctggcagcagtcagcgaggactcctccgttgcccaaatctaccatgcagttgccgccctcagtggctttggtcttcccttggcatcccatgaagcccttggtgcccttaccgctcgcctcagcaaggaggagactgtgctggcaaccgtccaggctctgcacacagcatcccacctatcccagcaggctgacctgaggaacattgtagaagagatcgaggaccttgttgctcgcctggacgaactagggggtgtgtatctccagtttgaggaaggcctggaacttacagcattgtttgttgctgccacctacaagctcatggaccatgtggggactgaaccgtccatcaaggaggatcaggtcatccagctcatgaacacaatcttcagcaagaagaactttgagtccctctcagaagccttcagtgtggcctctgctgctgctgcattgtcccagaatcgctatcacgtaccagtggtggttgttcctgagggctctgcttctgacactcaagaacaggctatcctgcggttgcaagtcagcagtgttttgtctcacgctctggctcaagccgcagttaagctggaacatgctaagtccgtggcttccagagctactgtcctgcagaagatgcccttttcacttgtaggggatgtttttgagctaaacttcaagaatgttaaacttcccagtggctactatgacttctctgtcagagttgaaggtgacaaccgttacattgcaaacactgtagagcttagagtcaagatctccactgaagttggcatcaccaatgctgatctttccactgtggacaaggatcagagcatcccacccaaaactacccgggtgacctacccagccaaagccaagggcacattcatcgcagacagccatcagaacttcgccctgtttttccagctggtagatgtgaacaccggtgcggagctcacccctcaccagacatttgttcgacttcataaccarragactggccaggaagtggtgtttgktgctgagccggataacaagaatgtgyataagtttgaactggacacctctgaaaggaagattgagttcgactctgcctctggcacttacacactctacctaatcatcggggacgccactttgaagaaccccatcctctggaacgtggctgatgtggktatcaagttccctgaagaagaagctccctccactgtgctgtcccagaacctttttaccccaaaacaggaaattcagmayyygkymcgagagcctgagaagagsccccccactgtggtgtccaatacattcacggccctmatcytctcgcccttgctcytgctctttgcactgkgratccggattggagccaatgtcyccaacttmacctttgytcctascacrrktatctttcacctgggacwtgctgcawtgctggggctcatgtatgkctactggactmagctcaacatgtyccagaccctgaagtacctggccrtcctgggcactgtgacatttctggytggcawyvgmayrnkgsymmmvyrrgswshywrsarwwcrgcacrttagttccagaagaagtttgaagaccctgaastsggmamtgassgtttaacaaagrgtggrgacagttcagagtktggaaagaatygggggacagawtwggrgaagrggaaatacctgttatttaaagrgagaaaagtcgagctatkcttacacgtttacttgtttctcactttttgcttcactgaacagatatgtttggacccagattgtctgtccctttgttgtgwtgcytgsccagattytgtgawtwtcccaggttmcccrgaggttgtmtttgaaaagttgaaatctgtaattcatcagctttggawtaargrgaatggtggamwmmmardrwwrawrrarmmwwrmawgtgtcatgtgaggagggctccgcagtcttcagttggtccatctcacccctttcttaacagtactgcaagtggcctagaaaaggcctgtctcctttcggctccagtagcaagcactttgtaggagccatgcttgtctttggagagtcttctgtgtttagccacaaatacctgctccaggcttttggcttgagcgtttgggcttggtgtatagagaagggttgaaattgtctcggtaaataaagctgactgcctgggtc

SEQ ID NO: 3014 - DNA, 1795 bp, Rattus norvegicus
gtacgtgtaggtgacgtggcggctccagttctttggtccggcttccactgcttacaagtccggcgaggaggcggcaacgacctgaggagagtagcggtggcggtaggcaacagaagagtccgaggttatgcgactcgatgatcccgcggaaacgctacggatctaagaacacggatcagggtgtctacctgggtctctcaaagacacaggttctgtcccctgcaactgctatcaatagcagcagtgacatcgctcctttgcccaccccggtggccctggtcccctcccctcmcgasrckryrysmkgccgggatcggacccaggagttcctgtctgcctgcaagtcgctgcagagccgtcagaatggaatccaaacaaataaaccagctctgcacgctacccggcagtgcagcgagtttaccctcatggccaggcgcattgggaaagatctcagcaatacatttgccaagctggagaagctaacaatcctggcaaagcgcaagtccctctttgatgataaagcagtagaaattgaggaactaacatacatcatcaaacaggacatcaatagcctcaacaaacaaattgctcagcttcaagattttgtgagggccaagggcagccagagtggccggcatctgcagacccattccaacaccattgtagtttcattgcagtcaaaactggcttccatgtccaatgacttcaagtctgttttggaagtgaggactgaaaatctgaaacagcagaggaaccgtcgggaacagttctccagggcgccagtgtcggcactgcctctggcccccaacaaccttggaggtggtcccatagttctgggaggagagtcccgagcctccagggacgtggccatcgacatgatggaccctagaacaagccagcagcttcagctcattgatgagcaggattcctacatccagagtcgggcagacaccatgcagaacattgagtctacaattgttgagctgggctccatttttcaacaattggcacacatggttaaagaacaggaggaaacaattcagaggattgacgagaatgtgcttggagcccagctggatgttgaggccgcccattcagagatcctcaagtacttccagtcagtcacctccaatcggtggctcatggtcaaaatcttcctcatcctcattgtcttcttcatcatctttgtggtcttccttgcctgaaccctcctccctcattctgagccactccatggagggcctggaacccttctggaaggacaggtggccactattgccactgagcctgtgcagggtagttgggagaaagsccatttccttggaactgctaagaatgscmmgwgkycmwgattysysasccwwgkstcwggccaswstgkcskrcyytcaggcccatgaaacacactggttctggatttggcctctgctgtgaagtggcagggaacagaagccagytagggccagtggggaggttgtctctaccatgagatttttataaacccagaccagcctcccctaaaggtaactggcagcaagaggaaacaatgccctccttsccttctggagagtgaggtgaggaagtaaaactatcccagggaccaacttaatcatytgggtcatctagaacttgactgccaccttctcctcaccatgtgaggtgggggggctytgagccytacagttgcacaaacctgactttggctactggtgactctcaatctgccaaacatgctgcagcctgtttcctcccaattacagcaagactgtcagccttcaaaaaaaaaaaaaaaaaa

SEQ ID NO: 3015 - DNA, 914 bp, Rattus norvegicus
gaaacggcggccgggaggggctacgggatcatggggcttctgaccattctgaagaagatgaagcagaaagagcgagacgtgcggctgctcatgcttggcttggacaatgctggcaaaacaaccatcctcaagaagttcaatggagaagatgtggacaccatctcgccaacactgggcttcaacatcaagaccctggagcaccggggattcaagctgaacatctgggatgtgggtggccagaagtctctgcgctcctactggaggaactacttcgagagcacagatggcctcatctgggtggtggacagcgctgaccgccagcgcatgcaggactgtcagcgagagctgcagagtctactggtggaggagcgcctggctggagcgaccctcctcatctttgccaacaagcaggacctgcctggagcactgtcctgtaatgctattcaggaggccctagagctggactccatccgcagccaccactggsgcatccaaggctrcagtgccgtcacaggggaggmcctgytgcctggcatcgactggctcctcgatgacattyccagtcgtgtcttwactsccgaytgagcttyttcagtgtcccagctcactgtytaggtccctgtcctcatccgacaccagccggagggataagcaccagctggccagactaacattcccaaccccmccgtgacctgctgctgctactgctgcccactgctgctccctcgraggagggctgtcacccatctcccaaagtggcctgcagccgccatgccaaaaggaaagactgggctgggagggactgcctgctgctgccaggatcctgggtgtcctcctcacctgtccagcagtgagaataaagtcctcctcacccrrwmmmwrrmwrrrmmawwtgtgaaaaaaaaaaaaaaaaa

SEQ ID NO: 3016 - DNA, 2651 bp, Rattus norvegicus
gtaatatgaccatgtcatggggactgccctgcctccagggccataccctcttcccaaacccttcagaaaggctctgtatctctgttctcaagcagagttgcagcctctcagaagagatgccatgaccttcacctgcaaagccctgctctgtcttggaatgactctgggcctctggatcacagtgctgacagagttcctccctaggccaatcctcagagtacagccagacactgtggtctctacacagagtaaggtgatcttcttctgtgagaggagtcaaggagccgaactttattgtctctataaaaagggaaatccacgaaatccacggtgcaaagaaattcgacctaaacctggcaagaaggttgaattcttcatctcaaaaattgaaccgtaccatgcaggacattaccactgttattatcagatccatggtcaatggtcagaggacagtgatgcgctggagctggtagtgacaggagtctatgactacaatgaactcaggctgtcagtactgcccagccctgtggtgacagtgggaaggaacatgacactgcactgtatctcacatagtcactatgataaattcattctcaccaaggaagatcacaagttcaccagctcactggacacacagtgtatacctcctagtggacagtgccaagctctgtttgttatgggacccatgacatcaaaccacaccgggacattccgatgttatggttactacaagcatactccacagttgtggtcaatacccagtgagcccctggaaattcatatctcagggctgtccaagaagccctctctgctaactcaccaaggacacatcctggaccctggagttaacctcacactgcagtgttgctctgacatcaactatgacagatttgctctgtacaaagttgggggtgttgacattatgcagcacactagccagcagactgacactggcttctccatgaccaacttcacactgggctatgtacaccactctactggaggccaatacagatgctatggagcacacaacctctcctctgagtggtcagcatccagtgatcccctggacatcttgatcacaggacccattcaaatgtctaccttgccacccataacatccatgccaccagatcagctggaaagttatgtgaatgctctgataggagtgtctgtggccttcctggtgttcctcttcatcctcatcttcatcattctccaaagaagacatcagagaaaattcagaaaggatggtgaagaggcccagaaagagaaagaactacaatatcctacaggagctgtggagcccataagcagggatagagaccagcagaagaggtccaatgcagctgctgccacccaggaggaaagcgtttatgcttcagtagaggacatggaaactgaggatggtgtggagctggacacttggaaaccacctgagggagatccacagggagagacatacgcccaagtaaaaccctccaggctcaggagggtagaagctatcattccttctgccatgtcaagggagcagctgaacacaaaatatgaacaagcagaagagggccaagaggtggacggtcaggctactgaatccgaagagccccaggatgtgacctatgcccagctgtgcagcaggacactcagacaggggacagctgcacctcctctctcccaggcaggagaagccccagaggagcccagtgtatatgctgctctagcgactgcttgcccaggagctgttcccaaggacaaggagcagtgatcctctgcctgccaggatgcctaacagagactgccaagagactctgggaacttttggaaacctgattgcactttaggtaacaacacactttggaaactaagccagatgtttcccaataatcaagtgaagtgagaaatgaaatagaagggacggttttacattgagacctaattttaatgacatttttcatcaaatgagaaaatttacagcctcagtttcacagccttataattctaacccatgggaggctgaggcaggagaattgcctttgctttgtggccatagtgggatatctagtgaatttcatgataccctggggtacatagtgagacatgtttcaaacaatgttagccaccaaaggccagggtggaagtatgtacttgaaagcctagcactttggaggagtggaaaggatggtcaagtggtcaaggtcatcttcagatacataggagcctacgagtaagaggcaatccaggaacacactagacactgtaaaaatagataaataagccaggcttggtagtgcatgccttcagtctcagcactaagaaagtagagacaggcagatttgagcaaatctttgtgagttcaagaccagataatctacatagtaagctccaatacagccagggacatacacataaatcttgtctcaaaatacataaacaaaatagggccagtaggatgactcagaagtaaaggcacttgcaaccatgactaatatcttaagttcaatcagcaggaaaactagaatgagaaaaggaactccaagaaatgttatctcatttctacctaagtccttgatgtccttcccacaaccaataagtacttaaaacaattaaaaaataaacaaaaacaaataaccacaaaaaaaaaaaaaaaaaaa

SEQ ID NO: 3017 - DNA, 1888 bp, Rattus norvegicus
ggcacgaggcctgacgtcagatgtcgctttsacaaacscccccgggggctgargaaggctctccgctgctctgatgggccagcccagtmstggcccagctccctggagaggcaccsgcatcctctgggctgagctgtagctcctgtgacgctgacttccaggcatgaggtggctcctgccctggacgctggcagccgtggcagtcctgatgktgggcaacatcctggccacggccctctctccaacccccacaaccatgaccttcaccccagcaccactggaggaaacgattacacggccggaattctgcaagtggccgtgtgagtgcccacaagccccacctcgctgcccactgggtgtcagcctaatcacagatggctgtgaatgctgtaagatatgtgcccagcagcttggggacaactgcacagaggctgccgtctgtgacccacaccggggcctctactgcgattacagtggggaccgcccgaggtacgcaataggagtgtgtgcacaggtggtcggtgtgggctgtgtcctggatggcgtgcgctacaccaatggagagtccttccaacccaactgcaggtacaactgcacctgtattgatggcaccgtgggctgcacaccactgtgcctgagccccaggcccccacgcctctggtgccgccagccccgtcacgtgagagtccctggccagtgctgtgaacaatgggtatgtgatgatgatgccaggaggccacgccagactgcactgctggacaccagagcctttgcagcttcgggtgcagtggagcaacggtatgagaactgcatagcctacactagcccctggagtccctgctcaacaacctgtggcctaggtatctcgactcgcatctctaatgtcaatgcgcggtgctggccagagcaggaaagtcgcctctgcaacctgcggccatgtgatgtggacatccgaccacacatcaaggcagggaagaaatgcctggctgtgtaccagccagaggaggccacgaacttcactctcgcaggctgtgtcagcacacgcacctaccgacccaagtactgtggagtctgtactgacaataggtgttgcatcccctacaagtctaagaccatcagtgttgatttccagtgtccagaggggccgggtttctctcggcaggtcctatggattaatgcttgcttctgcaacctgagctgcaggaatcctaatgatatctttgctgacttggaatcttaccctgactttgcagagattgccaactaggtaggtgtgtggcttggagaacagctccatgttgcaaagcagtcagccctctgtggcccaggacttcacaattgagccttatttcatctacttcctcctcaattctgcattccctgaccctgaccctcagtttctgttcctattttgaccgttccaatggcccaggaaagtgctgctcaggctcagacaatgggtccctcctttgkgacattytatatcactccaargaaaacacctctstgaactgttcacaatgaaagccaagcctgaccccagccagtctggctccaacctgtgcaagttgtcagaaatcctaatgggacagtccaaggaaaaaacagcaastgaagawccagaatcacagactccctcttcwgatgcccagcctgaggatgttgaratcctttcagacacatggatgggattgggggaacgggaataagctatcatcccttmccaaatgatactatcytgrgaatttctgcccacaacataccaaaagtgctcttattccaaagatytatgtatcacaagtcaccaaacatkttytaggtgaggaaaatacttgcaccattwtgatktgaaattgaaaatcatatttaaaaraaraaaaaaaaaaaa

SEQ ID NO: 3018 - DNA, 3258 bp, Rattus norvegicus
gcagcggcaacgcggagccggtgttcttcaagcctggtgtgggagtgcagcggagcatcatcgccgaagccggagcggagcgctcggctccggccccgcgctccccgcctcccgccttctcgggccggcggcgggcgagctcgcgggcccggccccagctctccagtgccccgccggttgccggcggtccccgccccccgccgagtgcatgaggttgacgctactttgttgcacctggagggaagaacgtatgggagaggmasgargcgagttgcctgtgtgtgcgagctgtagccagagtatctatgacggscagtacctccaggccctgaatgctgactggcatgcggattgcttcaggtgctgcgagtgtascacctccctttcacaccagtactacsagaaggatggacagctcttctgcaagaaggactactgggcccgctatggygagtcttgccacgggtgctccgaacacatcaccaaagggctggtcatggtggscggggagctgaagtatcaccccgagtgcttcatctgccttgcctgtggaaacttcatcggtgatggggacacctacacactggtggagcactccaagctgtactgcgggcagtgctactaccagactgtggwaactccagtcatcgaacagatcctccctgactcacccggctcccacctgccccacacagtcaccctcgtgtctatcccagcctctgctcatggcaaacgaggcctgtctgtctccatcgacccccytcacggyccaycaggatgtggcacggagcattcgcacacggtccgagtycaaggagtggacccgggctgcatgagcccggatgtgawgawttccatcmacatcggagacaggatcttggaaatcaacggcacgyccatccggaatgtgccgctggacgagatcgacttgctgatccaggagaccagccgcctgctccagctgaccctcgagcacgacccccatgactcactgggccatgggccagtgtcggatcccagccccctggcctccccgktacacactcccagcggacaggcaggcagctytgcccggcagaaacctgtcttgaggagctgcagtattgacacgtcyccgggtgccggctcaytagtctcaccagcctcccagcgcaaggacctgggtcgctccgaatccctccgagtggtttgtmgamcacacmgcatcttccggcsgyckgacctcatccatggggaggtgttgggcaagggctgtttcggccaggccatcaaggtgacacatcgagaaacgggcgaggtgatggtgatgaaggaactcatccggtttgacgaggagacccagaggacattcctcaaggaggtgaaggtcatgcgatgcctggagcaccctaacgtgctcaagttcatcggcgtgctgtacaaggacaagcggctgaacttcatcaccgagtacatcaagggcggcaccctgcggggcatcatcaagagcatggacagccagtacccgtggagtcagagggtcagctttgccaaggacattgcatcagggatggcctacctccattcgatgaacatcatccaccgagacctcaactcccacaactgtctggtccgtgagaacaggaacgtggtggtggctgactttgggctggctcgactcatgatcgatgagaagggtcagtctgaagacttgcgtagccttaagaagccggaccgcaagaaacggtacacagtggtgggtaacccctactggatggcgccagagatgatcaatggtcgtagttacgatgaaaaggtggacgtgttttcctttggaattgtcctttgtgagattatcgggcgtgtgaatgcagaccctgactatctgccccgcactatggactttggcctcaatgtaaggggtttcctggaccgctactgtccaccaaactgtcccccaagtttcttccccatcactgtgcgctgctgtgacctggatcctgagaagaggccctcttttgtaaagctggaacaatggctagaaacacttcgcatgcacttggctggtcacctgccactgggcccacaactggaacaactggagcggggcttctgggagacctaccggcggggcgagagctcgctacccgcccaccccgaggtccctgactgagcccagtgggcccaccatcttcatccccgcctctggagaatagaccctcaccagattcctcagcagggggtggcctaggcatggagccctcagctggggcagtggtgaccatatccgtacccccagacctgccttttcccctcatgcagggtgccccccagcctctctctgcctctggcccccaagtcacaaggctgcacacacacgtggttggtcacatcgccctgccttacctcccattgtgtggagccaccccctcacttgtctttgcatgagctggagggttggggaagctgaacccattccatgcaatgcctgcagctgtctgcacagcgcacctgctggcagctcttcccagcaaggctgggccagaaggcagctttagaagtgagccctgtaaggccaagggagaggctatgtgcccgggaacccaagggcagtccaggatcccttggggaaaatctaggtagcatcaggtattgacagggatctaaatcccaaagcagagagagagagaggtccagtcccatgtggccaggcagtggccttcgctcttgcttcgtgtccatctcatttcctgatcaaagccactttagtaagaagtaggtaccagtcctcaggatgagccaggagccctcaggggagagggcggatgatgcctgggaacacagctgacagggagggtccagcccacaccacagaggctaggcagagggaatgaggtagccatccaccagcaccccagccctcccggttcatctcagcacccttcctgggcctctccccgtggctggagcagccccaccccctccctgggtgcatctgccctctgagttctttctgtgtgatctattttttaagaagagtttgttttgttgttttgttttaggtgggtgggggtgggagggccatctcttcactctgcttcagttgaacacctagggacgtattaaaactgtgaagctttctcagtgcactttgaacatggaagagaatctgaacccccgcgggaccaggactgaaagaggcaaggcctgcttgcctcggcccagtgaccgtgataggaatgaacccaaactcaataaaatcaattctgtgctcccccc

SEQ ID NO: 3019 - DNA, 2008 bp, Rattus norvegicus
  misc_feature (1789)..(1789): n is a, c, g, or t
tcgctttgcggcatggcgatggcggagggcgagcggactgagtgtgctgagcccccccgggacgaacccccggccgaaggcactctgaagcgggcagaggagctcaagacacaggccaacgactacttcaaagccaaggactacgagaacgctatcaagttctacagtcaggccatcgagttgaaccccagcaatgccatctactatggcaaccgcagcctggcctacctgcgcaccgagtgctatggctatgcactgggcgatgccacacgggctatcgagcttgacaagaagtacatcaaaggttactaccgccgggcggctagcaacatggcactgggcaagttccgggctgccctgcgtgactacgagacggtggtgaaggtgaagcctaatgacaaggatgccaagatgaagtaccaggagtgcagcaagattgtgaagcagaaggcctttgagagggccattgcaggcgacgagcacagacgctctgtcgtggactctctggacatcgaaagcatgaccattgaagatgaatacagtgggcccaagcttgaggatggcaaagtgacaatcaccttcatgaaagacctcatgcagtggtacaaggatcagaagaaactgcaccggaagtgcgcctaccagatcctagtgcaggtgaaggaagtcctctgcaagctgagcacgctggtggagacaacgctgaaagagacagagaagattacagtgtgtggggacacccatggccagttttatgacctcctcaacatatttgagctcaacggtttaccctcagagaccaacccctatatatttaacggcgactttgtggaccgtggttccttctccgttgaagtgatcctcaccctctttggcttcaagctcctgtatccagatcattttcatctacttcgaggcaaccacgagacggacaacatgaaccagatctatggcttcgagggcgaggtgaaggccaagtacacagcccaaatgtatgagctcttcagcgaggtgttcgagtggcttccgctggcacagtgtatcaatggcaaagtgctgatcatgcatggaggcctattcagcgaagatggtgtcactctggatgacatccggaagattgagcggaatcggcagcscccagactcargtcccatgtgtgacctgctgtggtcagatccccagccacagaatgggcgctccgtcagcaagcgtggtgtgagttgtcagtttgggcccgatgtcaccaaggccttcctggaggagaatcaactggactacatcatccgcagccatgaagtcaaagctgagggctacgaggtggcccatggtggccgctgtgtcaccgtcttctctgcccccaattattgtgaccagatgggaaacaaagcctcctacatccacctccagggttccgacctrmrgccccaswtccaccaattmacagcagtgcctcacccmaamgtcaagcccatggcatacgccaacacgctgstgcagctaggaatgatgtgaggcagtctacagcagtaaccagggcctgcacagctggagggccccgccttcggcytgmtgccccgccycagggcagcgttgsaccccytttwaytttgtaaagttkgtattkattcccctttaggttgcagagggggtgrggrcagygtggggcagcagabgmcaggctyhtggtcagagaaassagbagtygaaatygggggtagggcmcagcyygggcatytgragraaggccaacytgggtrgggstaggrccgaraggaggtchtgccccbtngcstgcatggctcytcccytggymwdsmaataggaccytgccataggaagaccccaaaagagggtcatcagggagrchtcctchtgstagcctyagggtggggcgakgytgggscccahcccccagctattttatgtwctgtaattmaatatgttamamtaaaawaaarwmawtwytgtawgtcaaammwmawmwmaaammmaaaaaaaaaaaaaaaaa

SEQ ID NO: 3020 - DNA, 4197 bp, Rattus norvegicus
ttatttatcgatcgcacgggcagagcagcgcgcggagctcgctcgggggagatgcgggaccacccactggcggggaagcagcgagcagccctctcgcgcccccgcgccgccgagcgcctcctgcctccgcgcccggacgccagcccgctcctgcctcggtcccggccccacgctgccaccgcctgccccgcaaccccggaaccccgcagtcccggagccccgcagccccgcagcgccccgaccccggggacgccggccgcgcagtaagttggcaggagcgagtggcctgggcggctcgcctcccccgcacctttttgaacttgttgctgttggctctgctcgcctgcgcctggcttttgggaaggtgacaaggaggagggaggcacagagggtgggggaaggggacagagagctcgccagagctttatttatgctccccgggagcctgggatctggctgctcgggagccgctggctctgcctttccctttccgggtgcaaggcgacagcaaagtctctatgcaactcagccccggcgcgtactttgccaggtatgtacggcgggcgaggcgcgttctgcgcggaggcagatgctgctgccgccacggcggcggcggctgccagctccgagctctataactgtcacactgcacctgagctgaacttgaacagagagtgaaggggcccatcaggcgaacgctctctttcggctggcacagagggtgtcagtcgacgtgaggggacagagaactctagaccgacgccccccgccgcgagccctgcacttcacctccatctctgcaagcgcagcgttgagtagaggaggccagcggactccaagggacgcgggacagcggctgtgacccgatttctggagctacaacaacaggtcgtctttttgagacgcctttggcgggaaggaccacttcatcagaaggtgaaaaggttctttcttgtaagagactaccactggttgactttccctgtttcctctcacctgctctatataccgaccctgtatcaaccagactgtatcaggggagaagtgaagacacctgtttgaagcaaggctgtctctaaagtcaccctgtgcgtttagatgtgccaggaggtgccctggtccaactgttggcagagctttgtttaggctctatggagagagatttttaggtcactgtattttttttttctctctcttagtattccaaatacttgtctgtgagagaaatctggctttttgggtactgtgacttcasstgcgccaccttggaataaccgtgttcctgtgagccgtgttccccagtgttttgtctgaggtgaagaagtggggcattttgcttactttcattgtgttactttgggtgacccctgatcactcttgtgacctctacttcagacaacatggcagccggtgttgcagcatggctaccctttgccagggcagccgccattgggtggatgcctgttgcctccgggcctatgccagctcccccaaggcaggagagaaaaaggactcaggacgctctaattgtgctgaacgtgagtggcacccgtttccagacatggcaagacaccctggaacgatacccagacactctgctgggcagttccgagagagactttttctaccacccagagacccaacaatatttctttgaccgtgacccagacatcttccgccacatcctcaacttctaccgcacggggaagcttcactatccccgccatgagtgcatctcggcttatgatgaagaattggccttctttggcctcatcccagaaattattggcgactgctgttatgaggagtacaaggaccgcaggcgggagaatgcagagcgcctccaggatgatgcagacactgacaatacaggagagagtgctctgcccaccatgactgctaggcagagggtctggaggrcctttgagaacccccacaccagcaccatggccctggtgttctactatgtgaccgggttcttcattgccgtctcagtcatcgcgaatgtggtggaaacagttccatgtgggtctagcccaggccacataaaagaactgccttgtggggaaaggtatgcagtggccttcttctgcttggataccgcctgtgtcatgatctttacggttgagtacttgcyrcgcctggccgcagcgcctagtcgttaccgttttgtgcgcagtgtcatgagtatcatcgatgtggtggccatcctaccctattacattgggctggtgatgacagacaatgaggatgtcagtggcgcctttgtcacactccgagtctttcgagtcttcaggatctttaagttttcccgccactctcaaggcctgcgtatactggggtacacactgaagagctgtgcgtcagaactgggcttcttgctcttttccctcacaatggctatcatcattttcgctacggttatgttctacgcagagaagggctcttcagcaagcaagttcaccagcatccctgcagccttctggtacaccatcgtcaccatgacaacactggggtatggcgacatggtaccaaaaaccatagcagggaagattttcgggtctatctgctcactgagcggagtcttggtcatcgcgctacccgtgcctgtgatcgtgtctaacttcagtcggatctaccaccaaaaccaacgagcggacaaacgaagggcacagaagaaagcgaggctggccaggatccgggcagccaaaagtggaagtgcaaatgcctacatgcagagcaagcggaatgggttactgagcaaccaactgcagtcctcggaggatgaaccggccttcgttagcaaatctggatccagcttcgagacaacaccaccacctgcttcactgcctggagaaaaccacgaaccatgagtttgtggatgaacaagtctttgaagaaagctgcatggaagtggccactgttaatcgcccttcaagtcacagcccctccctctcttcccaacaaggagtcaccagcacttgctgctcacggagacacaaaaaawctttccgaatcccaaatgccaatgtgtcaggaagtcatagaggcagcgtgcaagaactcagtacaattcagatcagatgtgtggagagaactccactatccaacagccgatccagcttaaatgccaaaatggaagagtgtgtcaaactaaactgtgaacaaccttacgtgaccacagcaataattagcattccaacacctccagtaaccaccccagaaggcgacgacaggcccgagtctcctgagtattcgggaggaaacatcgtcagggtgtctgctttgtaagacaattggcacaggtctgagagcatgggagccctgactatggaaagaatctaaaggagaagaaagaagaaataacaacccctttttgcatattaagacagccaagcaagaaggttggcgrycgmsryawmmawarawwmawagatacagttagagccacattcacagaaacattcctgctgtggccgggttttaggtgacttcttggtccgaaactattgtgtcataaatgttttttggtagtattctttggtccactgtattcctgtgacccagtgcattatctgtccctggatctctctagtgtctttctactgggcttacccacccattaatgacaggattagtgtttactgtagttataaaacaaaagattcctgcctttgtactcccaaccagatgttacaaaaagactgtcatcaatccccttgataaaaactagagtaaaggagttgacatgaaatatctctagtgttttcactacttatcgaaaatccagaccctacaaacacccatatgggttttgggaaggagttagatggtactttaaaaaaacaaaaatcacaggatgggtgatttcagaattcaatcaatgtattattttgcttcagatcttcaatacattttgagatcaactgaaatgcagaggtaaactgaagtgctttgtgtaccaatatttgatgagagcatgcttttaatgcatccaaggaagcaacaatgtatcttagaagagtctagtgtaatcacaaggcacaagtctctgcaaaaaatcaagaagaaggagtgtgatgaagttgaccactatgtacatttaagtgaaaagtcttgctaccttttcacccttgaatatccgcagatgtgtctgcacgtcatcgtgtaaaaataaaaataaaaaaaaaaaaaaaa

SEQ ID NO: 3021 - DNA, 3258 bp, Rattus norvegicus
tggtgagcacctcggggcctcagttcctcttcctagaggacgctgggctcttttctgaagccagaacaattcttccgcgtctktgcgtgccaaaaactgcacctacacacccccgccccggagcagcaatcggaaggctcggttagtggtatgggggcgtggcctcgtggtcttgtgcagcggcccagccaatgggtacgcactttgtcgttagcggcggagcgctggggtttggtccacacaagggtttggtctgggsmaktmggcggatggaagccagctgtcccgagaagcagtgaactgtggcgtcatcccgagcagtgccttaccggtattgtgmtgmttcacmtgcctcgctcggcgttctcctcaggccccgccatggagcgacaggtccaacgacwtcgccagacgttccggtccggccgatcgcggccgmkgmswkwmcgamwgsakmmgstcgaggccctccggaggatggtgcaagagcgagagaaggacatcttggcagccatcgcagcagacctgagcaaaagtgaactcaatgcatacagtcatgaagtcattaccatccttggggagattgacttcatgstggggaatcttcctgaaktggcctctgctcggccagcgaagaagaacctgcttaccatgatggacgaggcctatgttcagccagagcctctgggagtcgtgctgmttattggagcttggaactatccttttgttctgaccctgcakccamtggtgggagccrttgctgcakgaaatgctgccattgwtamgccctcggaactcagtgaaaacacggctaagatctyggcygaaytcctccctcagtatttagaccaggacctgtacatgattgttaatggcggcgttgaagaaaccacagagcttctgaggcagcggtttgatcacattctctacacaggaaacaccgcagttggaaaaattgtcatggaggctgctgccaagcacctgacccctgtgaccctggagctcgggggcaaaagcccatgctacattgacagagactgtgacctggacgttgcttgcagacggataacctggggaaagtacatgaattgtggtcagacctgtattgctcctgactatatcctgtgtgaagcctcctcccaggatcaaatcgtacagaagattaaggatacggtgaaggacttttatggggaaaatgtaaaagcttctcctgattatgaaaggatcatcaaccttcgtcactttaagaggataaaaagtttgcttgaaggacagaaaatagcttttggtggggagactgatgaagctacacgctacatagccccaaccatactcactgatgttgaccctaactccaaggtgatgcaagaagaaatttttggaccaattctcccaatagtgtctgtgaaaaatgtggaggaagccataaatttcataaatgatcgcgaaaagcccctggcactctacatattttctcacaacaataagctcatcaaacgggtgattgatgagacatccagtggtggagtcacaggcaatgatgtcatcatgcacttcactgttaattctttgccctttggaggtgtgggtgccagtggaatgggggcttatcatggcaaatacagtttcgataccttttctcatcagcgcccctgcttgttaaaagggttaaagggagagagtgttaacaaactcaggtaccctcccaacagcgagtccaaggtcagctggtcgaaattcttcctgctgaaacagttcaacaaaggaaggctgcagctgctgcttctcgtgtgcttggttgcggttgcagctgtgatcgtcaaggatcagctgtgatgacttccttgtagcctctactgaagtacccctcggccaaatggttaacacaccaatgcttttaaaattgtacccaaaccaggaaatgaaattcacaggtgaactgcagtcaaacctaagttgttgccacaaaccactgatgaaactcagtgcttcagccaaatcccagcatttgtcagccgtgcaggtgctgagagggtggagactgggaggggcgacacctagtccatggcagcgggatgtcagggagactcgacaactgctcccgcactctttgctccaggacatagctctcccacccggtgtcaacaccctccaggctttccagctgtcctctgattgctgaggttcctgttagggacccaggtactaaacctgggcgggtggatttgtcggcctcatccattgtggctcgagaccggccttcgggagtcggctctcagtctaaacatcctttctcattcatagtgtgtcacccgaagatgcttgtttgtgacattgtgacagtctgwcakractgtcccrgtrcctttgtgatgacttaaactacactgaggagcttgccaacttgtgaatgcccttcagagggtctggcagtcacagckrkkccagagcccgagggmmgaagattccggagcccggagtttgaggccaacctaggcaacataatgggaccctctcattattattcctccataacaatcccctcgagaccctcgatttgaatgttatataggtcttcaggataaatctgcttattttcacagcacaacacaaaaaaaatttacttttgaaatcttagagagattcctacagatcttagcatggagctgttcctgtagtgaaaggggggttattaracatgaggcttcagaactcatggggcagggttgttggagactaccgtgagctgagggggcacactgaagcgatgggatggccagaagcrcacctgagcaagcggggcagcattctctgtcagaccctaacatggctacacggggatgtggcagagagatctgtgysgyykgctgccagsgctggttaggcctgaagctccaagctgcagaggtctcattgccttcccaggatccaaattaagactgcccactcaatgagaatgtcacttgcgtatgtacamccatgtttgctgagtaacctgttccaccgttgaggctgtctgaagtgtattgtatgaggtatcaagaacgagtcattggcccatttggcaaatagttgcttatgtagcaattgtcatggactaatcataaaatattttgcacaaaatttcaatgttraacttgcactcactgttgttaaattataaatcacagcttctagttaggccaaaatatttacatactctactaatcttcaaaataaatgtatcccrkmmytyawwrwraaaaaaaaaaaaaaaaa

SEQ ID NO: 3022 - DNA, 1363 bp, Rattus norvegicus
aacctgtcaagtccccattctaagatgtccttggaaaaaatgaaagaccttcaccttggtgaacaggacctacagccagaaaccagagaagtgaatgggattctcatgtccaagttgatgagtgataactgggacaaaatctggaacttccaagcaaagcctgatgatctccttattgcaacctatgcaaaagcaggtaccacctggacgcaggaaattgtggacatgatccaaaatgatggggatgttcaaaaatgccaacgggccaacacctatgaccgacatcctttcattgagtggactttgccttcacccctcaactcaggtctggatctggctaacaaaatgccatcacctagaaccctgaagactcatctgcctgttcatatgctgccaccttccttctggaaagaaaactcaaaaattatctatgtggccagaaatgccaaggactgcctggtatcttactattacttctcaagaatgaataaaatgctgcctgaccctggtaccctgggagaatacattgaacagttcaaagctggaaaagtgctgtggggctcctggtatgaccatgtaaagggatggtgggatgtgaaagaccaacaccgtattctgtatctcttctatgaagacatgaaagaggaccctaaaagagaaattaagaagatagcaaaattcctggaaaaagacatatcagaggaagttcttaataaaatcatctaccacacctcctttgatgtaatgaaggaaaacccaatggccaactataccactctaccctccagtatcatggaccactctatatctcctttcatgaggaaagggatgcctggagactggaagaactactttactgtggcacaaagtgaggattttgatgaagactaccggaggaagatggcagggagcaatattaccttccgcacagagatctgagagcagtgaggaagagagaagccctagatttcctgactatatgctttagctatttgagcttcattcctgagttttgtatgtcctgtgatactatttcatcaaaatgtaatcagaccttccacactaggtgattatccttattgatacctactatacaaccatgcacttttactgcacttacgcaaataacagataccttcactagcctgtaattgtcttgtttcacggcaaatctcatgaatagagagacacacaaaacaggttagacataagaaagtaaataagaaaagccaaacgaatgagaagtgagcactgtgcattaaccaaaggctatttaattttcttaacaattgtcttcatctgttctctttaacgaaatacctaatttgtttataaagaataaaaatgatttcttatgcaaaac

SEQ ID NO: 3023 - DNA, 2646 bp, Rattus norvegicus
gtgggcttcggccggctgctcccaggctcctttccttcctacggccttcacggtccattcggtccctctttctgccaccggccgccatggagcagccgccggcgcccaagagtaagctaaaaaagctgagtgaagacagtttgactaagcagcctgaagaggtctttgatgttttggagaagcttggagaagggtcttatggaagtgtttttaaagcaatacataaggaatctggtcaagttgttgcaattaagcaagtacctgttgagtcagatgttcaggaaataatcaaagaaatttccataatgcaacaatgtgacagcccttacgtggtgaagtactatggcagttactttaagaacacagacctctggattgttatggagtactgtggggccgggtccgtttcagacataattagattacgaaacaagacattaacggaagatgaaattgcaactattctaaaatccacgttgaaaggattagaatatttgcattttatgaggaaaatacacagagatataaaagctgggaatattctcctcaatacagaaggacatgcaaagcttgcagattttggagtggctggccagttaacagacacgatggcaaaacgcaatactgtaataggaaccccgttttggatggctcccgaggtaattcaagaaataggttacaactgtgtggctgacatctggtcccttggcattacgtctatagaaatggcagaaggaaaacctccttatgctgatatacatccaatgagggctatttttatgattcctacaaacccaccaccaacattcaggaaacctgagctctggtctgacgacttcacggattttgtgaagaagtgcttggtgaagagtcctgagcagagggccactgccacccagctgttacagcatcctttcatcaagaatgcgaagcccgtgtcgatattgagagagctgatcacggaaggcatggaaatcaaggccaagcggcatgaggagcagcagcgagagctggaggacgaggaggaaaactcggatgaagatgagctggattcgcacactatggtgaagactagttcagaaggtgtgggcacaatgcgggccaccagcacgatgagtgaaggggcccagaccatgattgaacacaacagcaccatgctagagtcggacctggggaccatggtgataaacagtgaggatgaagaggaggaagacggaaccatgaaaagaaatgcaacgtcaccccaagtacaaagaccttctttcatggactactttgataagcaggacttcaagaacaagagtcatgaaaattgtgatcagagcatgcgtgagccatgccctatgtcaaacaatgtttttcctgacaactggagagttcctcaagatggagactttgattttttaaaaaatctaagtttagaagaactacagatgcggctaaaagcactggaccccatgatggaacgagaaatagaagaactgcatcaaagatacagtgcgaaamgacagcccatcctggatgccatggatgccaaaaagaggaggcagcakawtttytgaccagatcccttctgtytctgkgtgaccagagaccaaggamcacaggaattgaaggaactgtamtactttttaatccctaaaatgtmtactctacaatttttttagaagtcaaaaatgatggtacacacctagataaatttcccaaaagcaaactttgcagttgtgtcctcgatgacgtcggtttaaacggatgagaacaatacacatgcgcacctctctctctgccagccgttacctgcaacagaaccaacctgcgactgaagccgcctgtggaggcggagtccagcgccattgctttgggctcacagcactgcagggcttgtgttgccctgatcttccttcctgtggagaagcctatttattgaccccctaggtagacttatttatttatgcagctttttttttttggaggggggggttctaaaaaaagatcaggatagttttggtgaatgtccagacacatcacagattgtaacactcaaccaaattgtacactaagcagggagctatgggtgtattcctttatctccagtaaaaataaagccataatgtccacatggaccagacaattttataagtgttaattcttgattttgatattggtacaaataaaactatatatacataggtcaaaaagagttatacagtgtaaaaccaaagaaatcaatgaatttttgcaccaaaaaagtgtgggaaatatttttaaagacatgaaacccaagaagacagtgcagtcgtwaatgtttcctttattggtctgtagtaacttcaagttcattctatgggacatgcttctgtcacagggcttttgttgamttcattcwwctcctgggaattggtaagcatcatgtatctgacaataaagcagtaatatgtttatactaaaactgtgtgtccttagggcctaaaaaatgaaagcattagaaaaaggctcctttctgagaagcaattagcatttgtgtaattgacctgggaccagtcatttcctgcactacacagggccattttgatatcgtgttcttttatgtgttaattactatgtgtgcakcacaaagacaaataaattccactgwgccacccaaaa

SEQ ID NO: 3024 - DNA, 2989 bp, Rattus norvegicus
gacacagtactgccgatgttggacagaggatcgcttaacagaacgaaatctcaaaacaaattaacaggacccggttgcttgatttcccaaatcagaaaaggctcgaaatgtctagaggggctgactgatgcagcggtgacccggactggagacagttggacgcgatcatctctggtgcttttgttcaaccttgaaaccttcgccacaggagacttgcctgagcagagaagcaaacgtggagaaacaaagagagatctagcgaaaagcctctgggaccaaggaggggaggtgggactctgggttggcggtggcacctgctgccggctattaataatagggtcgcgatgcgtttataaggtgtttgattaaacaaagactctatgagagaagaataactagcaacagccccacgtctgagtcgtcgcctccgacctttttcaacgtgggttctttgggccgagcgtcgtttgccgagaactagatctcacctgaccccagacgctgaaaacaagcgctgtggcatcctgggccacccaagctgacaagggcgcgccccctgagcacacgaggtgccccacgagggggagggacccacagccgtcccgcccgcaccgcggtgtccgctgcgggcacctgcagccgagccgccacccgcagtcgcagcgcgtccggcggccgaacccggtcgtcagctcgtcagcacctgctctgcttctctcccgcccgccgccgcgctgcacgcctcgagcgctccctcggccccggcggggaccggggaccccgcagccaccgccatgctgcctgtgctctacaccggcctggcggggctgctgctgctgcctctgctgctcacctgctgctgcccctacctcctccaggacgtgcggttcttcctgcaactggccaacatggcccggcaggtgcgcagctaccggcagcggcgacccgtgcgcaccatcctgcatgtcttcttggagcaagcgcgcamgassccgcacaagcccttcctgctgtttcgcgacgagacgcttacctacgcccaggtagaccggcgcagcaaccaagtagcgcgagcgctgcatgatcacctgggcctgcggcagggggattgcgtggccctcttcatgggcaatgagccggcctacgtgtggctctggctgggactgctcaaactgggctgtcccatggcgtgcctcaactacaacatccgtgccaagtctctgctacactgctttcagtgctgcggggcgaaggtgctgctggcctccccagagctacacgaagctgtcgaggaggttcttccaaccctgaaaaaggagggcgtgtccgtcttctacgtaagcagaacttctaacactaatggcgtggacacagtactggacaaagtagacggggtgtcggcggaccccatcccggagtcgtggaggtctgaagtcacgttcaccacacccgcagtctacatatatacttcgggcaccacaggtcttccaaaggctgcaaccattaatcaccatcgcctctggtatgggaccagccttgccctgaggtccggaattaaggctcatgacgtcatctacaccaccatgcccctgtaccacagcgcggcgctcatgattggcctccacggatgcattgtggttggggctacatttgctttgcggagcaaattttcagccagccagttttgggacgactgcaggaaatacaacgccactgtcattcagtacatcggtgaactgcttcggtacctctgcaacacgccccagaaaccaaatgaccgggaccacaaagtgaaaatagcactaggaaatggcttacgaggagatgtgtggagagagttcatcaagagatttggggacattcacatttatgagttctacgcttccactgaaggcaacattggatttatgaactatccaagaaaaatcggagctgttggaagagaaaattacctacaaaaaaaagttgtaaggcacgagctgatcaagtatgacgtggagaaggatgagcctgtccgtgatgcaaatggatattgcatcaaagtccccaaaggagaggttggactcttgatttgcaaaatcacagagctcacaccattttttggctatgctggaggaaagacccagacagagaagaaaaagctcagagatgtttttaagaaaggagacgtctacttcaacagtggcgatctcctgatgatcgaccgtgaaaatttcatctattttcacgacagagttggagacaccttccggtggaaaggagagaatgtagctaccacggaagtcgctgacattgtgggactggtagattttgttgaagaagtgaatgtttacggtgtgcccgtgccaggtcatgaaggtcgcatcgggatggcctcgatcaagatgaaagaaaactacgagttcaatggaaagaaactctttcagcacatctcggagtacctgcccagttactcgaggcctcggttcctgagaatacaagataccattgagatcaccgggacttttaaacaccgcaaagtgaccctgatgraaragggctttamcmcmtcagtcatcmaagatacyttgkatttcatggatgacacagaaaaaacatacgtgcccatgactgaggacatttataatgccataattgataagactctgaagctctgaatgttgcstggctcctaacacttccagaaagaaacvcaataggcctagcawagccccttcacatgtgtaatccaactttaacttgattaaaggttataggtgtgatttttcctaggraattattcatttaaaggacaattgtttgtttgtttgtttgttttttattaattacaccagaacgtttgcaagtaaaaagatttaaagtcacttatttttcaatgtgcacctgccatttgtccttgcaaacttagcttcttggagagagggycttatttttttaaagacataataaactatgtaaacmctammmwrwraaaaaaaaaaaaaaaaaa

SEQ ID NO: 3025 - DNA, 3334 bp, Rattus norvegicus
  misc_feature (690)..(690): n is a, c, g, or t
cggcacgagggggctcggaagagccaagcctggaaagccaaggagaaaggccagagaggcgagagaaaggcggagagtgagaggaagcgagggcsccgggggggtggggcgggggactcggggccggcttgcacaagcggacggacgatcggaaccggcccgtcagacttttcccacttaggtttattttctctttcttcctttttcggtcccgctactccggcgccgcgtggcccggagggaagcaggcgcgtgggcggcaagtgcccagccgccggagcggtgccgccactgccctttctggcgcagtaacgccggtcccacggcggtacgggcgcgatctccgcgagagccgtttgcgctccatcccctgggcgagcggcgagtgcgrctcagctgcgcggccgccgggagcgcggagtaccgaagcgagaacagaggcgcgcaccgggcggaaccgggcccgctttgaagctcccctaggcgggcgagccggccccacctcttacatcaaagcgatcgctccgcgcctcccaaccttgttgaaactctctgggccagcccgggtacgtcttcctgatttcccgcgggggtggagagatgagaagccgagctctctgagtcgggagcgagggaccagcgcccgggatcgaatcccggactcccggagtcgagaaagcgccaagcggncccgcgcccctgccgccctcgcccgccgccgcctcccgcggggcatttggacattttctgctgcgcagctcgcaccccagctctcggagcccgccgcagagtcacacttcgcttgcgcgcgagcgcttccccagcgcctccggctctcctgcgcctcgggctctcctgagccccggcgggccaccggcctgcttggctgcgggttcgggtctggctgtgggatgttagctgtgggggcgatggagggcccccggcagagcgcgttcctgctcagcagcccgcccttggccgccctgcacagcatggccgagatgaagaccccgctctaccctgccgcctatcccccgctgcccaccgggcccccctcctcctcgtcctcgtcctcctcgtcctcgtcgccctccccacctttgggcgcacacaacccgggcggtttgaagcccccggccgcggggggcctctcgtccctgggcagccccccgcagcagctttcggcggccactccgcacggcatcaacgacatcctgagccggccctccatgccggtggcctcgggggccgccctgccctccgcctcgccctcggggtcttcttcctcctcctcctcgtccgcctccgccacctcggcctctgcggccgccgctgctgctgccgctgccgccgccgctgccgcctcatcgcccgccgggctgttggccggcctgccccgcttcagcagcctgagccctccgccaccgccgcccgggctctactttagccccagcgccgcggccgtggccgccgtgggccggtaccccaagcccctggccgagctgcccggtcggacgcccatcttctggcctggggtgatgcagagcccgccttggagggacgcgcgccttgcctgtaccccccatcaaggatccattttgttggacaaagatgggaagagaaaacacaccagacccacattctccggccagcagatcttcgccctggagaagactttcgaacaaacgaagtacttggcaggaccagagagagcacgcttggcctattctctggggatgacggagagtcaggtcaaggtctggttccagaatcggcggaccaagtggagaaagaagcacgcagccgagatggccaccgccaagaagaagcaggactcggagactgagcggctcaaggggacttcggagaacgaggaggacgacgacgattacaacaagcccctggacccgaactctgacgacragaaaatcactcagctgctgaaaaagcacaaatccagcggaggcagcctcctgctgcacgcgtcggaggccgagggctcgtcctgagcgcggcccgcaccgcggggatcccgaccgcgccccacagccggtcccgcggtccccccccgcaccccggctgctcgcccggctttactattttctaaratgtacatatctatttttttaacctaraaattttggcggggagggtgggggtcgtcggtaggacggcgcggtgatggcraggaaaggagcccgccaagtgcactgctcaaaaaaccccgcagccgaacccgcatccccgcggcttcccaggacccttcccacccgcgamgtcaggcgtccccggtccaggctcggtcctttgctttgcgttccctgagcaccgggccgtgtttccgaaaggtcgtcggccaccgcctggtgggaatctcagagccaccgagggcagctgccaccaagggagaaagggacgctacccctccccccaactgctctgccgaccaagtaacctgttgacggctctctatgtaaataaatcgtgagtcacactgactagaagttactttattgtgaatatttaaaatgtaaaaggctttttggaatttggtataaagagatgaactgtactctcgttgatttaaggtattcacaccacttggccgcctttcatattaacttgaaaagcttagaaaaacgacgtcatcgccctactcagacgcctcccgactcactcctctttcggctctgcttctttcctaaccgcttttctccttcaccaattcctgcagggccccaggcagccccaggcccccaccccggtccagctccaagacttgcagtctgagatcccgggacccacgagcttctcacaccagcctttgggttcccttccgaatttgcacagtcgtttgttgctatttattagtgattaaaaaaagatatcggggaggaaaggactacagtaccttgtatttaatttaactcctttctgataaaaatgcgtgttaaaagtagatggtgggaattgttacaagcgctctggtcagaacataaacgttccatttaattgctgtaattgaattcgaagtgttttgtatcataagaatactatagactatgtaaattgttttcttttaagctaataacggtgatatatcagcctctttaacacttattaatttatatgaggaattcggtttgtaaagaaaaggcagcccctttgcgagaaccatgaaatgtaatgcactttctgtttcaaaggataaatcgaattaaaaacagcaacaaaaaatagtttgaagacgtctgttgccttaagggaacatgtacaggttacctggcctcatcagagatctcaaataaagtcaagagcacatttaaaaaaaaaa

SEQ ID NO: 3026 - DNA, 1678 bp, Rattus norvegicus
ttacccaacctgcaccctctcactggctacagcactccctccgaccttgggattcccagacaccggccagcgttgctgcccttcggcttcctagccctgcgtaggcgcaggtgcaacctccctgcagtgggcctggtgcaataggactgcggacatcatggcgcacggaaacgcccctcgggacagctaccacctggtcgggatcagcttcttcattttgggtctgggcaccctcctcccctggaacttcttcattaccgccatcccgtacttccaggggcggttggcagggaccaacagcagcgctgagaccccgagcaccaaccacaccagtcccacagacaccttcaacttcaacaactgggtgacactgctgtcccagctgcctctactgctcttcacgctcctcaactccttcttgtatcagtgcatccctgagtcggtgcgtattctgggcagcctgctggccatactactgctctttgccctgacagcagcgctggtgaaggtggatttgagccccgggctgttcttttccatcaccatggcatccgtctggttcatcaattccttctgtgcagtgcttcaaggcagcctctttgggcagctgggtaccatgccttctacctacagcaccctcttcctcagtggccagggcctggctgggatcttcgctgcccttgctatgctcacgtccttagccagtggcgtggacccccagacctctgcccttgggtacttcatcacaccctgtgtgggcatcctcctctccatcatatgttacctcagtctgccccatctgaagtttgcccgttactacctgaccaagaagcctcaggccccagttcaggagctggagaccaaagctgagctcctcggagctgatgagaagaatgggattcctgtcagcccccagcaggcaggcccaactctggatcttgacccagagaaggagctggagctggggctggaggaaccacagaagccaggaaaaccttcggtctttgtcgtcttccggaagatctggctgacggcgctgtgccttgtgttggtcttcacagtcaccctgtcggtctttcctgctatcacagccatggtgaccaccagctccaatagccccgggaagtggagtcagttcttcaaccctatctgttgcttcctgctcttcaacgtcatggattggctgggccggagcctgacttcctacttcctgtggccagatgaggacagccagctgctgcccctgctggtgtgcctgcgcttcctgttcgtgcccctcttcatgctgtgtcatgtgccccagcgtgcccggctgcccatcatcttctggcaggatgcctacttcatcacattcatgctgctcttcgccatttccaacggctacttcgtgtctctcaccatgtgtctggcacccaggcaggtgctgccgcatgagagggaggtggccggagccctcatgaccttcttcctggccctgggactctcctgcggagcctctctctccttcctctttaaggctttactctgaggaccaccgcactccacagtcctccctcactgctgcttctggagctggacattcccggggaaggacctctgctataccgggtctcttggtctgtgggtgccaggagggggcagaaactaccttggctggtagccacattgcatatggtga

SEQ ID NO: 3027 - DNA, 7251 bp, Rattus norvegicus
  misc_feature (2125)..(2125): n is a, c, g, or t
  misc_feature (2180)..(2180): n is a, c, g, or t
  misc_feature (3874)..(3876): n is a, c, g, or t
  misc_feature (3879)..(3881): n is a, c, g, or t
  misc_feature (4744)..(4748): n is a, c, g, or t
  misc_feature (4760)..(4760): n is a, c, g, or t
  misc_feature (4765)..(4767): n is a, c, g, or t
  misc_feature (4788)..(4788): n is a, c, g, or t
  misc_feature (4860)..(4860): n is a, c, g, or t
  misc_feature (5053)..(5057): n is a, c, g, or t
  misc_feature (5062)..(5062): n is a, c, g, or t
  misc_feature (5080)..(5080): n is a, c, g, or t
  misc_feature (5233)..(5237): n is a, c, g, or t
  misc_feature (5239)..(5239): n is a, c, g, or t
  misc_feature (5260)..(5261): n is a, c, g, or t
  misc_feature (5289)..(5291): n is a, c, g, or t
  misc_feature (5296)..(5298): n is a, c, g, or t
  misc_feature (5348)..(5348): n is a, c, g, or t
  misc_feature (5608)..(5610): n is a, c, g, or t
  misc_feature (5612)..(5614): n is a, c, g, or t
  misc_feature (5631)..(5631): n is a, c, g, or t
  misc_feature (5633)..(5633): n is a, c, g, or t
  misc_feature (5854)..(5858): n is a, c, g, or t
  misc_feature (6507)..(6511): n is a, c, g, or t
  misc_feature (6526)..(6526): n is a, c, g, or t
  misc_feature (6597)..(6597): n is a, c, g, or t
  misc_feature (6859)..(6860): n is a, c, g, or t
  misc_feature (7061)..(7065): n is a, c, g, or t
taactccaagctggtgcgtagtgtctgagcagctaccagcccaaaagctggagtcaccatggcggcaggagttgcagcctggctgccttttgcccgggctgcggccattgggtggatgccagtggccaactgccccatgcccctagctccagccgacaagaacaagcggcaagatgagctaatcgtcctcaacgtgagtggccgtcggttccagacctggaggaccactctggagcgctatcccgacaccctgctgggtagcacagagaaggagttcttcttcaacgaggacaccaaggagtacttctttgaccgtgacccggaagtgttccgttgtgtgctcaacttctaccgcactgggaagctgcactacccacgctatgaatgcatctctgcctacgacgatgagctggccttctatggmatcctccctgagatcattggcgactgctgctatgaggagtacaaagaccgcaagcgggagaacgctgagcggctcatggatgacaatgagtctgagaacaaccaggagtccatgccctccctcagcttccgccagaccatgtggcgggccttcgagaacccacacaccagcaccctggcactggtcttctactacgtgacaggcttcttcattgcggtctcggtgatcaccaacgtggtggagacggtgccatgcggcmmggtgcctgggagcaaggaactgccgtgtggagagmgctactccgtsgytttcttctgcctggacactgcgtgtgtcatgatcttcacggtggagtacctcctccgactcttcgcrgcacccagcaggtaccgcttcatccgcagtgtgatgagcatcatcgacgtggtggccatcatgccctattacattggcctggtcatgaccaacaacgaggacgtgtccggggcatttgtcacactccgggtcttccgcgtcttcaggatcttcaagttctcccgacattcccagggyctacggatcctaggctacaccctgaagagctgtgcctcagaactaggctttcttctcttctccctcaccatggccatcatcatctttgccactgtgatgttttatgctgagaagrgctcctccgccagcaagttcacaagcatccctgcgtctttctggtacaccatagtcaccatgacaacactggggtatggagacatggtgcctaagacaattgctgggaagatatttggctccatctgctccctaagcggcgtcctggtcattgctctgccagtccccgtcatagtchccmactttagcaggatctaccatcagaaccagagagcagataaacgcagggcacagaagaaggcccgccttgccagaatccgtgtggccaaaacagggagctccaatgcctacctgcacagcaagcgcaatggactcctcaatgaagctctggagctgaccggcaccccagaagaggagcacatgggcaagaccacgtcactcatcgagagccagcaccaccacctgctacactgcttagaaaagaccactaaccacgagtttattgatgagcagatgtttgagcagaactgcatggagagctcaatgcagaactacccatccaccagaagcccttctctgtccagccactcgggcctcaccaccacctgctgctcccgccgtagcaagaagaccacgcacctgcccaactccaacctgccggccacccgcctgcgcagcatgcaagagctcagcaccatccacatccagggcagtgagcagccctccctcaccactagtcgctccagccttaatttgaaagcagacgacggactgagaccaaactgcaaaacatcccagattacaacagccatcatcagcatccctactcccccagctctaaccccagagggagaaagtcggscaccccctgccagyccaggtcmcaacacgaacwttymkkccawarycagyamtgytgtcaagktctctsycywktmmmwacactggacagagggcctgagggggtagtggggagtaaaggggggctggyatgttgggtgggtggccactgggaccactccctccccactatttctgcctgccccattgcacctccagcactgagacttgtgcctggaagggaaaggaaacagnaaagggtcccaaggatccccctgctggagtggacatagccctgtgacattgcatnttactgggrctagmgcwmsrgccttaakkgrrwgcagrckrcktgmctggasasggcmwrstgsrrrkwcyycakmccaaataacagttgtttctggagaccccagtgaggaaaacacaagaccaagagcagcccagaggccgagtcgtcacatgcaaacaggaagaaattataacactgtgtatttaagcacctttttcaaggatcttaatggataatatttattcatgggaaaaggtggaaaacaaaatcatcaatggatattcgtgaaatgtttttctccacgaacccaacacctttaaaccaaaacaatgcattttgtgaggttggtttttatttttcttcttttatagcaaaagcttttaggctcaaagtcagttactgctgagttctctccccattccctggatgggtgaggtcaccttagccgggccctcactgcccagctgacctgcacagaactgtcaagcaaccacacagcaaaccttctgctccgttggtccgtccgtctcctttgtctctgtacctatctgcttcaccttggctgtttctgtgtccaaccatctgtctcgccgtggacagtaaatccttctccgtcactgccaagtactgcagacttgtgcctggggtcaggccgagtgaatgccaatacagaaaagaaaggaagccagtgggctgagtttaagggtgaggtaagtctatattatgaacagaggtgcttgggttttaattggaaccacttatctttgcagtttaggtgggggtggtggtcttgaaattgaaatcagcaacctcagaaagcagttgtttctgctatgccccaatgaagacagaagcaccaagaagctcccacagttccagagcgccttgctgtgtaccctcctttaggatccaccatgaagtccatgcggagctctgccaagaggcttcatgagcatcttcaagtgaggaggatgggaggagaccctggcttaccacccaaggcggttcctaaatagaactgtgaaagttaagcttgtgtatctcatgaagaatgtttcaaagcaagaaagcaagcaagaggctctagatgatcattgcctggtctaaaagatgccatgaggtctgagccctcatctctgaagatagctaatgtgaggccactgatgacctccacacaaatgagggagtgcagattatatcctgaaaatgtggatatgtttgttcaagttatttgcagggtagtgggcctgggaaacagtgtttctggaatcttcctaatcattttcaccacttcacagcagagcaagtgagcctcagggttagtgacaagagtcctttcctgcccttctcaaccccaaatactctattgcagtctctgaagcctaggatctgaggcacatgagctgtttggaatttcttacccattctacagctgtttaaaataaagataagctgttcatttacagctcaaactctctctacccactacagccatctagatgagttttaactagacagcggttaacctgaggacactcatggggcttcctggttccagccccagtgaccctgaatgcagaggagtcctggtgttttgaacggtaccaaaccagaaagtggctagaagggtggaagaaaggggcccttccttccatgtttgtctccctgtcttcatcctcagtggcccgacagtcctttctcctagacctggnnnccnnntcaagatttccccttataggaatggagtggttcttccaatctagtaacttcagacatattttagcagccaaggcatagagccaagctagacccaattttagcaggtaggccaagtagtagaagaggatcttccttttgaagagtggatcatggaacaaaggaatgtctagttgcatgataagccctaagagctgagtggaagaaggataagagttgaaaaggaacacttgaattctcatacaaaccacsgttytatttcagaacaagtcgttagagagttagaataatgrctgcttcaaccaaggatstccatgtcacttgaacagtgcaccaacgcagcatactgtgcttctcatgaaaagaaatatattttaaaacctgcacctccaaaattccatttttattgacttcagagacctgaatcttgtgttgtttctatttcatctccaaagcccatatcatgccagctcctaaaaataatcattaaactgtctgcattttcattcccccattttagtcttgacaagagataaggaacccaactcacctatgctcaaagataccaacccaagaaaacagctcacagccatatctgytaaaggggattcacggggaagcacagcggcaaaacttcgatcaacttagtaaatctgattcatcagctagtaaggcaacaaccaggataccacgttcttctggagaccaagagctctmtgatgcaatgactgcacrgtgtacaaaccatgttagggtatcagtaaattccccactccaccactccattcaaccttacttagcattggtgrtgaararwrrrraaddwmmwrawammmwaamawggtttgtacactgtgagtcattgnnnnnatgaaaaaaagnaaagnnnaaaaaaaaaggtgggaatggncaaagtgaaaaacggcctgtgcttattctacaaggatctcaagtgaacgcagtcctgattgttcaacacagnaagaaaattcactttcacagtcaacaagtcatcttactcagtagaacacaaagtaaatggttcataacttcaatatctgcaaggaaaaatacagtacaaattactaaaaaatactaaaatatagaactgtgttcaggcctccccactacatcaagcgcagcagcaacctgaaatctgaaacttttaataaaannnnngcagnatgcaagagctcagcacnatccacatccagggcagtgagcagccctccctcaccactagtcgctccagccttaatttgaaagcagacgacggactgagaccaaactgcaaaacatcccagattacaacatccatcatcagcatccctactcccccagctctaaccccagannnnntngcatgatgagtgtgagtggtnnaagtctggaatcccactgtctctgtagnnnctccnnnggttactactgctctcactgattttgtttttgtacagattcatcccattnggaggaaatatggtgtgtattacaaactcctccttggagatgggttcattgcttatcggtagcatctggaaagaagtttccctgatttccaggatggagttgtctttcttagtgccagcttctgcatagtcatcctttctcctcctccctttgctgtacgcgcagttccgtgagaacagggacccattcctatgcacataccaacacaccaaagcaaggagggcgatgcttaccaggccacagccccaccaatgatggcnnngnnnggtaaatttggattttngnaaggttctttctcttgctctcgattgagggtggttgtggggttgtacattcgaagaggggcagtttgagtctcaatacaaacaggagtttcatcaaacaggtaaaggttactggtttccatgggaaccatgcatactctatagggtgattcaggttctagagctgtgaccaagtatctactacgttctcctgttacgatggtttccgttatagatccaaannnnnggggttttaatatctggttgtttggtcacaggagctggccactgtccttgagcaggatatgctgtgttaggtattgcggtggttatctgaacggtgctcacaatcccactgtctttacaatcaaacagttctgcactgaggtccttgatagccattccacggaccttttctggagcttggcacatgagcccacgcacattgaccttcacaggtagtgactgcaaccagtctcgtacccatttcatcttgcacccacaataccaaggattgttgcgaagaatcagttgggttatattgtccaaatcatcaaagataccctgaggtaaattgcttaggttattattggacatatcgagtcgatacagctgccttaaataagaaaaagcatttgggggtacccggttgatatggttgtcttgaaggtaaagcttcctcaggctcgtgccgggaaggttcacgggtgcggctgtcaaggaattcctcaccagggacagttctgttaagtttactaagttgaagaaaactttgtcacccaaaccgtggttgttcaacaagtttccatctaaaaccaggcgtttcaggcttgtgagaccgtgaagcgatggggaagagatagttgatatgcgattgtcatctaggcgtaattccnnnnngttctatttcagaanaagtcgttagagagttagaataatgactgcttcaaccaaggatctccatgtcacttgaacagtgcaccaangcagcatactgtgcttctcatgaaaagaaatatattttaaaacctgcacctccaaaattccatttttattgacttcagagacctgaatcttgtgttgtttctatttcatctccaaagcccatatcatgccagctcctaaaaataatcattaaactgtctgcattttcattcccccattttagtcttgacaagagataaggaacccaactcacctatgctcaaagataccaacccaagaaaacagctcacagccatatctgcnnaaaggggattcacggggaagcacagcggcaaaacttcgatcaacttagtaaatctgattcatcagctagtaaggcaacaaccaggataccacgttcttctggagaccaagagctatatgatgcaatgactcacagtgtacaaaccatgttagggtatcagtaaattccccactccaccactccattcaaccttacttagcnnnnnacgagggaaaaagcaatcctttataccctgctgctacagctgtaattccattgcctgtgagttgaagtaaaaaccctcccccgtctccggagcgcggcatccagtgcacacaaagccacagcagctgcagcctgagcccgtcctgcttcagatcactcctgcgctgaggactgcgcgcctcgtgcc

SEQ ID NO: 3028 - DNA, 4620 bp, Rattus norvegicus
ggcactcgagcgcacacccgggcgggccgcagcggagaggtgcggagcgcagcgaaggcggcagcgggagctagccgccgcccctgcgctccggggctgcggggcgcatggggcgcgtggagccgggaacactcgcgggttgcgcacccggccgcctgctgcggtgagacacggcgccggacgcccccagagccccagcagtagggaggatgaccatggctggcggccggcggggactagtggccccgcagaacacatttctggagaacatcgtgcggcggtccaacgacactaattttgtgttggggaatgcccagatcgtggactggcccatcgtgtacagcaatgatggattctgcaagctgtctggctaccaccgagcggaagtgatgcaaaagagtagcgcctgcagttttatgtatggagagctgaccgacaaggacacggttgaaaaggttcgccagacctttgagaactacgagatgaactccttcgaaattctgatgtacaagaagaacaggacacctgtgtggttttttgtgaagatcgctccaatcaggaacgaacaggataaagtggttctgttcctttgcactttcagtgacataacggcattcaagcagcccattgaggacgactcctgcaaaggttgggggaagtttgctcgactgacgagagctctgacaagcagcaggggagtcctgcagcagctggcccccagtgtgcagaagggtgagaatgttcacaagcactcgcgcctggcagaggtcctgcagctgggttcagacatcctcccccagtacaagcaagaggcgccaaagacaccccctcacatcatcctacactactgtgtctttaagaccacatgggattggatcatcttgatcctgaccttctacacagccatcctggtcccttacaacgtctcctttaaaaccaggcagaataacgtggcctggctggtggtggacagcatcgtggatgtcatctttttggtggacattgtcttgaattttcacaccacctttgtcgggccagcgggggaagtgatctctgaccccaaacttatccgcatgaactacctgaagacgtggtttgtgatcgaccttctctcctgtttgccatatgacgtcatcaacgcttttgagaacgtggatgagggcatcagcagcctgttcagttctctgaaagtcgtgcggctgctccgtctcggacgagtggcccgcaagctggaccattatatcgagtacggagcggcggtactggtcctgctggtgtgcgtgttcgggctggctgcccactggatggcctgcatctggtacagcattggggattatgagatctttgatgaagacaccaagaccatccgtaacaacagctggctctaccaactggcattggacattggcactccataccagtttaatgggtctggttcggggaagtgggaaggcgggccaagcaagaactccgtatacatttcctcgctgtacttcaccatgacaagtctcaccagtgtgggctttggtaacatcgccccatccacagacatcgagaagatcttcgccgtagccatcatgatgattggctcccttctgtatgccaccatctttgggaatgtgacgaccattttccagcagatgtatgccaacaccaacaggtatcatgagatgctcaacagcgtccgggatttcctgaagctctaccaggtgcccaaggggctgagcgagcgggtcatggactacattgtgtctacctggtccatgtcccgcggcatcgacacggagaaggtcctgcaaatctgccccaaggacatgcgagctgacatttgcgtacacctgaaccgaaaagtgttcaaagaacaccccgccttccggctggccagcgatggttgcctgagggccttggccatggagttccagacagtacactgcgccccaggggacctcatctatcacgccggggagagtgtggacagcctctgcttcgtggtctcgggctccctggaggtgatccaggatgatgaggtggtggccatcctagggaaaggagatgtgtttggggatgttttctggaaggaggctacccttgcacagtcctgcgctaatgtccgggccttgacctactgtgacctgcacgtgatcaagagggatgccctgcagaaagtgctagaattctacacagccttctcccactccttctcccggaacctgattctcacctacaatctgaggaagaggattgtgttccggaagatcagcgacgtgaaacgagaagaagaggagaggatgaaacggaagaacgaggccccccttatcctgcctcctgaccaccctgtcaggaggctcttccaaaggttccgccagcagaaagaagccaggctggcagccgagagaggtggccgggacctggatgacctggatgtagagaagggcaatgccctcacggaccatacctcagccaaccacagcctggtgaaggccagtgtggtcacggtgcgtgagagtcccgccacgcctgtgtccttccaggcagcctccacctccacagtgtcagaccacgccaagctgcatgcaccgggatctgagtgcctaggtcccaaggcaggcggtggcgaccctgccaagcgcaaaggctgggcccggttcaaagatgcctgtgggaagggtgaggattggaacaaggtgtccaaggcagagtccatggagacgcttcccgagaggacaaaggcatcgggcgaggccacgctgaagaagacagactcctgtgacagtggaatcaccaagagtgacctgcgcttggacaatgtgggtgaggccaggagtccccaggaccggagccccatcttggccgaggtcaagcattctttctaccccatccccgagcagacactgcaggccacagtgctggaggtgaagcatgagctgaaggaagacatcaaggccttgaatgccaaaatgacctccattgagaagcagctgtctgagatcctcaggatactcatgtccagagggtcctcccagtctccgcaggacacgtgtgaggtctccaggccccagtccccagagtcagacagagacatttttggggcaagctgagaggatcatttcaaaacaaacaaacaaaaaaatcaaagacaaaagcctgccccctgcccctgacacttcctaccgcaccaaacacatgaccaacaactttcaaactgggctttttctgacaagaagtcaaagtcagaccaagtgacttaggtgtgcctgcgtggtctctggaaaacataagagggaacatggcaaggaaccctaccatgcaagatggcagctgtgttgggctagccattgacagttgttgaagaaggggcattacatccatcgaaagagcatttcctctaacatgttttaccaatgtgatatttttaaagggttaaaactaccaggtaagggcagcagccatgtagagaccggtggaagaaccctgaaaacctttcacaaatagactacactgggcttctttaccaagacccctgaagaccacagcaggcacaggacttctgggcattcaccaccctcaagtagccctgtctgacaccacctgtttttctactctcgtcttttgtaacaagctcgtgataggggagcttgacgggctggaagaacctttccactctaacggtagaggtgaagcatcgggtgctgtgcgtggacacgcaggctgggcccctcaggtttccttgcccagaagagctcctgtgctctcttcccggaggagtcctcagtgtccttgaagcaccgaccctaagcttccaagaaaggaccatttcccacccaaggtgttgttggtgtggagacacgtaccttgccacctctcacacagttcaaaggagtcagcgtgaatttacctgcagcttaaaggtctgtctcaaaagtgaaacgccagtcttcatgctagtgtatctgaacctttcaaggaggtctggaatttcctgcgggagccagacctggtgggggcgtctccacctgccacttgaccttccttagagccactgactctacacctgtgacttccgagtcatcccatcgacccattagkcmttgrgaagttcacagctctcctttcagaagacagaccgcttyycggtaaggacgcagcgtgccctaccgtaytcccccgtgagtgtagccycttattattcagatgctgtatttcggcatcagttggagactgtccacattcaagttgcaaggacattcatamtyatgagcagttcgtcatcccggggcttmtcrtacgmacgctctccgtcaaatcctgccaaatcstttatcgrgattttttktktktytktttyttttcccyctgtccgaatgagcatgaataamcaagtgagaaggamccmaggctatttttgtggtcarccgaggatgctgccwmrwgcysccctgtgtggctgtgtggatgtggagaacatgtgggcactccmcggatgawaccccctttthttgacatttttwaacmagcmcaaatkatatttgtaaaaaaaaagtttaatkttatttmttatggctmrtdmmstmttttmwacstgaaaaaawaaaaaaaaaaaaaaaaaaaactctagcggcc

SEQ ID NO: 3029 - DNA, 1804 bp, Rattus norvegicus
tcaacaggagtgcagccaccagagtcaaggctgttggacactctcagagctagaggctgcccctcccgaaggcctcaggagatgtgaggttcaaccctaaatccagagtcaggtccaggtccccagaggagaggagccctggtgaggaaacctcaaagtcaagtctccattcagccttcacaggcctttgcaggaagcagaagcagaggcaatgggtgctggcggcccgcggcggggtgctggtcctccagatggtggctggggctgggtggtactgggcgcctgcttcgtgatcactggcttcgcctatggcttccctaaggctgtgagcgtcttcttccgagagctcaagcgcgacttcggggcaggttacagtgacacagcctgggtgtcctccatcatgctggctatgctctacggcacgggccccttgtccagcatcctcgtgacgcgctttggctgtcgcccagtgatgctggctggtggactgctggcttcagcgggcatgattctggcttcctttgcctcgcgcctcctggagctgtacctgacggctggggtactcacaggcctgggcctggctctcaacttccagccgtcgctcatcatgctggggctctacttcgagcggcgacggcccctggccaacgggctggcagcagcaggcagcccggtgtttctgtccacgctgtcgcctctcggccagctgctgggggagcgctttggctggcgcggcggcttcctgctgtttggcggtctcctgctgcactgttgcgcctgtggggctgtcatgcgtccgccccctggaccccagccgcgcccagaccctgcgccccccggtggccgggctcgccacaggcagctgctggacttggcagtgtgcactgaccgcactttcatggtatacatggttaccaagttcctgatggcgctcgggctctttgtgccggctatcctgctggtgaactacgccaaggacgcgggtgtgcctgatgccgaggccgccttcttgttgtctatcgtgggcttcgtggacatcgtggcacggccagcgtgtggtgctttggcgggcctggggcgactgagaccccacgtcccctatctcttcagcctggccttgttggccaatgggctcacggacctgattagcgctcgtgcgcgctcctacggcacccttgtggctttctgcatcgccttcggcctctcctatggcatggtgggcgcgctgcaatttgaggtgctcatggcaaccgtgggtgcaccccgcttccctagtgcattgggcctagtgctgctcgtggaggccgtggctgtgctcataggaccgccctctgccggccgcctggtggatgctctgaagaactatgaaatcatcttctaccttgctggctctgaagtggccttggcaggagtcttcatggcagttaccacctattgctgcctgcgctgctctaagaacatctcatcaggtcgatctgctgagggaggagccagcgacccagaggatgtggaggctgagagggactctgagccaatgcctgccagcactgaggagccgggcagccttgaagctctggaggtgctgagcccccgggctgggtccccagaacaagaaccagaggaggaggcagtgcctgagctggatcacgagtccataggtggccatgaggcacgaggccagaaggcatgaaactgtggcttcctctctgagggcctggtacatggggagccagcctggggtggtctcttgggaacccaatatgttagaccctgttcacagtgaataaagggcccctaaaagatg

SEQ ID NO: 3030 - DNA, 2443 bp, Rattus norvegicus
gcagtcttttccgtgcctcctggacgaggctgctctggcmgcctcagcccggacaggttggtccacaccatggccacctgctggccggcactatgggcttatcgcttctacctgattgtgctctgtctgcccattttcctgttgcctctgccactcattgtccaaactaaggaagcctactgtgcttactccatcatcctcatggcactgctgtggtgtaccgaggccctgcccttggctgtcactgycctcttccccatcgtcctcttccycttgatgggcatcatggatgcytctgaggtctgcatagagtacttcaaggacaccaacatattgtttgtcggggggctgatggtggccattgctgtagaacactggaacctgcacaaacgcattgccctccaagtgcttcttatcatcggagtgcggcctgccctgctgcttctgggcttcatgttggtcacagccttcctctccatgtggattagcaacacagccaccacagccatgatggtacccatcgggcatgcagtcctggaacagctgcaggsctccaaaaaggacgtggagggaggcaataataaccccacctttgagctccaggaagaatgtccccagaaggaggtgaccaagcttgataatggacaacctgtatctgctccttcagagccaagaacacagaagacccaagagcatcaccgcttcagccagggcctgagtctctgcatctgctactcagccagcatcgggggcattgmcamcctgacgggtaccacgcccaacctggtgctccaaggccaggtcaactcgctcttcccccaaaatggcaatgtggtgaactttgcttcgtggtttggtttcgccttccccaccatgatcatcttgctgctgctggcttggctatggctacaggtcctcttcctgggtgtcaacttccggaagaactttggctttggggaaggggaagaggaacgaaagcaggctgctttccaggtcatcaagacccagtacaggctgctggggcccatgagttttgcagagaagactgtcactgttctgtttgtcctgctggtggtgctctggttcacgagagagccgggcttcttcccaggctggggtgacacagttttcgccaatgaaaaagggcaaagcatgscgtcagatgggacagtggccatcttcatcagcctggttatgttcatcataccctccaagatcccaggactaatgsaggacccmaaaaaaccagggaagctgaaggctcctcctgccatcctcacctggaagacagtgaacgataagatgccctggaatatcgtgatcttgctgggtgggggctttgccctggccaaaggcagtgagcaatcaggtctgtctgaatggctgggagacaaactgaccccactgcagcacataccgccatcagccactgcrgtcatcctctgccttttgatcgccatcttcactgagtgtaccagtaacgtggccaccactacgctatttctacccatcctggcctccatggcacaagccatctgtcttcacccgctctacgtcatgctcccctgcaccytggmtgcctccctggctttcatgcwmcctgtggccaytccacccaacgccattgtattctcctttggaggcctcaaggtgtctgatatggcccgcgctggattcctgctcaatatcatcggagtgctggctayyacattatccatcaacagctggagtatccccatcttcaagctggacacattcccctcctgggcccactccaacacaagccagtgccttctcaatccgtctaattccactgtaccaggaggcctctagactacctacaacccagytytgctcagraaaayymgycrgtgccactccttagagccagraragggcgccccaaacgccaartyccgggccararatkgrgaataggccgrcgcacgcgcaatcgtgtactcgtgtgtctgcctagatcctgtgtgctctytytccagtkaaraggaaratsstcacgcctmcgtgtgragtscgtggacgcttgtgtgtggtatggcatraggacttytcagtagttgtatgcatggtaacagcacctgcactytggctcccagytaggcctccagatctctttgcactgtatttattaaaactytgggcagraggcccctgggrgcaggramwmmaarrwrmawwaaaggctgttcattttcagtagaatccgggtgtttcccggtgttcagggcctggaagcagaggtcgcgcacccctgccagaccgtttggagtgggcgcagccacccagcaaagttgcagtgacttcaccagcggctaattgggagttgccagtccctgcgtgcctttgggaaaaccggcctccccgttcccagagcactccctggacatttacataaaaccctctgcccctgccaaaaaaaaaa

SEQ ID NO: 3031 - DNA, 1498 bp, Rattus norvegicus
agggtgcagacctcagctsrgmtkcckgttgaacttgtctgggtcatctcggcacccccgctttgccagagccccctggccagcatgtcttccgcacactttaaccgaggtcctgcctacggcctgtctgctgaggtaaagaacaagctggcccagaaatacgaccaccagcgtgagcaggagctgagagagtggatcgaaggggtgacaggccgccgcatcgggagcaacttcatggatggcctcaaggacgggatcattctttgcgaatttatcaacaagctccagccgggatctgtgaagaaggtcaatgagtcaacccagaactggcaccagctggagaacataggaaatttcatcaaagccattaccragtatggggtgraamcccacgacatttttgaggcmaatgacctgtttgaaaacaccaatcatacacaagttcagtctactctcttggctctggccagcatggcmaagacaaaaggaaacaaagtcaatgtgggggtcaaatatgcagagaaacaagagcggagatttgagcctgagaagctgagagaaggcaggaacatcattggcctacagatgggcaccaataagtttgccagtcagcagggcatgacagcctatggtacccggcgtcacctctatgatcccaaactgggtacagatcaacccctggatcaggcaactatcagtctacagatgggtaccaacaagggcgccagccaggctggcatgactgcaccgggcaccaagcggcagatctttgagccaggtctgggcatggaacactgtgacacgctcaacgtcagcttgcagatgggcagcaacaagggggcctcacagaggggcatgacggtgtatgggctgccccgccaggtgtatgatcccaagtactgcctgaccccggaatatccagagctggacgagcccacccacaatcaccacccacacaastactataactctgcctaggggccccmaaggggctggctgctgctcttggctggacccagytggcccagccaaccccatytcstgcatggcgtcmtccagccccytggcacctgcytatagggttacagtttggggagatcagsccgagggggscagtrggaagaaggggbccccctcatcmctggagctttcccasggccsarcatagaattgggtgtccccaacaacacccaaaggargcactgagtaaagccatttcagcttccccctttaytccctcacaagtaagtacctcccagamccrgaaacccttcaagcgaassccccagaacccaggcttggcctgccccmkgcmcsvkkcytgmarygggagcggaatgcatgcctggaaatgcagtggacacasacgcagtttggttttgcagtgactggcgttygtggatgtgacagcagcgtttgtaacttgaacacyttytttttytwtttcactggrgcacaataaatggctgtgrcvtcvwhddwaaaaaaaaaaaaaaaa

SEQ ID NO: 3032 - DNA, 751 bp, Rattus norvegicus
cacgagggtgctggtctgattcagccccaattaagctgctgtctgggcaggactgtaaaggaagctgctaagactagaaatcgagtccgcaggcagcgccaggggctggacactcacggaaagggaagcggttcaacgctggagttgcctctgctatggcaaaaatcattttgaggcacctcatcgagaccccagtgcgttatcaggaagagtttgaagctcgaggcttagaagactgcagactggatcatgctctatacgcactgcccgggccaaccatcgaggacctgaggaaagccagaggcacaccaaaggctcttgcagaggactcagactccgccgrgacgccacctggagamggcaarkcccgtttccagatcttgctggatgtggtccagttcctgcccgaggacatcatcatccagaccttcgagggctggctgctgatcaaggcacagcacggaaccagaatggacgaacacgggtttatatcacggagtttcaccagacagtacaaactgccagatggagtcgaaaccaaagatttgtctgccatcctctgtcatgatggaatcttggtggtggaagtaaaggatccattagagaccaagtgaaaactttttgattcctgttcatgccataggagaaagaagaaagcccgggaattcttaaactcttgagagagactgctgtaacttgtatgaggattaaaaatgtatccmcmrwwmmwrrwaaaaaaaaaaaaaaaaaa

SEQ ID NO: 3033 - DNA, 8599 bp, Rattus norvegicus
  misc_feature (60)..(60): n is a, c, g, or t
  misc_feature (8580)..(8580): n is a, c, g, or t
ccaaagcccagtgtggcttcatgggagctcctgcagcttctccatgaaaccccaactctntaggcctgtttgccaccacaatccttcttgccacctgcagtctgctacagagatgctacaccaactcctcttctcagacctaatcaggatctaccgcagactgagtcagctaggtggcgtatcttgctatccctgtgctagttccgtggtttagaggcaagtgatgcaggggagaagagtagggcaagactgagaggagccagctcctcctcaagtctgtcaccccagtgcacactgcttttcaggagtcagtagaccactgggsccagtgtcagcatccactcaaagccatgccaggaatctgccccctgccaggttcagctctttaaggtgcctcttcagggacacaatgtgtgtctgattgggcttytaatcaaaagcctgatgttcctgtycctyttatagggggagctttggacacaggaccagtttgataaagggccaggtaagggtttccactctgcacattgtagaggggacaccgtaggcccatgggtccctaattaaggaagttgagtgaattgccttcatttaaccagggacctgtcttactccctcctgcctcccaaagatttttgtgtaattgtataaccccctctgttaacagtggctcagaaaagctagtttccctcacctcccagagcaaagggaacaggctgcccctgtgtctgtctactgagtggaactggtggscwcygmgkgckyyrcmgwsmgggwcwcwsywgcyyygccaggcagctgcctgtgatgctgctgtcccccgtcgccccgtggccccacgatgacccacagccccgcgacaagcgaggacgaggaacgccacagtgccagcgagtgtcccgaggggggctcagaatcggacagctccccagacggaccaggaagaggcccccagggtactcggggccggggcagcggagcacctggtaacctggcctctacccgaggcctccagggacgctccatgtctgtccctgacgacgcccacttcagcatgatggttttcaggattggcatccctgacttgcaccagacgaaatgcctacgcttcaacccggatgctaccatctggacagccaaacagcaagtactctgtgccctgagcgagagtctacaggatgtgctaaactatggactgttccagccagccacctcaggccgggatgccaacttcctggaggaagagaggcttctaagagagtaccctcagtcctttgagaaaggggtaccctacctggagttccgctacaagacccgagtctacaaacagaccaacctggatgagaaacagctggccaaactgcacacgaagacggggttgaagaagttccttgaatatgtgcagctcgggacgtctgacaaggtggcgaggctgctggacaaggggctggaccccaattaccacgactcagattcaggagagacacctttgaccctggcggcccagactgaaggctcagtagaggtgattcggacgctgtgcctgggcggggcgcacatagacttcagggcccgggatggcatgacagcgctgcacaaagctgcatgtgctaggcactgcctggcactcacggcacttctggaccttgggggctcccccaactacaaggatcgacgagggctgacccccctgttccacacagctatggttgggggagacccccgctgttgtgagctacttctgtacaacagggcccagctgggcattgcagatgagaacggctggcaggaaatccaccaggcctgccaacgagggcactctcagcacctggaacacctgctcttctatggggctgagcctggagcccagaatgcctcaggaaacacggccctgcacatctgtgctctctacaacaaggagacctgtgccaggatcctcctttatcgcggagcaaacaaggatgtgaaaaataacaacggacagacacccttccaggtggctgtgattgctgggaattttgagctgggggaactgattcgtaaccatcgggaacaggatgtggtacccttccaggagtcccccaagtatgcagcccggcgtcggggacccccaggcgcagggctgactgtacccccagcgctgctgcgggctaacagcgacacgagcatggcgctgcctgattggatggtgttttcggccccaggggcctcatcctctgggacccctggccctacctcaggaccccagggccagtcacagccctcggcccccagcaccaagctcagtagtgggaccctcagaagtgccagcagcccccgaggtgcccgggcacgctccccatcccgggggagacatcctgaagatgccaagagacaacctcgaggccgacccagctccagcgggacaccccgagatgggccggctgggggaactgggggctcagggggccctgggggctccctgggtagcagaggcagacgtaggaagctctattcagcggtacctggacgctccttcatggcggtgaagtcataccaggcgcaaggcgagggggagatctctctgagtaaaggcgaaaagatcaaagtgctcagcatcggggaaggaggcttctgggaaggccaggtcaraggtcgagttggctggttcccttctgactgcctagaagaggtggcaaaccgttcccaggagggaagacaagaaagccgaagtgacaaggcaaagagactcttcaggcattacacagtgggctcttacgacagcttcgatgccccaagtctgatcgatgggattgactcagggagtgattacatcatcaaggagaagacagtcttactgcagaagaaggacagtgaggggttcgggttcgtgctccggggggccaaggcgcagacccccatcgaggaattcacccccaccccggccttcccggcgctgcagtacctcgagtctgtggacgagggtggcgtggcatggcgggctggactacggatgggagacttcctcatcgaggtgaatggacagaatgtagtgaaggttggccaccgccaggtggtcaacatgatccgacagggaggcaacacactgatggtcaaggtggtgatggtgaccagacacccagacatggacgaggctgtccacaagaaagcatcccagcaggctaagcggctcccgcccccagccatctccctgcgttccaagtctatgacctcagagctggaggaaatggaatacgagcaacagcccgcggcagtgcccagcatggagaaaaagaggactgtgtatcagatggcactcaacaaactggatgagatcttggccgctgctcagcagaccatcagcgcaagtgagagtcctgggcctggtggcctggcatccctgggcaagcaccgacccaaaggattctttgccactgagtcgagctttgatcctcaccaccgctcccagccaagttatgaccggccttctttcctgcctcctggacccggccttatgctccggcagaaatctatcggggctgcggaagacgacagaccctacctagcacccccagccatgaaattcagtcgtagcctgtcagtccccggttcagaggacatacccccaccacccactacatcaccaccagagccgccctatagcacacctccggccccctcctcctccggccgcctcactccctcgcctcggggagggccctttaaccccagttctgggggtccccttcccgcctcctccccttcatctttcgatgggccatctcctcctgacacccgtggtgggggccgagaaaagagcctatatcacagcgcagccctgccccctgcccaccaccatccacctcatcaccaccatcatcacgcgccacctccccagccccaccatcaccatgcacatcctcctcacccaccggagatggagacaggaggttcccccgacgatcccccacctcgattggccctgggaccccagcccagcyttcgaggctggcgaggtggaggacccagcccgacytcgggggccccatcaccttcccaccacagtagcagcggaggcagcagcggccctactcaggctcccgccctgcgctastkccaactgccyccgagggcgsmcagtgcggstatgtatgtwccagcacgttccggccgcgstcgcaagggyccactggtcargcagaccaaagtggaaggcgagcmccaaaagggcagcatcccttccgcgtcctcymcaacawccccggcgttgcctcggtmtgaaccaccwccggccgggccgtcggagaraaattccatccctatcccgmccatcatcatcaaagccccatmtaccagtwrcagcggccgcagcagtcagggaagcagcacagaggctgagccccccacccagcccgatggcgcgggcggcggcggatcctcgcctagccctgcacctgccacgtcccctgtgccgccatccccgtcgcccgtgcccactcccgcgtcacccagcggcccggccaccctggatttcactagccagtttggagcagccctagtaggcgcggcgcggarggagggaggctggcagaacgaagcccggcggcggtccacgctgttcctgtccaccgacgcaggagatgaggatggaggcgacagcgggctgggcccgggggggcccccgggtccccggctgcgccattccaaatccattgacgaaggcatgttytccgcagarccgtacctccggctggagtcrgggggcagcagtgggggctacggggcctacgcagcgggcagccgarcctacgggggcagcgggagcagcrrcgccttcaccagcttcctccccccgcggcccctggtgcatccgctgaccggcaaagccttggatcccgcctctccgctggggttggccttggccgcccgggagcgggccttgaaggagtcctcggagggtgggggcacccctcagccgcccccgagacctccatcaccacgctacgacgccccaccgcctacccttcaccaccactcgccccattcaccccattcgccacatgcgcgtcacgagccagtgttgcgcctctggggggaccccgcgcgccgggagctggggtaccgggcaggcctagggagtcaggagaaggcccttaccgccagtccacctgcagctcgccgctccctactgcaccgtctgcccccgacggctcccggggtcgggccgctcctgctgcagctggggccggagcccccaactccccatcctggggtgagcaaggcctggcgcacagcagccccggaggagccggagcggctgccgctgcacgtgcgattccttgagaattgccaagcccggcctcccccagctggcacgagagggtcctctactgaagatgggcctggggtcccgcctcccagccctcgcagagtcttgccaacctctcccacctccccacgaggcaacgaggagaacggccttccgctactggtcctgccaccgccagccccttcggtggatgtggacgacggcgagttcttgtttgcggagccgctgcctccacccctggagttttccaatagtttcgaaaagccagagtcgcctctcacacccgggcctcctcacccactmcctgaccctccctccccggctacccctctacccgcagccccacctcccgctgtagccgcagcccctcccaccttggactccacagcatccagcctgacctcttacgacagcgaagtggccacactgacccagggggctcccgcggctcctggggatcctccagytccaggcccgccggccccggcagccccagctcccccagcaccgcagccaggccctgatcctccacctggcacagattctggaattgaggaggtggacagtcggagtagcagtgatcacccgctggagmccatcagcagsgcatccacactcagcagcttgtccgccgaaggaggaggcaatacagggggcgtggctgggggcgrggccggggtggccartgggacggagctcctggacacctacgttgcctacctggatggccaggccttcgggggcagtggaactcctggcccaccatatcctccccagctcawramwmmtwmwaarmtmmrrrgmagggcgcttgggactagtggaaatttaagacctggtcccagtgggggactccgagatcctgtcacccccaccagccccactgtctctgtgaccggagctggaacagatgggctactggccttgagtgcttgccctggaccctcaacggcaggtgtggcagggggtcccgtggcagttgagccagaagtcccgcctgtacctttgcccgctgcctcatccctgcctcggaagctattaccgtgggaggagggtccgggaccaccaccaccacccctgccagggcccctgtcccagcctcaggcctctgccttggccacggtcaaagccagcatcatcagcgaactcagctccaagctccagcagtttggtgggtcctctaccgcaggaggagctctgccttgggctcggggaggcagcgggggcagcacagacagccaccacggaggagccagttacatcccagagaggacgtcctccctgcagcggcagaggctctctgaagactcccagacctctctcctctccaaacccagcagcagcatctttcagaactggcctaaaccccctctgccaccactccccactgggtctggggtctcctcttcaacagctgcagccccgggagctacatccccttcagcctcatctgcctcagcttccaccagacacctgcarggtgtggaatttgagatgcggcctccgctgctccgccgggcacccagcccytcgytgctgcctgcytcggatcacaaggtcagcccagcgcccaggccttcctctttgcccatcctgccttcaggacccatctacccgggcctcttcgacatccgtagctctccaaccggaggggcgggaggctcgactgaccccttcgctcccgtctttgtgccaccacaccccgggatatctgggggtcttggaggagccttgtctggggcctctcgctccctatcacccacccgcctgctctcgctgcccccggacaagccgttcggcgccaagcctctagggttctggaccaagtttgacgtcgccgattggctagagtggctgggcttgtcggagcaccgagcccagttcctggaccacgagattgatggctcccatctgcctgccttgaccaaggaggactatgtggacctgggtgtaaccagggtgggccaccgtatgaacattgaccgggctctcaaatttttcctggagaggtgatggctgrcctggacggaccagcccgtccataggacccttgagcccgctgacctctgacctctgacccctctgaccrkcattcsmsstctcccctcagggggccagggactctgctaaaactgtgtcctgccccgtctccccaagcctgactgaggtccccaggtggaccggatgcaggccagacaatggcacctcgcaagaggtgggcagctgacacaagactgcaagtggagtagatgggggattagaaaaaaatgacaaagkggtactgaagaaagagggaaaaaggctgactaggggtgggggaacagacagagccatagtgggtcagtccagagcctgacctgatggggtcctgggaaggtgtgccctccgattccatcatttgcgcctctcaaataacccttttcacctctstaggcccctcagccttcccactctccttggctcactcagctgcccagccccctgcctcttgcacgcctgttcccctccctggctgcagtttttgcacaagcttgccccctggctgtcttgcacacctccggcctgtaaggccctctcagcttcccaacacgctgcattcggttwwwwrwwwwwwrwwwwrwwttcttttgtttcctcaagcgccaccacctttgctagcttgctctctgcatacttgcttctgggggaggagggtattgcaccctttatttctctagctaccctggacccatgctgcagacacacatgggactttccttccctctcctgctcacagacccaggcacattcccgtagtccctggccacccctgctctctgctctctytgcacactctgaacacacctccattttcatacggggtctctttccggtcttgccacccccataccgttactctccttctcatggtggcactcctgtgccctgccttctctattttctctgacacttagcacacccctcccacactcgtggccctgaactctcttccaaatgtttcactcsttccctcccctaggcctacctccagtagttacaagcaggggcaagatctgttattctggtccatttaatgatgtaactttcagttattactttagctttaagaggaaataaaagggttcagatttgaaatggggtggtacgggtgggggatgccaacaaaagaacactgattgtaatgtgagaaaagtgtatttttgtattttaataaatattgttcaatttttaattcaatgtccccaaagggttaaattgaataagattctganccaaaaaaaaaaaaaaaaa

SEQ ID NO: 3034 - DNA, 4290 bp, Rattus norvegicus
ctcggcggctccgcagcggctgcagcgggaggacccggccggagccgccgccgccgccgccgccgccatcgcagccgggcggccgggcccccgccgccgggatgccaaggagccggggcggccgcgctgcgccgggccaggccgcgcgctggagcggctggcgggccccggggcggctgctgccgctgctgcccgcgctctgctgcctcgcggcggcggcgggggccgggaagccggccggggcggacgcgcccttcgccgggcagaactggttaaaatcctatggctatctgcttccctatgagtcgcgggcgtctgcgttgcattcagggaaggccttgcagtcagcagtctccactatgcaacagttttacgggatcccagtcaccggtgtgttggaccagacgacaatcgagtggatgaagaaacctcgatgtggcgttcctgatcatccccatttgagcaggaggaggagaaataaacgctatgccctaactggacagaagtggaggcagaaacatatcacctacagcattcacaattataccccaaaggtgggtgagctggacacacggaaggctattcgtcaggctttcgatgtgtggcagaaagtgaccccgttgacctttgaagaggtgccataccatgagatcaaaagtgaccggaaggaggcagacatcatgatcttctttgcttctggtttccatggtgacagctctccttttgatggggaagggggcttcctagcccatgcctactttcctggcccaggaatcggaggagacactcactttgattcagatgagccctggacactaggaaatgccaaccatgatggcaatgacctcttcctggtggccgtgcatgaactgggccatgccctggggctggaacactctaatgaccccagtgctatcatggcacccttctatcaatacatggagacgcacaacttcaagctgccccaggatgatctccagggcatccagaagatttacggacccccagctgagcctctggagcccacaagaccccttcctacactcccggtccgcaggatccattcaccgtctgagagaaaacatgagcggcagcccaggcctcctcggccacctctgggggaccggccatccactccaggtgccaagcccaacatctgcgatggcaacttcaacacagtggccctcttccgaggggagatgtttgtgtttaaggatcgctggttctggcgtctgcgcaataatcgggtacaggagggctaccccatgcagattgaacaattctggaagggcctgcccgcccgcatagacgcagcctatgaaagagcggacggaagattcgtcttcttcaaaggtgacaagtactgggtattcaaagaagtgacggtggagcctgggtacccccacagcttgggggagctgggaagctgcctgccccgtgaaggaattgacacagctctgcgctgggaacctgtgggcaaaacctactttttcaaaggcgaacggtactggcgttacagcgaggagcggcgagccacagaccctggctaccccaagcccatcaccgtgtggaagggcatcccgcaggctccacaaggggccttcatcagcaaggaaggatattacacctacttctacaaaggtcgggactactggaagtttgacaaccagaaactgagtgtggagccaggctacccacgcaacatcctgcgtgactggatgggctgcaagcagaaggaggtagagcggcggaaggagcgcaggttgccccaggatgatgtggacatcatggtgaccatcgatgacgtgccaggctctgtgaatgctgtggctgtggtcgtcccctgcacactgtccctgtgcctcctggtgctgctttacactatcttccagttcaagaacaagacgggtccccaacccgtcacctactataagcggccagtccaggagtgggtatgagcagcccagagccctctctgtctacccagtctggccagccaggcccttcctcaccagggtctgaggggcagctctagccactgcccactggggccagcagggccctaggccaggttcgtgtgtagctgaagtggtgggtacattggtctaggctgagtgtggggcagggagtgatggtggctatgccccaggttgggtagctggtacccagctgccagccttctgtcctgggtagacccctctctactcaagggaataggccaggccctgtcaggaggcaaggatcatgccaggaggtgcccctgaggtctctgcatcctgtggtgtctgcaagatgccgcagttccagtcccggctgggacccagccctctgaggcaagccagcactagctctcacccccaccccaagatgccaccaatcccagtcccctctgccaacacctgctggtcagatgtcccctcacccctaccctactatcctccaaggctgcagtgcccctgatgccaacacagtgggcaaaggcctgggtttcccctgctagctaacagcagattcctcaggaaacctgctccacctgtcaggtctcctctgagactcagaatttagggtcacatgctgcaggcaaggctgtggcccgctggatctcacaaggacccagctgtcatgtcgtgaatatttaaatgtcctgtcactactgtttaaagtcccattttgcaaaggctacttgaggctttaggtcagctagaggtgactgtcttggtgatgaggccagagtggtggcccttccccaggcactaaggactatggtgctgcaagggccactcgggcatcctgttcaggagactcaacagccagggcaggagctgaccctggttctgggggcggatccaagtttgtgactattctctactccccttccttaatgttgtcccctgccttgctccagcctgtcctctgtggcctgggggctcagtctgactataggtaaagcagagatgattctagagccaccattgtcataaggaccagggcaatctttaaagtactccatccacatccccatctgccctgaggcaactcagtttcagactggaggcatgtttgtgctccaatcttgaccctggaagcccagctcactgggcccatcttcctgcactgctcttacgaaaagggtactcacagccggtagcagccccaggctttgggacttcccctcgctccctaccccaacctacctttcttttgttttaacctgaggcccttcacatctgacagaatccctaagccttggcttgacttgctccaaaaccactgggtgcagtgttgttcgctggctctctgctaagcccaacagtggtaggaggcggccatcagggtgctagtgggtcacagataccaactctgacctctgagcctgcatgggctttgcccctgccctgtggtctctgggatttgggtcagctcgtcctgtagcagatagggactctcgctgggttgggagctaagtgaaatctcttgtcccagaagcacctatgtgggtccatcgtgtcccatctcaccatcgtgttctttctcattttggccaagggcaggctccccagggcaggcggggaacaactgcagagatttyktkwttywtwkktttktwkkkttttwwactttgcaaagcactttattagctcacacctgtccactcacacggaactcctrtaggctctgagaggctgagggtaattctcctcttaccctcagatgaagcacaaggaggtcttatctgcccctgccatccagtgacyctggctgggtctgtgtccccatctgtgggtccttccagggcctgagatcaatgtctcttctagtcctctcttctgggcctccctcccmtagtttcctggtccctctcctcagcttggtgctctcacttcttgaaagctctaggccccgcaggctccctgttgactcctggcattccaaggccagctgagaaagagcaggaggtggaagcaggcagcccaggctgcagatgtgaggggtgcagggccgggcccagagagggctcagcctagaggcttccaatcttggattcttctgcctgtggtcatctgtctgtccatcagcccargtcagagcastcagwgssgmaaagtactggagcccccccagagctcagcttcccctcagcctgggtgacatcacagcatttcagtgtcggtcacattttaaactgatcagcctttgtacaatgttttttaaatcatttctaaataaaacagaaatacagtgwmwwwwwmmmwrrrrwrwaggaacaaagaccagggcatatgtgtgccc

SEQ ID NO: 3035 - DNA, 1214 bp, Rattus norvegicus
gcaggcgacctgcaccggctgcatggatctgcaaacctcgttgctgtccactggccccaatgccagcaacatctccgatggccaggataatctcacattgccggggtcacctcctcgcacagggagtgtctcctacatcaacatcattatgccttccgtgtttggtaccatctgtctcctgggcatcgtgggaaactccacggtcatctttgctgtggtgaagaagtccaagctacactggtgcagcaacgtccccgacatcttcatcatcaacctctctgtggtggatctgctcttcctgctgggcatgcctttcatgatccaccagctcatggggaacggcgtctggcactttggggaaaccatgtgcaccctcatcacagccatggacgccaacagtcagttcactagcacctacatcctgactgccatgaccattgaccgctacttggccaccgtccaccccatctcctccaccaagttccggaagccctccatggccaccctggtgatctgcctcctgtgggcgctctccttcatcagtatcacccctgtgtggctctacgccaggctcattcccttcccagggggtgctgtgggctgtggcatccgcctgccaaacccggacactgacctctactggttcactctgtaccagtttttcctggcctttgcccttccgtttgtggtcattaccgccgcatacgtgaaaatactacagcgcatgacgtcttcggtggccccagcctcccaacgcagcatccggcttcggacaaagagggtgacccgcacggccattgccatctgtctggtcttctttgtgtgctgggcaccctactatgtgctgcagctgacccarctgtccatcagccgcccgaccctcacgtttgtctacttgtacaacgcggccatcagcttgggctatgctaacagctgcctgaacccctttgtgtacatagtgctctgtgagacctttcgaaaacgcttggtgttgtcagtgaagcctgcagcccaggggcagctccgcacggtcagcaacgctcagacagctgatgaggagaggacagaaagcaaaggcacctgacaattccccagtcgcctccaagtcaggccaccccatcaaaccgtggggagagatactgagattaaacccaaggctaccctgggagaatgcagaggctggaggctgggggcttgtagcaaccacattccac

SEQ ID NO: 3036 - DNA, 5037 bp, Rattus norvegicus
tgaacttgaaaactggtgtacaatcctgactttccacagtggggtctctctcttctcctggctccgtcaagttcacatctgtagggtccaacttggatggcatggtgtaggctgctggtacctgatgaacctgaatttggaagactgaagaaagttgtactgtagcctcctctgagccaaaagctgaaaagcaagtaaaccgttctcaactgggctaagtttttgaaaagctggcaaagggttgttgagtgcagattctgcaatgtctgactcagtgattcttcgcagcgtgaagaaatttggagaggagaatcatgctttcgaatcagatggatcacataacaatgataagaaatcaaggttacaagataagatgaaggagggagacattcgagttggcttctttgaactgtttcgattttcttcatcaaaagacatctggctgatgcttatgggaggcgtatgcgcattgctacatggaatggcccagccaggcatacttattatttttggtataatgacagatatttttattaaatatgacattgaaaggcaagaactcgagataccaggaaaagcgtgtgtgaataacaccattgtatggatcaacagctccttccaccagaacatgacaaayggaacagtctgtgggttggtggacattgaaagtgaaatgatcaaattctctggcatctacgcaggagtcggcatgaccgtacttatccttggatactttcaaataaggttatgggtcatcactggggctcgtcagataaggagaatgaggaaaatttacttccggagaataatgagaatggaaattgggtggttcgactgcacttctgtgggagagctgaattcaaggtttgctgatgatattgaaaaaatcaatgacgccattgccgaccagttggctcatttcctccagcgcatgtcgacggctatgtgtgggttacttttagggttctacaggggttggaaactaaccttggtgattcttgctgtcagccctctcattggcattggggcagccgtcataggtctgagtatagccaagttcacggagcttgagttgaaggcttatgccaaagcggggtctattgctgatgaagtcctctcatctattcgaacagtggccgcttttggtggtgagaacaaagaggttgaaaggtatgagaaaaatcttgtgtttgcccagcgctggggaatttggaaaggaatggtgatgggcttcttcactgggtacatgtggtgtctcattttcttctgttatgcactggccttctggtatggttccacacttgtcctagatgaagaagagtatacaccagggacactggtccagattttcctctgtgtyatattagcagctatgaatattggccatgcatcttcttgcttggaaatcttctccactgggtgttcagcagctaccaatatttttcaaacaatagacaggcaacctgtcattgactgcatgtcaggagacggctacaagctagaccgaatcaagggtgaaattgagttccacaatgtgaccttccattatccttctagaccggacgtgaagattttagataacctcagcatggtcataaagccaggggaaacgacggctctggtgggatccagtggggctgggaagagtacagcattacagctcattcagagattctatgacccctgtgaaggcatggtgactctggacggccatgacattcgctctcttaacatccggtggctgagagatcaaatcgggatcgtggaacaggagcccgttctgttctccaccactatcgcagaaaacatccgttttggcagagaagatgcaacaatggaagacatagtccaagctgccaaggatgctaatgcatacaacttcattatggccctgccgcagcaatttgacacccttgttggagaaggaggaggccagatgagtggtggtcagaagcaaagagtagccattgcccgagccctcatacggaatcccaagatcttgcttctggatatggctacctcagcactggacaatgagagtgaagctagagtacaagaagcattgaataagatccaacatgggcatacaatcatctcagttgcccatcgcctgtcaacagtcagagctgcagatgtgatcattgggtttgagcatggagtagctgtggaaagaggcacccatgaagagctgctagaaagaaaaggtgtctacttcatgcttgtgaccctgcaaagccaaggagataatgctcacaaagaaacgagcataatggggaaagatgcgacggaaggtggcacccttgagaggaccttttccagaggcagctatcgggatagtttaagagcttcgatccggcaacgctccaagtctcagctgtctcttctgacacatgaccctccactggctgttgctgatcacaaatcctcttacaaagacagcaaggacaatgacgtgcttgtggaagaagttgaacctgccccagttaggaggattctaaaatacaacattccagaatggcactacattctggtaggatctttgagtgcagccattaatggggcagtcacacccatctactcccttttattcagccagctccttgggactttttcactcctcgataaagaacaacaaaggtcagagattcacagcatgtgtctgttctttgtcatcctgggctgtgtatccattttcacacaatttctgcagggttacacttttgccaaatccggagagctcctcacaaagaggctgcggaaatttggtttcaaggcaatgttaggacaagatatcggctggttcgatgacctcagaaataatcctggagtactgacgactaggcttgctacagatgcttcccaagttcaaggggctactggctctcaagttggaatgatggtcaattccttcactaacatcattgcggccttgctgattgccttcttctttagctggaagctcagtctgattataacgatcttcttcccctttctggctttatcgggagctgtacagacaaaaatgttgacgggattcgcttctcaagacaagcaagctctggagaaggctggtcagatcaccagygaagccctcagcaatatccgcacagttgctgggattggagtggagggaagatttattaaagcatttgaggttgagctccagacatcatacaagactgctgtcaggaaggcgaatatctatggactctgctttgccttttcccaggggatagcatttcttgcaaattcygctgcctatagatatggaggttacttaatagcctacgaaggtctgggcttcagccacgttttcagggtggtctcttcagttgyaytgagtgcaacagccgttggaagaacattctcttatactccgagctatgccaaagctaaaatatcagctgcacgcttttttcaactgctagatcggaaacctccaattaatgtgtacagtgaagcaggtgaaaaatgggacaacttccaagggaagattgattttattgactgtaaatttacgtatccttctcgacccgatatycaagttctgaatggtctctcagtatctgttaatcctgggcagacgctggcatttgttggragcagtgggtgtggcaaaagcaccagcattcagctgttggaacggttctatgatcccgatcagggaactgtgatgatagatggtcatgacagcaaaaaagtcaacattcagttcctccgttccaacatcgggattgtctcccaggagccagtgctgtttgactgtagcataatggacaacatcaagtacggggacaacactaaagagatctccgtggagagagccatagctgctgcaaagcaggctcagctgcatgacttcgtcatgtcgctcccagagaaatatgaaactaatgttgggatccagggctctcagctctctcgtggrgagaaacaacgcattgctattgctcgggccattgtgcgagatcctaaaatcttactactggatgaagctacgtctgccctagacacagaaagtgaaaagacagtgcagactgctctggacaaagccagagagggtcggacctgcattgtcattgctcatcgtttgtccaccatccagaactcagatatcattgctgtcgtgtcacaaggagtggtgattgaaaaagggacccatgagaaactgatggcccagaagggagcctactacaagctggtcatcactggagcccccatcagttgacctgactggagacttcacacagataatgatgtgctgagtacaggagggctgtgggtttttgtagycatatagagaattattaatgctttacagacagaagtatccactgggatccaaagtaattttgagtgactttcagtaataatttcagtttgaaatgtctatgtagaaaggagagagcccagagtcagcatgagtcaaagttcaaagtccaaggtcaagtagctgcttatctgccggccagtgctgctctgggtagaaactggtcactgtctccatcgaggacgccgcggtgagagcaaggagtcctccttcaggacagagggttatctcttgcatctgggaaagctccctgcgcactgagcctgctctgtaatctgcactcaactgtttgagccagttcaaggccaagagctaaggacccaaggctactggtatttcttaactaagtttagtttgtttactataaggaagcaaatttatttacctttaactcctgtgagtagggtggggagccctttccyattctggcatctcccaggctcagggaggccaaggtgacaaaaggagaagtagaggtcgctggtcaggtgtgttgattgtaccgaaggctcagggtattggtgtcactgtacactacagtggatctgccagtgtgaagcaggggctctctaccaggacttcgacttttcattccctgccaccatgtcacctgatgtcccttactcttaggaaattctatgcatggaatggaaatgcatccgaatcttaagttgttacataaaaaaatctagtaaaacatagtagga

SEQ ID NO: 3037 - DNA, 1491 bp, Rattus norvegicus
gccacctcttgattatttgtgcagcgggaaactttgaaatagttttcatctctttctcccatactaagattgtgtgtggccgtgggggagtccttgactaactcaagtcatttcattggattttgattacaactgatcatgtgatatttttttccatgtaaagttttggggcttcaaactttgcttctggagaatgccttttgcaacacttttcagtagctgcctggaaacaactgcttagccatcagtggacatttgaaatattcaaaatgtatggagagtgggccgcagtgaatattctcatgatgtcctatgtgtacctggtgcagggcttcagtattgaacaccgagcagtgaaggatgtttctcttgagcgatcatcccggtctgtgttggaacgttctgaacaacagatccgcgcggcttctactttggaagagttgctgcaagtcgcacactctgaggactggaagctgtggcggtgccggttgaagcttaaaagtcttgccaatgtggactcgcgctcaacatcccatcgctccaccagatttgcggcaactttctatgatactgaaacactaaaagttatagatgaagaatggcagaggacccaatgcagccctagagagacatgcgtagaagtcgccagtgagctggggaagacaaccaacacatttttcaagcccccttgtgtaaatgtcttccggtgtggaggatgctgcaatgaagagagcgtgatgtgtatgaacacaagcacctcctacatctccaaacagctctttgagatatcagtgcctctgacatcagtgcccgagttagtgcctgttaaaattgccaaccatacgggttgtaagtgtttgcccacgggcccccggcatccttattcaattatcagaagatccattcagatcccagaagaagatcaatgtcctcattccaagaaactctgtcctgttgacatgctgtgggataacaccaaatgtaaatgtgttttacaagatgagaatccactgcctgggacagaagaccactcttacctccaggaacccgctctctgtggaccacacatgatgtttgatgaagatcgctgcgagtgtgtctgtaaagcaccatgtcctggagatctcattcagcacccggaaaactgcagttgctttgaatgcaaagaaagtctggaaagctgttgccaaaagcacaagatgtttcaccctgacacctgcagatcaatggtcttttcactgtccccttaatttggtttactggtgacatttaaaggacatactaacctgatttattggggctcttttctctcagggcccaagcacactcttaaaggaacacagacgtttggcctctaagaaatacatggaagtattatagagtgatgattaaattgtcttcttgtttcaaacagggtctcatgattacagacccgtattgccatgcctgccgtcatgctatcatgagcggaaaagaatcactggcatttaa

SEQ ID NO: 3038 - DNA, 1037 bp, Rattus norvegicus
tgcgttcgcgggacccacgggctcgccccagcctacactccgactgtttgccacctcctcctgcctcctcccctcccttccccgccctccagtacacttgatcactgaagcttcgagctgcgcggccggggcgtccctgcgcctctctccccaagacctgcgcgctcttgcggctcggacggtcgctcgcctggctctactccacttggccgtctctgtgtgcagtcgcagaacttcgaagtggggtttgcgctgcggcaggggcgtttcgcttttgtttggttttgttgtttatttcatttywttttttttttttttcggagagaggcgaggcggtggtccacacccgcccggggaggaagatgtcaaacgtraragtgtctaacgggagcccragcctggagcggatggacgccagacaaaccgagcaccccaagcyttccgcctgcagaaacctcttcggcccggtcaatcatgaagawctaacccgggacttggagaagcactgccgagatatggaakaagcgagccagcgcaagtggaatttcgactttcagaatcataagcccytggagggcagatacgagtggcaksaggtggagaggggcagcttgcccgagttctactacagacccccgcgcccccccaagagcgcctgcaaggtgccggcgcaggagagcttggatgtcagcgggagccgccaggcggtgccttcaattgggtctcaggcaaactctgaggaccggcatttggtggaccaaatgcctgactcgtcagacagtccggctgggttagcggagcagtgtccarggatgaggaagcgacctgcggcagaagatkmttcttygsaaaacaaaakgkcyrdcwgmrcmgwagmwmmtstttsmkacgrttcccygwwygctkgcmctgtggagcagacgcccaagaagcccggccttcgacgccagacgtaaacagctccgaattaagaataattccttgtttattagatacatcactgctttatgaagcaaggaagacatacatgaaaaaaa

SEQ ID NO: 3039 - DNA, 3523 bp, Rattus norvegicus
ccctgatctctgaaccatacaacacttgcacgacattctcaagcaactagataggtctggccttggcgatgcctgcccaagatcaggggattgctgtccagatgtcagaatggagaagaatggagaaggctttgaggttattagaccactccatcctcttgctgccctagtataatttccggcctcttctaaggtcatttgggacccaacccctctgctagtcacagcagccaggcttcctgagctcccatcagggatctagctaatccttctcagagtcttgcaagtttcagacacaccctctaccagactcttcctttttttcccccctgccccaactaccaggccatcctccaaactctggtagcatctatagggaagtgtgtgtgtacgtgtgcgtttgcttgtgtacgtgtgtagaggtttaaagacaggctacccgtgggctataccggagagtctgggacgggaactgtcgacttgctgacacaattcagttctgtggtggcgcctgcaggccacgccctagggcctccctacgcccggacagtgtttttaactcttcgcacagaggtgatcccaggctggagggcgggcacaaggcgtccggagaacccagtaatccgagaacgcagcatcagcccttcccactaggcacttccttccttttcccgaacctccagagagggagggccgcgcatttataaactggagcctcagctgagtggcatgtcagaggctgcctcgcagggactacgaacctgggctagaaaagtctaggctgagacagaggctaactgctgtcgccgcagacgtacgaaccctctgccgggactgggtgcctgcaccatcgcagtgctagcgtttctcgtagcttgcacggtgttctcctgaacagcatgcttggggttttccttctgggtgtgctggctccagctggcctggggatctctgcactagccaagctgcagcccaaaggcagtcaatgcgtggggaatgagtgcttcgcgcttttccaggaccccgtgaccttcctcgatgccagccaggcctgccagcgcctgcagggacatttgatgacagtgcgctcctcggtggctgcggatgtcatctcccttctggtgagcgacagtagtatggactcacggccctggatcggtttacagctccctcagggctgtggtgacccggtgcatctcgggcccctgcgcggcttccagtgggttactggggataaccacaccagttacagcaggtgggcgcggcccaacgaccagtcgcctccactttgcggtccgctgtgcgtcacggtctcaacagcaacagaagctgcaccaggcgagccggcctgggaagagaagccgtgcgagaacgagaccaagggttttctctgcgagttttacttcgcagctttctgcaggcctttacgggtgaatacccgagatcctgagggtgcccacatctctagcacctacaataccccattgggggtcagcggcgcggattttcagacgctgccgataggcagttctgctaccgtggcgccctttggcttggagctggtgtgcagggccctgcccggaacttcagagggacactggactcgggaagtgacaggagcttggaactgcagcgtggagaatggtggctgcgagtacatgtgcaacaggagcgctaacggacccagatgcgtctgccccagcggcggggacctgcaggctgatggccgttcgtgcgcaaaacctgtggctcaattgtgcaacgaactctgccagcatttttgcgtcaacaactctgatgtgccaggctcttattcctgtatgtgcgaaacaggctaccagttggcggcagacggacatcggtgtgaggacgtggatgactgtaagcaggggcccaatccatgccctcagctctgttctaacaccgagggcggcttcgaatgccgctgctatgatggctatgagttggtggacggagagtgcgtggagcaactggatccgtgcttcagatctaaatgcgagyaysagkgccagccagtaaactccacgcactacaattgcatctgtgctgagggcttcgcacctaagctggatgatcccgacaggtgcgaaatgttctgcaatgaaacttcgtgcccagcagactgtgaccccaactccccaagcttttgtcaatgccctgagggcttcatcctggacgagggttccatatgcacagacattgatgagtgcagtcaaggcgaatgcctcaccaatgaatgtcgaaaccttcctggctcctatgagtgcatctgcggacctgacacagcccttgctggtcagattagcaaggactgtgaccccatccctgttctggaggactcagaggatggtggctctggggagcacccatcaagcaatccgacggtagtctcttcgacagttcccccttctgcaagaccaatgcactctggtgtgctcattgggatctccattgccagcctgtccctggtggtggcgcttttggcgcttctttgtcacctgcgcaagaagcagggcactgctcgcgcagagctggagtacaagtgtacctcttcagccaaggaggtagtactgcagcacgtgaggactgatcggacgctgcagaagttctgagggatttactccagagaccaaggtggcctttgtctttccgggctctgtacctctcctttctctctcttcagcctcccagctgtgctctctggcaatgtaaaagcattctggctggtataataaccagagaagagctcatcctcttatgacaagcgagggtagggaggacttgaagccggagagcccagtttcttccaagtagagactggacaactgggcggaggtgacaaatacagtgaagatcccagagtgtcccagtccctcacctcggggtgcaggatgtgtgggtgctgctgatctgtaggcttggaggcaaaccttgaccctatggactggagatgacccagatatttatttttttaaaagtwtttwktwktktcttccctycagcywtatyctgcktgtaagtsyccagtccctcaccctttwctgtgtccmwccatwcctttccctmmmytsscmswskccmtsmttytcctccccgaacctgatcatagktkgsctttacccttgtctccaaactctkatgtgaaamaraaaaaaaaamammmmwmamcgcagaaaaatattttttttcgctagcttkggcaatttaatcggggatttcaggtaaccagagcaaaagawtttaaacaaargttaaaatgtktcaactgamcactaactagttaatagtgctggawtatcacagaatttaaactcaaggaagtrgggtytwgattttttttaatctttgtktttgaaagggkgagcckgggttttatgatwgywgctgtdgwtwwkwtttttatttagaatgacaaaasaggtaataattattaaacttttkatgccggswwmwamasskytataaatttttgacagtgtttcacatgtgcagaggatccttt

SEQ ID NO: 3040 - DNA, 1446 bp, Rattus norvegicus
ttccggcaggaaacgggacctggagagcggaggcctcaggrcgagcgcggacacccggagctcgtgggcagcctgaaaagtggggagaagtggcagaccagagctcggggcacaggcctgcaggagcccagctcaagacccctaaccaaggccagaccaaggccagacctgggcaggcacctccatcacagcgccttctgcagtcagaacttgttgctgtccacaggggaaagtaaaacatgacggagacagatggcttctacagaagtagggaagtgttggatccagccgagcagtacaagatggaccacaagaggagaggaactgccctaatcttcaatcacgagaggttcttctggcacctagcactcccagagaggcggggcaccaacgcagacagggacaaccygactcgaaggttctcagagctaggatttgaagtgaaatgctttaacgacctccgggcagaagaactactgctcaagattcacgargtgtcgacttccagccacgtagatgccgattgcttcctgtgtgtcttcctgagccacggggaaggcaaccacatttacgcatacgatgccaaaattgaaattcagaccttgactggcttgktcaaaggagacaagtgtcagagcctggttggaaaacccaagatattcatcatccaggcctgtcggggcagccagcatgacgtgcccktggttcctctggacgtggtggatcatcagacagacaagctggacgacaacgtgacccaggtggatgctgcctcggtgtacactctgsctgcgggggcggacttcctcatgtgttactctgttgcagaagggtattactctcaccgagagactgtgaacggctcctggtacattcaggatttgtscgagatgctggccaggcacggcagttccctggagttcaccgagctgctcacgctggtgaacaggaaggtctctcagcgccgtgtggatttctgcaaagacccargtgcaattggcaagaagcaggttccctgctttgcctcaatgctgaccaaaaagctgcatttctgtcccaaacctagtaagtagggccgtccgacttgctacaaatgtttcacacacatttcccttctacacagaggccagctggccaaagactccgcccaccaacggacactgtttgaatttttaaggtgctacagaaaagtaatgttttgcctttgttattattttcaatcatgttggggatggggaaggctaaagaaatctaggaaattactgtgcgcaaatgcccaatacatttattatgtttctggtaaatggcaagattactaagaataccaactactttgccttaccttttgtgacactatttatataggctcattgtataatgtttttaaagatctttgaaactcaagaatgagatcgttttctcctaataaaaatgtctaaaacccgg

SEQ ID NO: 3041 - DNA, 2370 bp, Rattus norvegicus
gtcaccgggagatggctcctctcccattctcctcacctttccacccagttccttccttttctccgtctgaggtgcatatgcttggtgcataagtccagccatctcttcagacttggtgaacttcactttgtagcatctgctttgactcgcacaaccagaggaccacatccttctcttctttgagccactaaatgccgatgcgcactccacactccagcaagggaagatgggaggagcttcttggatgacgatggatggtccactgtgcaggatgagggcaggctgtgtgacatcgccaccacgmrggttcagcgtgatcttctgtgtctcccttctgggccagcactctgccttctcagtccatcatggtgtttggtgagtttttccatcgccctggacaagatgaggaacttgtcaacttgaacgtggggggttttaaacagtctgtggatcagagtacactcctgcggttcccccacacacgactggggaagctgcttacctgccactctgaggaggccattctggagctgtgtgatgactacagcgtggcagataaagagtactacttcgatcggaacccctccctgttcagatacgttttgaacttttattacacagggaagctgcacgtcatggaggaactgtgtgtcttctccttttgccaggagattgagtactggggcatcaacgagctcttcwttgactcctgctgtagcagtcggtaccaggagcgcaaggaggagagccacgagaaggactgggaccagaaaagcaatgatgtgagcacagactcctcctttgaggaatcgtctctgtttgagaaagagctggagaagtttgatgagctgagatttggtcagctccgaaagaagatctggatccgaatggaaaacccagcttattgcctgtcagccaagctcatcgccatctcctccttgagtgtggtgctggcttccatcgtggccatgtgtgtacacagcatgtcagaattccagaacgaggatggagaagtggatgaccctgtgctggaaggtgtggagattgcctgcattgcatggttcaccggtgagctggccatccggctggttgctgctccatcacaaaagaagttctggaaaaaccctctgaacatcattgactttgtctccatcattcccttctatgccacgttggctgtggacaccaaggaagaagagagtgaggacattgagaacatgggcaaggtggtccagatcctccggctcatgaggattttccgcatcctgaagctcgcccggcattccgtagggcttcgttctcttggggccacgctgaggcacagttaccacgaagtggggctactgcttctcttcctctctgtgggtatctccattttctctgtgcttatttactctgtggagaaagatgaactcgcgtccagtctcactagcatccccatctgctggtggtgggccactatcagtatgaccacagtgggctatggagacacccacccagtcaccttagctgggaaaatcattgcgagcacctgcattatctgtggcatcttagtggtagcccttcccatcaccatcatcttcaacaagttttccaagtactaccagaagcagaaggacatggatgtggaccagtgcagcgaggacccaccggagaagtgccacgagctaccttactttaacattagggacgtttatgcacagcaagtacacgccttcatcaccagtctgtcttccattggcatcgtggtcagcgatcctgactccacagatgcctcaagtgtcgaagacaacgaggatgcttacaacaccgcatccctggagaactgtactgcaaaatgagcaggggcatttgcacggacagctcatgtcccttcctcacgttaggttaacacagctttataaacctcartgggtttgttcaaatcaatcatttaattctcagggtgtaccttttagccatagttggacattcattgccgaattctgaaatgatagaattatctttatttttctcagtgagatcaattaaaatgccttgttctgaaatttwttttttaacaagagagagttgtaatacggttttttgggggraaaatgtmaatgatattgggaaggatttattgctacggcttacgcatcattctgtatctgccattcactcacattgagctaactataaattactgatgttagagcagaggcccagccgaccgaagacgacatgcatgtaagatctacaacatgagacaatgcatgtaaatccatgttcatgttccagacacgggaattaggagcccahywmrykyctaattcggtatggaraaaaaaaaaaaaaaaaaaaaaaaaaaaaaaaaaaaaaaaaaaaaaa

SEQ ID NO: 3042 - DNA, 2986 bp, Rattus norvegicus
ggcgaggccgagagccgggcgcggccgcagttctctggagactgaggcactgctgaagctcagccaggtgacacccccgccccgtcgcagtagactttcctgcagacaggagcagggagagccatcctgtgtgtggagactgccggaagactggatcaccaggagagttctcaggacattatcaaggcactcatttctgtggctgcttccaggtaacaatggctgtgtgagtgtctaccatggcccaccgcaagcgccagagcactgcaagcagcatgttggaccacagggcccggccaggtcctatccccsatgaccaggagcctgagaatgaggatacagaactgcctctggagagctatgtacccacaggcctggagctaggcactctgagamcagacagccccacgcctgaggaacaggagtgccacaaccatagccctgatggggactccagctctgactatgtgaacaacacgtctgaggaggaggactatgacgagggcctccctgargaggaggaaggtgtcacctactacatccgctattgtcctgaggatgacagctacctggagggcatggactgtaatggggaggagtacctagcccatggtgcacatcctgtggacactgatgagtgtcaggaggcggtagaggactggacggactcagtgggtcctcatactcatagccacggggctgaaaacagccaagagtatccagacagccacctgcctatcccagaggatgaccctactgtcctggaggtccatgaccaggaagaagatggccactactgtcccagcaaggagagctaccaggactattatcccccagagaccaatgggaacacgggtggcgcttctccctatcgcatgaggcgtggggatggggacctagaggagcaggaggaagacatcgaccagatagtggctgagatcaagatgagcctgagcatgaccagtattaccagtgccagtgaggccagccctgagcacatgcctgagctggaccctggggactccactgaggcctgttcacccagtgacactggccgtggacccagtaggcaagaagcgaggcccaagtcgctgaaccttccccctgaggttaagcactccggagacccccaaagaggactcaagaccaagaccaggaccccagaggagaggccaaagtggccccaagagcaggtttgcaatggcttggaacagccgaggaagcagcagcgctctgatctcaatggacccactgacaataacaacatcccagagacaaagaaggtggcctcgtttccaagctttgtagctgttccagggccctgtgagccagaagacctcatcgatggcatcatctttgcagccaactacctgggctccacccagctgctctctgagcgcaacccctccaaaaacatccgaatgatgcaagctcaagaagctgtcagcagggtcaagaggatgcagaaggctgctaagatcaagaaaaaagcgaattctgagggtgatgctcagacactgacagaagtagacctcttcatttctacccagaggatcaaagtcttaaacgctgacacacaggaaaccatgatggaccatgccttgcgcaccatctcctacattgcagacattgggaacatcgtggttctgatggccaggcgccgcatgcccaggtcagcctctcaggactgcatcgagaccacgcctggggcccaggaagggaagaagcagtacaagatgatctgtcacgtgttcgagtcagaggatgcccagctgatagcccagtcaattgggcaggccttcagtgtggcctaccaggagttcctgagggccaacggcatcaaccctgaggacctgagccagaaggaatacagtgatatcataaatacccaggagatgtataatgatgaccttatccacttctcaaactcggagaactgcaaggagctgcagctggagaagcacaagggtgagattttgggtgtggtggtcgtggagtcaggctggggctccatcctgcccactgtgatcctggcgaacatgatgaacggcggcccagcagctcgctcggggaagctgagcattggcgaccagatcatgtccatcaatggcaccagcctggtggggctgcccctcgctacctgccagggtatcatcaagggcctgaagaaccaaacacaggtaaagctcaacatcgtcagctgtcccccagtcaccacagtcctcatcaaacgtccagatctcaagtaccagctgggtttcagcgtgcaaaatggaatcatttgcagcctcatgagagggggtattgcagagcgaggtggtgtccgagtcggccaccgkmwcrwskagatcaacggacagagtgtggtagccayagcccacsagaagatagtccaggctctgtctaactcagttggagagattcacatgaagaccatgcctgcagccatgttcaggctcctcacaggccaggagacaccgctgtacatytaggtacaccctgcctcgccaaggagcagggactccaggcagacccacctgggcccagaggagccagargccaggacaaagccctgacccctgaccccgcagcccaaccaagaactytggctytcccccctccccacccccaagggtgtgtccttgtcacctaggttttttttttgtttgtttgkttggttggtttgggtttttttttgtttgtttgtttgttttattttgttttgggttttgcymwmrwraraaaarrraaaaaaaaaagctatgtccttactgaaggggagtcacaggacaatcctttgtaaaacttaccagtcttctgccatattttcattgcggctgatgaagggtgctcacaggtagttctatgtgtggtgtgctgtgtctctactccctgaggctaatgtgaatgtggcgcccaacccgcccgcacatctgtgtggctgtgaagggagccctctgtgatgcagctgcagccttttctgccc

SEQ ID NO: 3043 - DNA, 1965 bp, Rattus norvegicus
accatggcttgtctacgagttccgcactcagagccctcgtcttccagcttggtgacaatgccggcctgaacctggatcccagacatggagttcctgccagaaccccagcatcccccagggcccccgaccatggacttggaggagcccaaaggccccgaggttccctctgaggaccatccctctaacacgcagggggccttagggcccagaggccccgataccctgagcgagatggagctggacacatccagtgtgcgggcgctggttcagcagttggaagctttgcccagcgacctgggtggccagttcccagatggagccccctgtcccctgcacattgccactggccaaggcctagccacccaggagaatttggatgctggtgggctcctgtcagccgaggcaggtggggacaaccttctgggtctgctgaggtgtgaggcctctttgcctgctcaatccgttcccccagatcctgcacaggctgcaccccgccttctgcagccaccagaggaccccggtggggaccctggatggatggaagggacagagccagcagacaacaggagttccagcagctccccggagctgtggctagagacagcacccctggtgacacatcgagatccacccgtgggtacccagagccaggagaccctggcttcgtgccctgccgtctccgaggttccaggtccctgtggacaggaggagctcatggacggagtcctcttcggggcgaaatacctgggctccacccagctgctgtctgagcgcaacccgccgcccagcacacgcatggggcaggcgcaggaggccatggatcgggtcaaggcccctgaaggtgagagccagcccatgaccgaggtagacatctttatctccactaagcgcgtgaaagtgctggctgctgactcccaggatgccctgatggaccatgccctgcagaccatctcctacatcgcggacattgggcctgtgctggtcttgatggcgcgcaggcggctggccaagaggacaacttctcaggaccgccagcggcagctctacaagatgctatgccatgtcttccattcagaggatgcccagctcattgcgcaagccatcggtcaggccttcagtatcgcctacagccagttcctgcaggagaacggaatcgaccccagccaggtgggcatgcagccttcagcctctgccagtcacccacacaatggcgacctggaccacttctgcaacagccagaactgcagggaggtttgcatccagaagcggcctggggagggcctgggtgtcgcgctggttgagtcaggctggggctcgctgctgcccaccgcggtcattgccaacctcctccacgggggccctgccgagcgctgcggggccctgagcatagggsacmgkgtcactgccatcaacggraccakyctggtggggctgtcgctggccgcctgccaggccgctgtgcgcgaggtacggcgacactcatccgtgacgctgagtatcatccattgcccaccartcaccacggmcgtyatccaccggccccamgtgskcgarcagctgggcttctgtgtggagaacggcattatttscagcctgctgcgtgggaktscgsytgagcktgktgragtccgcgttggacaccgcatcattgaggtcaatgggcagagtgtggtggccatgccccacgcgcgcattatccagctgctcacagagacaagagaaatccacatcaagaccatgccagctgccacctaccgactgctcacgggacaggaacagccagtatacctgtgatcgccccgcccacatgtgccttcgccccgcccacgtgtgccttcgccccgccaycgtcacccctcggccggcggggaccaaagaatcctcagtcttgtgctattttctaatgtaaaaaatacttttaaagrttwattaaatggtcagaagcttgaaaaaaaaaaaaaaaaa

SEQ ID NO: 3044 - DNA, 2926 bp, Rattus norvegicus
cgggccggtccctgggcctgagctccggctccggctggggcgcctgcgatgtctcaagatggcggagctgggcgaattaaagcacatggtgatgagtttccgggtgtctgagctccaggtgctccttggcttcgctggcaggaacaagagtgggcggaagcacgaattgctggccaaggccctgcacctcctcaagtctagctgcgccccagcgtccagatgaagatcaaagaactttaccgcaggcgctttccccggaagaccctggggccttccgatctctctttgctctctttgccccctggcacctctcctgtaggctcccccagcccccttgcttccattcctcccaccctcctgacccctggcaccttgctgggccctaagcgtgaggtggacatgcaccctcctctgccccagcctgtgcaccctgacgtcaccatgaaaccactgcccttctacgaagtctacggagagctcatccggccgaccacccttgcgtccacctccagtcagaggtttgaggaagcccactttacctttgcactcactccccagcagctgcagcagattctcacatccagggaggttctgccaggagccaagtgcgattataccatacaagtgcagctcaggttctgtctctgtgagaccagctgcccccaggaggactatttcccccctaacctctttgtcaaggttaatgggaaactctgccccctgccgggttacctccctccaaccaagaatggagctgagcccaagaggcctagtcgtccaatcaacatcacacccctggctcgtctctcagccactgttcccaacaccatagtggttaactggtcatctgagtttggacggaattactccttgtctgtgtacctggtgaggcagttgactgcagggaccctgctacaaaagctcagagccaagggtatccggaatccagaccattcccgagcactgatcaaggagaaattgactgctgaccccgacagtgaagtggctactacaagtctccgggtgtcactcatgtgcccgctggggaagatgcgcctgactgtcccatgccgcgctctcacctgtgcccacctgcagagtttcgatgctgccctttatctacagatgaatgagaaaaagccaacatggacgtgccctgtgtgtgacaagaaggctccctatgagtcactgattattgatggtttattcatggaaattcttaattcctgttcggattgtgatgagatccagttcatggaagatggatcctggtgtccaatgaaacccaagaaggaggcatccgaggtttgccccccaccagggtatgggctggatggtctccagtatagcccagtccaggagggaaatcagtcagagaataagaagagggttgaagtcattgacttgacaatcgaaagctcatcagatgaggaagatctgccccccaccaagaagcactgccctgttacctcggctgccattccagcccttcctggaagcaaaggagccctgacctctggtcaccagccgtcttcggtgctgcggagccctgcaatgggtacactgggcagtgatttcctgtctagtctcccactacatgagtacccacctgccttcccgctgggggctgacatccaaggtttagatttattttctttccttcagactgagagtcagcactacagcccttcagttatcacttcactagatgagcaggacacccttggccacttcttccaattccggggaacccctccccacttcctgggcccactggcccccacattggggagctctcaccgcagcgccactccagcacccgctcctggccgtgtcagcagcattgtggctcctgggagttccttgagggaagsrcrwggaggacccctgccttccggtccctctttgactggctgtcggtcagacgtcatttccttggactgagttatywsgakkgcaaaatcaatttctactggccctagcactgagcagatacattgtgggttcccaacccctggctgctctgatccctcaggggtcattggtcaaaggccaggccagatcttcatggacacctgcttttggccttatcactgcctaacaaggccagtactcaaagggttaacatttaaccttttgaaaaaggacattggggtctgtttttggaagtgttctttgatgtagcacattcctttgggtagggtaacctaggcagtgggaggcagatggaagggtaggggttcctcacccttcaccagatcttcagcctcttggggaaagggcagtttcctgcccctcccccaggactcctttccgtacccaaacccaaacatctgttctttttcgtccattcccttctctttggccatactgtcaggtgrmagrkmagrgatggacrgacaactctattttgggttgcagatttcttytttgyacataaataagaaaacyccaamttmwmmaaarawramwwmmcttgccttttacttcccmgtgtgmctcgmrgaggaaacamggccttagttgtgatccccaggggctcgggaacagggcgtggcctgcmtactgcctgggtctctmtatttmtmtakttaagttcacaatgtttttatgctaaacagtcaagggcctaagsttstagtgacctgtgctcaggcytagattgttcttgcaccttttatgggacatgggggctstgttmtccttcccaatactcagcgccccttcagggccaaagccctgtgatgtgatttcactttttatccccagagctgtagcagagttctsgcctacaataaaggttgtgaatgttcwrwrarmrwmawrrarrrrararawrwwrwammwwrwtttccagacccatggtttgtggggcagagggtccatgttctatcctttcacttagaaaaaaaaaaaaaaaaaaaaa

SEQ ID NO: 3045 - DNA, 2890 bp, Rattus norvegicus
cgcggcggcggcgccggcgcggggacagacggaggcgcgggacgtggggcggcgccgcgggcagggccgggcggacgagcgctggcagcgggggcagcgctgcgggccgctccgagtggctgcagtccgggccttgcactcccatcccgctcccacgccgtgagtgcgcggcgcgggccccaagggctggtgttagtggcaggaaccatctgtggtcaccatggcaaagagggaggacagccctggcccggaggtgcagccaatggacaagcagtttctggtatgcagtatctgcctggatcggtaccggtgccccaaagttctgccttgtctacacaccttctgcgaaagatgtctccagaactacatccctcctcagagcctgacactctcgtgtccagtatgccggcagacatccatcctcccagaacagggtgtctcagccctacaaaacaacttcttcatcagcagcctcatggaggccatgcagcaggcacctgatggggcccacgaccctgaagacccccaccccctcagcgcagtggctggccgccctctctcctgccccaaccatgaaggcaagacgatggagttttactgtgaggcctgtgagactgccatgtgtggtgagtgccgcgcaggggagcaccgtgaacacggcacagtgctgttgcgggacgtggtggagcagcacaaggcagctctacagcgccagcttgaagctgtgcgtggccgattgccacagctgtctgcagctatcgccttggttgggggcatcagccagcagctgcaagagcgcaaggcagaggccctggcccagataagtgcagcctttgaggacctggagcaagctctgcagcagcgcaagcaggctctggtcagcgacttggagagcatttgtggggccaagcagaaggtgttgcagacacagttagacacactgcgccagggtcaggaacacattggcagtagctgcagctttgcagagcaggcactgagactgggctctgcccctgaggttttgctagtaagaaagcacatgcgagagaggctggctgctctggcagctcaggccttcccagaaaggccccatgagaatgcacagctggaactggtccttgaagtagatgggttgcggagatcggtgctcaatctgggtgcactgctcaccaccagtgctgctgcacacgagacagtggccaccggcgagggcctgcgccaggcactggttggccagcctgcctcactcactgtcaccaccaaagacaaagatgggcggctggtgcgcacgggcagcgcagagctgtgtgcagagatcactggccccgatggcatgcgccttgcggtaccggtggtggaccacaaaaatggcacatatgagctggtgtacacagcacgtacagaaggcgacctgctcctctcagtgctgctctatggacagccggtgcgtggcagccctttccgtgtgcgtgccctgagacccggagacttgccaccttccccagatgatgtgaagcgccgggtcaagtctcccggtggtcctggcagtcatgtgcgccagaaggcagtgcgtaggccgagctccatgtacagcaccggtggcaaacggaaagacaatccaattgtggatgaactcgtctttcgtgttggcagtcgtggaagggagaaaggtgaattcaccaatttacacccgctgtccgctgctagcagtggccgaatagtggtagcagacagcaacaaccaatgtattcaggttttctccaatgagggccagttcaagttccgatttggagtccgtgggcgctcgcctgggcaactacagcgtcctacgggtgtggcagtggacaccaatggagacattattgtggcagactatgacaaccgttgggtcagcatcttctctcctgagggcaagttcaagaccaaaattggagctggccgcctcatggggcccaagggagtggctgtggaccggaatgggcatatcattgtggtggataacaagtcttgctgtgtcttcaccttccagcccaatggcaagcttgttgggcgttttggaggccgtggggccactgaccgccacttcgcagggccccactttgtggctgtgaacaacaagaatgagattgtagtaacggatttccacaaccakwsrgtgaaggtgtacagtgctgatggagagttcctcttcaaatttggctcacatggcgagggcaatggacagttcaatgcccccacgggagtarctgtggattccaatggaaacatcatcgtggctgactggggcaatagtcgcatacaggtattcgacagctctggttccttcctgtcctatatcaacacgtctgcagagccactgtatggcccacagggcttggcattgacctcggatggccacgtaktartggctgatgctggcaascactgctttaaggcctatcgatacctccagtagctgcacaagggccctgcttggctcatggagggacggacataggggtgattggacaagagggtctggctaagaggtgggccagacccsgcagcactgaawrtgggcgtgggcatggatgtgcccaatgcccttccyttcckscmcrassccacggktgcactttatttattcsgttcttgctttgstgactgggtgggcytggactgktyccaaggatgtgtgcagagcttcamcctaactyctttacacamcytyccttacaccytmagtytgstsybtgaccccmagcykgggscrraamagcctcttamttyagaagtccstctggktgkstycytaamaccccatacacactgrcagagacagcaataccccaccccatattaawtaaatgtgttygccavrrwrrraawwmmwrrmwrawgcggtctcaaa

SEQ ID NO: 3046 - DNA, 4120 bp, Rattus norvegicus
aaggttgcgcaacggctcttcccagcaaccgaagttttgtttggtcccacggggggccccctctttcagctcggtggctctaggccgtcactacggagacctcgttcctttcattgatgggagcgaacaccaacgtgcacacacgccgccggakcgcccagccccgtggctgtgccgcggaggcttggtggccctgtcaccggcgtcgcggggcggcgggtttggagggtgtcaactctggggacgtgcgtgcgtgtgattgttggggaggagaaatgtgatccgcggcttcgcgtccccagcggcggcgggaggaaggcgtggcggccgcgcggcggggctgttgccggcttctctcgttacggcggcggcggccctcttcccttcgcgctgggggagatcagcggaaaggactcgggaccagaatgtctgttttcctgtctgaggggagacggctgttgtaaaatggtatggcctcacaagtcttggtctacccaccatatgtttatcaaactcagtcaagtgccttttgtagtgtgaagaaactgaaagtagagcccagcggttgtgttttccaggaaagagcctgccctcagatccatgtgaatggtagacactttggaaatcctcttccttccacgaagggtagtgctttccagacaaagataccattctctaaacctcgaggacacagcttttcactgcaggcaggggccattgttgtcaaagacactgccggtgctacaaaggtcatagcagctcaggcgcagcaggctggagtggaggcacctcgggccgtggtgtggagaaacaggctacatttcctaggaggtccccagcgatgcgggttaaagcgcaagagtgaggagttggataatcacagcggcgcgatgcagattgtcgatgaactgtccatacttcctgcaatgttgcaaaccaacatgggaaacccagtgacagttgtgacagcgaccacaggatcgaaacagaactgtaccagtggggaaggtgactatcagttagtgcagcacgaagtcttgtgctctgtgaaaaacacatatgaagtcctggattttcttggtcgtggcactttcggccaggttgttaaatgctggaagagagggacaaatgaaattgtagccattaaaattttgaagaatcacccttcgtatgcacgtcaagggcagatagaagtgagcatcttagcaaggctcagtactgagaacgctgatgagtataactttgtgcgagcctatgagtgcttccagcaccgcaaccatacctgcctggtctttgagatgctggagcagaacctgtatgacttcctgaaacagaataaattcagtcccttgcccctaaaggtgatccggcccgttcttcagcaagtggccactgcactgaagaaattaaaaagtcttggtttaattcatgctgaccttaaaccagagaatattatgttggtggatcctgttcgacagccatacagggttaaagtgatagactttggatcggccagtcatgtatcaaagactgtttgctcaacgtatctacaatctcggtactatagagctccagagattatattggggttgccgttttgtgaagccatagacatgtggtcactgggatgcgtgattgcagagttattccttggatggccactctacccgggagccttggagtatgaccagattcgatacatttctcagactcaaggtttaccaggagaacaattgttgaatgtgggtacaaaatccacaagatttttttgcagagaaacagatatgtctcattctggttggaggttaaagacactggaagagcatgaagcagagacaggaatgaagtctaaagaggccagaaagtacatattcaacagtctggacgatatagtgcatgtgaacacagtgatggacttggaaggaagtgatctcttggctgagaaagctgatagaagagaatttgttagtctgttgaagaaaatgttgctgattgatgcagatttaagaattactccgatcgagactctgaaccacccattcgttagtatgaagcacctactagattttcctcacagcagccatgtaaagtcctgttttcatatcatggatatttgtaagtctccgagttcatgtgaaacaaacaaccacagtaaaatgtcactcttacgaccagttgcatccaatggcactgctgctctagcggcaaactttactaaagtcggaacattaagaagtcaggcgttgaccacatctgctcactcggtcgtgcaccatggtatacctctgcaggcggggaccgcacagttcggttgtggtgatgcttttcatcagaccctgattatctgtcccccagctattcaaggtattcccgcagcacatggtaagcccaccagttattccataagggtggacaacacagttccgcttgtgactcaggccccagctgtacagcctctgcagatccgaccaggagtcctttcacagacatggtctggtcgaacacagcagatgctaatacctgcctggcagcaggtaacacccatggctcctgctgctgcaacactaacttctgaaggcatggctggttcacagaggcttggagactgggggaaaatgattccacacagcaatcattataactccgtgatgccgccacctcttctgaccaaccagataacattgtcggcccctcagcctatcagcgtaggcatcgcacatgttgtctggcctcagcctgccactaccaagaaaaataagctgtgccagaacaggagtaattcattgcagaacaccaatgtcccacattcagcatttatttctccaaagataatcagtgggaaagaagttgaggaagtaagttgtgtagaaacacaggacaatcatacctcagaaggagaggcaagaacttgccatgaagcgtctgtcagacaggattcttcagtttcagacaaacagcggcaaaccatcatcattgccgactccccaagtcctgccgtgagtgtgatcaccattagcagtgacactgatgacgaagagacctcacccagaccttcactccgagagtgtaaaggtagtctggattgtgaagcttgccaaagcactttgaatattgatcggatgtgttcactcagcagtcccgacagcactctgagtaccagctcctcagggcagtccagcccatccccttgcaaaagaccgaacagtatgtcagatgatgaacaggaaagtgggtgtgagactgtggacggctctccaacgtcagactcctcggggcatgacagtccatttgcagagagcagttttgtggaagacactcctcaaaacccagagctggggacttgtgctggcacagaggccaagccagctcttagcactgctgtggagccaccagtggggacagagcgtggcctgaacgtcgatgcgcacatggccaacacagattctacatgccagccattgacaaaaggccagcccgcccctggaaagctgaaccagccctctgcctcggctgctcgtcagcaaaagcccacatcagcattccagcagcagcatttgaacctgagccaggttcagcatttcggaactgggcatcaagaatggaatggaaactttgggcatcgaagacagcaagcatatattcctactagtgttaccagtaatccattcactctttctcacggaagtcccaaccacacagcagtgcatgcccatctggctggaagtgcgcacctcggaggacagcccactctgcttccgtacccgccatcaactgccctcagtagtgctgcacccgtggcccacctcctagcctctccgtgtacctcaagacctatgttacagcatccaacttataatatctcccatcccagtggcatagttcaccaagtccccgtgggcataaatccccgcctgttaccatccccgaccattcatcagactcagtacaaaccaatcttccctccacattcttacattgcagcatcgcctgcatatactggatttccattgagtccaacaaaactcagccagtatccatatatgtgaaaactcgaaagcagtttattgaggaagctcaatgatacaaacgtttgattaaaaataaaaacatggtatggaat

SEQ ID NO: 3047 - DNA, 3251 bp, Rattus norvegicus
atggccacccaggtgatggggcagtcttctggaggaggaagtctctttaacaacagtggcaacatgggcatggccttacccaacgacatgtatgacttgcacgacctctcgaaagctgaactggcggcacctcagctcattatgttagccaacgtggccctgactggggaagtgaatggcagctgctgtgattacctggttggtgaagagagacagatggccgagttgatgcctgttggagacaaccacttttcagatagcgaaggagaaggccttgaggagtcggctgaactaaaaggtgaccccagtgggctggacaacatggaactgagaagtttggagctaagcgttgtagagccccagcccgtatttgaagcatcagctgccccagaagtgtacagctcgaataaagatcccgcccctgaagcacccgtggcggaggacaaatgcaagaatttgaaggccaaacccttccgttgtaagccatgccagtatgaagcggagtctgaagaacagttcgtacatcacatccgggttcacagtgctaagaagttttttgtggaagagagtgcagagaagcaagccaaagccagggaatctggggcttccccgtctgaggagggcgagttctccaagggtcccatccgctgtgatcgctgtggctacaataccaaccggtatgatcactacacggcacacctgaagcaccacctgagagccggggataacgagcgtgtctacaagtgtatcatttgcacgtacacgacagtcagcgaataccactggcggaaacacctgaggaaccattttcccaggaaagtctacacgtgtagcaagtgcaactatttttcgacagaaaaaaataattatgttcaacacgttcgaactcacacaggagaacgcccttataaatgtgaactgtgtccttactcaagttctcagaagactcatctaactcgacacatgcgtactcactcaggtgagaagccatttaaatgtgatcagtgcaattatswsgmskctaatcagcacgaagtgacccgacacgcaagacaggttcacaacgggcctaaacctcttaattgccctcactgtgactacaaaacagccgataggagcaacttcaagaagcacgtcgagctgcacgtcaaccctcggcagttcaactgccccgtgtgtgactacgcggcctccaagaagtgtaacctgcagtaccatttcaagtccaagcaccccacctgccccagcaagacgatggacgtgtccaaagtgaagctgaagaaaaccaagaggagggaggctgacctgcaccgtgacgccgccgccgccgccaytgagcagacggacacagagcaagcgaaaaccaagggggtggacgcgtctgcgaggagaagtgagaggcctgtaaaaggcgttggaaaagatgttccaaaagagaagaagccctgtagcaatgcctctgtggtgcaggtaactacccgaactcggaaatcagcggtggagactaaagcagcggagggaaaacacacagatggacagacaggaaacaacgcagaaaagtcctctaaagctaagaagagcaaaaggaagatggacgccgaggcccatccctcggyygagcctgtgactgagggacccgtgacaaaraaraaaaaramrrararmaaacccaagaccagcggcgaagtgccgaagggcagcagagtggaggacaggaaggcggacaaacagcaaagtgcttccattaagaaaggcgggaagaagacggctctcaagactaagacagctaaaaaaggcagcaaacttgctccgaagtgggtggggcacacagaaccttcctcggagatggctcaaggaggggagtctccagttcctgctctcactcaggcggtggtcaccccatcaggatctactcagacagagctctcttctcccatggatattgctcagacagagcctgcccagatggacgtttcccagacagggccgcctcaggtgcagcggcctcttcctgtggagcctgctcaattggagccgtctcctcctcaggagcctccccaggtagagccacctgcctgtgtggagcctccccctcccgtggagcctccatgtcccatggagcctgctgagatggaaccgtcccctcccatggagccttcccaggtggagccacctcctcatttggagcctccgcttcccatggagctgcctcaggtggagctgcctcctgtggaggattgtcagaaggagctgcctcctgtggagcatgctcagactaaggttgctcagacaggtcctactcaggtgggagctgttcaggaggagccccttttctgtctccgagccacctcaagtcaagctaaccagaaggtcatctccccgaaagaccgtgccaaggagaagttgagcgtgctgagtgagatggcgaggcaggagcaggttcttattgaggttggcttagtgcctgtcagagatagccagcttctgaaggccagcaagagcgcaccggacctcccagccccaccgtcaccactgccaaagggacacttgagaagagaagagacacccaaggaccaagaaatgttctctgacggggaaggaaataaagtatcccctctcgagaaaggaggaacagaggaagctggtgagagtcgagctgagctggctgctcccatggaatctaccagtgctttatcctctgaacaaagctcaaatgcaccagatggtgaaacattacacagcgagtgtcaggctgactccactgcggtttgtgaaatggaagtggacactgagcagaagacagaccgtgtccctctgaaagactcagcagtagaaccagtgtcacctcttaacccaagagtggaccctgaagcagcggcaccagctgtggtggcctcccctcctatcactttggccgagtctcaggaaattgatgaggatgaaggcattcacagccatgatggaagtgacctgagcgacaacatgtctgaggggagtgatgactcaggactgcatggggctcggccagcaccacaggaagctacgtcaaaaagtggaaaggaagggttggctgtcaaagtaactgagggagagtttgtttgtattttttgtgatcgttcttttagaaaggaaaaagactatagcaaacacctcaatcgccatttggttaatgtgtacttccttgaagaagcagctgaggagcaggagtagagtagctgatcctcgaggagaagcgcaatgcgactttgtaa

SEQ ID NO: 3048 - DNA, 2331 bp, Rattus norvegicus
gccattgmcgccgcctcacctctgctgccagtagcctcgccgtcggggagccctagcgcagcgtccgccctcagcatgatggacttggaattgccaccgccaggactacagtcccagcaggmcatggatttgattgacatcctttggaggcaagacatagatcttggggtaagtcgagaagtgtttgactttagtcagcgacagaaggattatgagctggaaaaacagaaaaaactcgaaaaggmgagacaagagcaactccagaaggmacaggmgaaggcctttttcgctcagttacaactggatgaagagaccggagaattcctcccaattcagccagcccagcacatccagacagacaccagtggatctgtcagctactcccaggttgcccacattcccaaacaagatgccttgtactttgaagactgtatgcagcttttggcagagacattcccatttgtagatgaccatgagtcgcttgccctggatattcccagccacgttgagagctcagtcttcaccacccctgatcaggctcagtcactcgatagctctctggagacggccatgactgatttaagcagcatacagcaggacatggagcaagtttggcaggagctattttccattcccgagttacagtgtcttaatacggaaaacaagcagcaggctgagrctaccactgtccccagcccagaggccacactgacagagatggacagcaattaccatttttactcatcgatcccctcactggaaaaagaagtggacagctgtagtccacatttccttcatggttttgaggattcttttagyagcatcctctccacggatgatgccagccagctgaactccttagactcaaatcccaccttgaacacagatttcggtgatgaattttactctgctttcctagcagagcccagtggcggtggcagcatgccttcctctgctgccattagtcagtcgctctctgaacttctgggcgggcccattgagggctgtgatctgtccctgtgtaaagctttcaaccagaagcacactgaaggcacggtggagttcaatgactctgactccggcatttcactgaacacaagtcccagccgagcatccccagagcactctgtggagtcttccatttacggagacccaccgcctgggttcagtgactcggaaatggaagagctagacagtgcccctggaagtgtcaaacagaatggacctaaagcacagccaacacattcttctggggatacagtacagcctctgtcgccagctcaagggcacagtgctgctgtgcacgaatcccagtgtgaaaatacaacaaaaaaagaagtacctgtgagtcctggtcatcaaaaagtcccattcacaaaagacaaacattcaagccgattagaggctcatctcacaagagatgagcttagggcaaaagctcwcsakattccattccctgttgaaaaaatcattaatctccctgttgatgacttcaatgaaatgatgtccaaggagcaattcaacgaagctcagcttgcattaattcgagatatacgcaggagagggaagaataaagttgccgctcagaactgtaggaaaaggaagctggaaaacattgtagagctggagcawgacttgggccacttaaaagacgagagagaaaaactactcagagaaaaggragaaaacgacagaaacctccatcttytgaaaagaaaactcagcaytttgtatctggaagtcttcagcatgttacgtgatkaggatgggaaaccttactctcccaktgagtactcthtgcagcagaccagagatggcaacgtgttccttgttcccaagagcaagaasccagatacaaagaaaaactaggttcggraggatggagccttttctgagctagtgtttgttktgtacggctaaaacttcctactgtgatgtgaaatgcagaaacactttataastaactatgcagaattatagccaaagctagtgtagaaataatatgaaactttacaaagcattaaagtctcaatgttgaaycarwwwmawwwwaamwmwmaagtwawtttcttgsgcaccatttgggctagtttctgtgtaagtgtaaatactacagaacttatttatactgktytcatttgttacagtcatagacttatatgacatctggctaaaagcaaactattgaaaactaaccaaaccactatacttttttatatactgtatgaacaagaaatgacatttttatattaaattgtttagctctgataaaaattaaaaggagctagcactaataaagraawatcatgacttaaaaaaaaaaaaaaaaaa

SEQ ID NO: 3049 - DNA, 6328 bp, Rattus norvegicus
cacgaggggcacgagggcaaggcactggggtatcttggtagatctgagtctgttgtgtcgggtctggactcccctgccaagattagctccatggaaaagaaacttctcatcaaaagcaaagagctgcaagactctcaggacaagtgtcacaaggtatttatctgtgcagccggcctccgtccttgctccaggatcctcccatcactatatgccaagggatctgccaggggccgctgctggcactgagcctcctgatctgtagagagcgaggtgccgcccgcctccctcgttgaagtcgcgcctccatcagctcagagggagatgaattcgggcstagacattgccataaatcctttaaatctttaccagaggaggccctggatttaaaacggcccgtttstcagcacgacccagcccgatgtctgcttcttccggcaggcggcctgggtcctcctcacctggggctgagaagcgtcccatctgctcggagtgaggcgaagtctgtcttcctagtcctttaaaactcctgcttatgtcactgcggccactgtgctgactatgctcacgtctcttaatgcaactctctgaaagcccaataagaaaccactgctcgtgtgggactcctaagagttcagacgaatcattgtctctcagcctggccctggatctgtcytctaggtctttgcaaggagatggggggaccaagatggatttaggataaaattaaactggcatccgtataagccagaccgrtvccaaaaaaaaaaaaaaaaaaaaaaaaaaaaaaaaagcaaacaggtggaccatgatggcggtggcttcttggctcagtgtgctagagaagtgactgcgcagcaggacttggatgacaggactgacagcctttggtgactgtctttttgaagaactgtacgctcctgggtgaagaagcaatgatggagcaggaaatggcccggttgcatcgcagagtgtcagaggtggaggctgtgcttagtcagaaggaggtggagctgaaggcctctgagactcagagatccctcctggagcaggaccttgccacctacatcacagaatgcagtagcttaaagcgaagtctggagcaagcgcggatggaggtgtctcaggaggatgacaaagctcttcagcttctccacgacatcagagagcagagccggaagctccaggagatcaaggagcaggagtaccaggctcaggtggaggagatgaggctgatgatgaatcagctggaagaggacctcgtgtcagcccgaagacgcagcgatctctacgagtctgagctgagggagtctcggctcgccgccgaggaattcaagcggaaggcaaacgaatgtcagcataaactgatgaaggctaaggacctagggaagcctgaagtgggagaatgttccagactggagaagatcaatgctgagcagcagctgaagattcaggagctccaggagaagctggagaaggctgtaaaagccagcaccgaggccacagagctcctgcagaacatccggcaggcaaaggagcgagctgagagggagctggagaagctgcacaacagggaagattcttccgaaggcatcaaaaagaaactggtggaagctgaggaacgccgccactccctggagaacaaggtaaagagactagagaccatggagcgtagagagaacagactgaaggatgacatccagacaaagtccgaacagatccagcagatggctgataaaattctggagctggaggagaagcatcgggaggctcaggtctcagctcaacacctagaagtacacctgaagcagaaggaacagcactatgaggaaaagatcaaagtgttggacaatcagataaagaaggacttggccgacaaggagagcctagagaccatgatgcagaggcacgaagaggaggcccacgagaagggcaagatcctcagcgagcagaaggcgatgatcaacgcaatggattccaagatcagatccctggagcagaggattgtggagctgtcagaagccaacaagcttgcggcaaacagcagtctcttcacccagaggaacatgaaggcccaggaagagatgatctcagaactcaggcagcagaaattttacctggagacacaggccgggaagctggaggcccagaaccgaaaactggaagagcaactagagaagatcagccaccaagatcacagtgacaagaatcggctgctggagctggagacaaggttgagagaggtcagcctggagcatgaggagcagaagctggagctgaagcggcagctcacggagctgcagctgtccctgcaggagcgtgagtcccagctgacggccctgcaggccgcccgggctgcccttgagagccagctccgccaggcgaagacggagctggaggagacaactgcagaagcggaggaggagatccaggcactcacggcacatcgagatgaaatccagcgcaaattcgatgcccttcgcaacagctgtactgtcatcaccgacctggaggagcagctgaaccagctcaccgaggacaacgccgagctcaacaaccaaaacttctacctgtccaaacaactcgatgaggcttcgggtgccaacgatgagattgtgcagctgcgaagcgaggtggaccatctccgccgtgagatcacggagcgggagatgcagctcaccagccagaagcaaacaatggaggctctgaagacgacctgcaccatgctggaggagcaggtcatggacctggaggccctgaacgacgagctgctggagaaggagcgccagtgggaggcctggaggagcgtcctcggggacgagaagtctcagtttgagtgtcgagttcgagagctacagaggatgctggacaccgagaagcagagcagggctagagctgatcagcggatcacggagtctcgccaggtggtggagctggcagtgaaggagcacaaagccgagattctcgcgctgcagcaggctctcaaagagcagaagctgaaagctgagagcctgtcggacaagctcaacgacctggagaagaagcacgccatgcttgagatgaatgcccggagcttacagcagaaactggagacagagcgggagctcaaacagaggcttctggaggagcaagccaagttgcagcagcagatggacctgcagaagaaccacatcttcagactgacacaagggctgcaggaggcgctggaccgggcggatctgctgaagaccgaaaggagcgacctggaatatcagctggaaaacattcaggttctctactcacacgagaaggtgaaaatggaaggcactatttctcaacaaaccaaactcattgatttcctgcaagccaaaatggaccagcccgctaaaaagaaaaagggtttatttagtcgacggaaagaggaccctgctttgcccacacaggttcctctgcagtacaatgagctgaagctcgccctggaaaaggagaaagcgcgctgtgcggagctggaggaagcccttcagaagacccgcatcgaactccggtccgcacgggaggaagctgctcaccgcaaagccacggaccacccgcacccatctacgccagccactgcgaggcagcagatcgccatgtccgccatcgtgcggtcgcctgagcaccagcccagtgccatgagcctgctcgccccaccatccagccgcagaaaggaggcgtcaactccagaggagttcagccggcgtcttaaagaacgtatgcaccacaacattcctcaccggtttaacgtgggcctgaatatgcgagccaccaagtgcgccgtgtgtctggatactgtgcactttggacgccaggcatccaaatgtctcgaatgtcaggtgatgtgccatcccaagtgttccacctgcttgcccgccacctgtggcctacctgccgaatatgccacacacttcaccgaggccttctgccgagacaaagtgagctccccggggctccagagcaaggagcccagcagcagcttgcacctggaagggtggatgaaagtgcccaggaataacaaacgaggacagcaaggctgggacagaaagtacattgtcttagagggttcaaaagtcctcatctatgacaacgaagccagagaagctggacagaggccggtggaagaatttgagctgtgccttcccgacggggatgtatctattcatggtgccgttggtgcttctgaacttgcaaatacagccaaagcagatgtcccatacatactgaagatggagtcccatccgcataccacctgctggcctgggagaaccctctacctgctggcacccagctttcctgacaagcagcgctgggtcacagccctagagtctgtcgtcgcaggtgggagagtttctagggaaaaggcagaggccgatgctgcatgggactgtacttcttgtgagcgtctgcccgtgtgggttgagaaattacttggaaactctctgctgaagctggaaggtgacgaccggcttgacatgaactgtaccctgcccttcagcgaccaggtggtgctggtgggcaccgaggagggcctctatgcgctgaacgtcttgaaaaactccttaacccacatcccaggaatcggagcagtcttccagatttacatcatcaaggacctggagaagctgctcatgatagcaggggaagagcgggctctgtgtttggtggacgtgaagaaggtgaagcagtcgttggcacagtcacaccttcctgcccagcctgacgtctcccccaacatatttgaagccgtcaaaggctgccacctgtttgctgctggcaagatcgagaacagcctctgcatctgtgccgccatgccgagcaaagtcgtcatcctgcgctacaacgacaacctcagcaagttctgcatccgcaaggagattgagacctctgagccctgcagctgtatccacttcaccaattacagtatcctcatcggaaccaacaagttctatgagatcgacatgaaacagtacacgcttgaggagttcctggacaagaatgaccattccttggcacctgctgtgttcgcatcctcgaccaacagcttccccgtctccatcgtgcaggcaaacagcaccgggcagcgggaagagtacctgctgtgtttccacgaatttggggtgttcgtggattcttatggaagacgtagccgcacagacgatctcaagtggagtcgcttacctctggccttcgcctacagagagccttatctgtttgtgactcactttaactccctggaagtaattgagatccaggcacgttcctcactggggacccctgcccgagcctatctggaaatcccaaaccctcgctacctgggccccgcaatttcctccggagcaatttacctggcctcctcataccaggacaagttaagggtcatatgctgcaaaggaaacctcgtgaaggagtctggcactgagcagcaccgcgtgccctccacatcccgcagccctaacaagcgaggcccaccaacatacaacgagcacatcaccaaacgtgtggcctccagcccagcgccaccagaaggccccagccatccccgagagccaagcacaccccaccgctaccgagacagagagggccggacagagctgcgcagggacaagtctccaggccgtcctctggagcgggagaagtcgccaggccggatgctcagcacgaggagagagcggtccccggggagactgtttgaagacagcagcaggggccggctgcctgcgggagccgtgaggaccccactgtcccaggttaacaaggtctgggaccagtcttcagtataagtctcagcctgaagaactcctcctcatctcagtctgcaggaagacaactgcgccctgggtctccaccgcaggggatcccagcaccgtctgctcgccgcattcggcacagctgggtccagactgtccttggcacggatacccccatctccgaggggtgcagatagccaaggctcttaggcgctgccagcgctcagttcccccctcggaggggggagcaccctcctgcggtcatctctgcactgttactctctcacagcattcacagacttttgtacttagctccagcctgaacccrttcatcaaaaggaaaccaacccrgactcgaaccgtggctggaagtccactgctactcttaagatccttgggttggttattttttatttttccctttgsttttgatcatctcctcctcttcttcttcctccctcttgttcctcttcctcctcctttctccttttttttttttttaagacaacagaawtmcgtcgctaccaagtctactaggaattctgttgtcttaaaaaaaaaaaaaaaaa

SEQ ID NO: 3050 - DNA, 1764 bp, Rattus norvegicus
ccaagctgcgcagtsraacacgrgttggkgcggcagckgaagacgccaacttaaaagcgccgtagccagaacccaggcagcagtgtgtccattgtccagaactcatctgagaaactgccacaggaagtgctgctctgctccagtctggtcactgaaaagggagctccaggacctgcaggatgggggcaggctgtgtcaaagtcaccaagtacttcctcktcctcttcaatctgctgttctttatcctgggtgctgtgatcctgggctttggggtgtggattcttgcagacaagagcagcttcatttcygtcctacaaacctcatccagctcgctgcasgtgggggcatacgtcttcattggtgtgggcgccatcaccatgctgatgggcttcctgggctgtattggtgctgtmaaygakgtccgctgcctgctgggtctgtacttcgtcttycwtctgctgattcttatakcacasgtgactgtagaggtcctcttctacttcaatgctaacaagctgaagcaggagatggggaacacagtgatggacattattcagaactacagcgtcaatgccagcagcagccgcgaggaggcttgggactatgtgcaggcgcaggtgaagtgctgtggctgggtcagcccctccaactggacacgtaacccggtgctcaagaactctaccaagaccacttacccatgctcctgtgagaagacgaaggaggaggacaaccagctcattgtgaagaaagggttctgtgagtctgacaacagcaccgcaagtgaaaacagtcctgaggactggcctgtgcacccggaggggtgcatggagaaggctcaggcgtggctacaggagaacttcggcatccttctgggcgtgtgtgctggtgttgctgtcattgagctgctggggttgttcctgtccatatgtttgtgccggtacattcattctgaagattacagcaaggtccccaagtactgaggctgctgatgtccccactgtcctgtgtttctccaccctcagtctcccacagggcctctagagctttcccacatgagccgtgctccatctactactgaggcctctggcccaccctgggaaggttgtaggaactttctgggcctgggcccttctccctgcctttctgccaccaatatggggcccttactgtcctgtagctcttcctcctactgcctggaatatttttaacagcttgaaatggctcccagtattactgtacacaggatagctggstccccaccctraagtcatattatamcaatataatattwaaaaccagggagggctagcacccatggctgcccagggaaagsccacaggaaaggttagtggtttccccactgtgacactttctttatgggttttcaatgtttctgtgggagacagggtaggcagttcttgtacacacttggaatactccccccaagctcagttcagcagggaactgaacggagaggctgcctgggggactggcccaggtagcccccagtgagyttttccttggtgagggacctgacagcttaggggcatgggtccctcaggtctggcataagaccctgagttgtctggacaagagaaggaggatctggactggtatttcttggcagctgtcccctgtcccctgggctaagggtgggtgaggctgtsccttgcagggtrggggagggtttccatatgctcatctctgaaatcaactattaaaggaggatttgthmcaawmmarmmwraaaaaaaaaaaaaaaaa

SEQ ID NO: 3051 - DNA, 6427 bp, Rattus norvegicus
tgtgaggcagcggcgctgcgactctctctcccccggctccttagtgggagcgccggccagggacccgagccgcgctgtacgcagcgtccacccgcccgctccgcaggtccccgagcgtcgggcggcgatggagcccgggcccgcggcgccctcgtctggcgccccgcggcccgcccgggatggggacgcgccgctgactgccgccggggtggacctgcccggcacggccgtactctccggtcgagaggatgctaccgctgggagccaggccggcggcggggtgcgcggagagggaaccccggccgctggcgatgggctgggcaaacctctggggcccacccccagccagagccgcttccaggtggacccggtttccgagaacgccgggcgggccgcggctgctgcagctgcagcggcggctgcggcggctgccggggcagcgggcaaggagacccccgcggctgggaaagccggcactgagagcggcgtggccaagggcagcgaggaagccaagggccgcttccgcgtgaacttcgtggacccggctgcctcctcgtcggcggacgacagcctgtcggatgcggcgggagtcggtggcgacgggcccaacgtgagctcccagaacggcggggacacggtgctgagcgagggcagcagcctgcactcgggtggtggcagtggacaccaccagcagtactactatgacacccacaccaacacytactacctgcgcaccttcggccacaacaccatggacgcggtgcccaggatcgaccactaccggcacacggccgcgcagctgggcgagaagctgctccggcccagcctggsagagytccacgatgagctggaaaaggaaccttttgaggatggytttgcgaatggagaagaaagtactccaaccagagatgctgtggtcacatacactgccgaaagtaaaggagttgtaaagtttggctggatcaagggtgtwttagtwcgwtgtatgttkaayatwtggggtgtgatgctctttattcgattgtcatggattgtgggtcaggctggaataggtctctccgttcttgtaatagcaatggccactgttgtgacaaccatcacaggattgtctacttcagcaatagctaccaatggattcgtgagaggaggaggagcatactatttaatctctagaagtctagggccagaatttggcggtgcgattggcttgatcttcgcttttsccaatgcagtggcagttgctatgtatgttgttggattcgcagagactgtagtggagctgcttaaggaacattccatacttatgatagatgaaatcaatgacatccgaattattggagccattacagtggtggttcttctgggcatctcagtggccggaatggagtgggaagcaaaggctcagatcgtccttctggtgattcttcttctggccatcgctgacttcgtcataggaacatttatctcactggacagcaagaagcccaagggtttcttwggctataaatctgaaatatttagtgagaactttggaccggattttcgagaagaagagactttcttttctgtattcgccatcttttttcctgctgcaactggtattctagctggggcgaacatctcgggtgaccttgcagatcctcagtcagccatacccaaaggaacgctcttagccattttgattacgacagtggtttacataggaatcgcagtgtctgtaggttcttgtgttgtccgggatgccactgggaacgttaatgacaccattacaacagagctaactaactgtacttctgcagcctgcaaattaaactttgacttttcctactgtgaaagcaacacctgttcttatgggctaatgaacaactttcaggtgatgagcatggtgtcaggatttgcacccctgatctctgcgggtatcttttcagccacactctcatcagcactggcatctcttgtgagtgctcccaaaatatttcaggctctatgtaaggacaatatctacccagctttccagatgtttgcgaaaggttatggaaaaaataatgaacctcttcgtggttacatcttaacattcttaattgcacttggattcatcttaattgctgaattraatgtcattgctccaattatctctaatttctttctcgcatcatacgccttaatcaacttttctgtattccatgcgtcacttgcaaagtctccagggtggcgtcctgcgttcaagtactacaacatgtggatctcccttactggagcgattctctgctgcatagtgatgttcgtcattaactggtgggctgcactgctcacrtatgtgatagttcttggactgtacatttatgtcacttacaaaaagccagatgtgaactggggatcctccacacaagcgctgacttacctcagcgcactgcagcattcaatccgtctttccggggtggaggaccatgtgaaaaacttcaggccacagtgtcttgtaatgacaggttctccaaactcacggcctgctttactgcatcttgttcatgacttcacgaaaaatgttggtttaatgatctgtggccatgtgcatatgggtccccgaagacaagctatgaaagagatgtccattgatcaagccaaatatcagcgatggctcattaaaaacaaaatgaaggctttctacgctccggttcacgcagatgacttgcgggaaggtgcacagtacctgatgcaggctgctggacttggtcgtatgaaaccaaacacacttgtcctcggatttaagaaagattggttacaagcagatatgagggatgtggatatgtatataaacttatttcatgatgcttttgacatacagtatggagttgtggtcattcgcctaaaggaaggactggatatatcacacctccaaggacaagaagaattattgtcatcacaagaaaagtcacctggtaccaaggatgtggtagtaaatgtggactacagtaagaagtcagatcaagatgctttcaaagcatctggtgaaaaacctattacacagaaagatgaggaagaggatggcaagacttcaactcagccactgttsaaraaagaatccaagggccccgtggcacctttaaatgtagctgaccaaaagcttcttgaagctagcacacagtttcagaaaaaacaagggaagaatactatagatgtctggtggctttttgatgatggaggtttgaccttgttgataccctatcttctgacaaccaagaaaaagtggaaagattgtaagatccgagtattcattggtggaaagataaacagaatagaccatgaccggagagcgatggctactttactcagtaaattccgaatagacttctccgatatcatggkcctaggagacatcaacaccmaaccaaaaaaggraaacatcgkcgcttttgatgacatgattgagccatacagacttcacgaggatgataaagagcaggatattgcagacaaaatgaaagaggatgagccctggcgcatyacagacaacgagctggagctctacaagaccaagacatatcggcagatcaggktaaatgaattattaaaggagcattcaagcacagctaatattattgtcaygagtyttccagwtgcccggaagggtgctgtgtscagcgcgctgtacatggcttggktadaagctctgtctaaggacctgccaccaatcctgctggttcgtgggaatcatcagagcgtscttaccttctactcttaattgkcctgccccatggactccctctaagaatggtacttcagtgcctagtcagagtgactggatcgtcagcaacaccgcagcatcacagtggcgaactgggtctytgtttcactacttcattctttgaaagcacatggacacgttgctccactgatagatctgtggagacttcsgttttagtctactccasatctcagwcttatgactgctgattcttccytgttggactgaagktcttgagagtaaagktttcctttgctacttgacagcaataagagtgagttatttwwgawtkckgaraggagtacataagcctttagccttgaggtgccttctgaaattaaccaaatttcatccatagatctatcgtcttttgtacatttatagaatgttaaactctgccttcagacattatttttacttctaatctctgtcatcctaagtggacactgcttgtctcctcccattgaccasttagtgttgagagctgtgtgtttcgtatyacttttgtamaagcgtttgttggatactgaagmrggtasgacaagctaataaaatatgtggrgaaagtatccaaamwtggagcccmaggktaggtktatatgaatrgatacttagagctagggaagagaggcccgaacaccgtttctatctctcaattagagttatctattatttcttttaaatcatagagatgactgacgatctacccagtacttcatttataacataaaaaaaaaaawtmamattttttwaaagcaaaaccttgaggtcatttgtattgtttttaaaagatctcttttaattkagaatttcctctcaaatgggagggacttttaagacatgctaactggtatttttcgaggaaatttagacaaagcattgccatttactagagcatttcaataaaaactatggggatttcamwawmmwawvvmawmmtttatttaaaaagaaagatgacaatgttatcaatggttaaatggaccactgttttcttagtgaaatggttttaggcttaatttattcaagtatcaagwwcatttagtcttaatacactcaggtttgaacagattattccgaacattgaaatttaatccattcttaatactttaaaacttgcgttaaagaaaactgccagtttgtgcatttgaccttgtcgtctgcaagtgcacttgacagtgagcgtgcacacctgckctgtcctgaacgctttatacacagtcgttaatgtgaagtgtctaakttcaaggaaggatcttctaaacatttcaagggattcatgtccacatgtctgtctgtgtgtatgttttgcatacacaggtgcatatgtgtawatgtaatgaaatttatgttgccagtgtttcagattttaaagcgatcatgatttggtaggttmcagattttgktgktgbtgttgbttwagttttttcttttcttttttaagtaagcattcaagtcagatcaagmcattmcagatttcatggaggmcaaagmcaattgaaagaacatcgtgtagctttgtacagttatccagttatgtaaagtaratgatctgtaagtttcagtggagaacatagcgcagactttcatcatcttargggaaatgtcagaaaagcatttcagtagtgkagtacttgtgcyccatgaaaacagactgcgktaataccagctggatatcttctygtttccmctcagaatattaaagaaamcaaggttaagtgattttttccaagttcttcttacattataatataatattgttccatttattgtaaattttgcagagtttagggcagtatagaagaatcatattagcaaaccatatcatgtgtggatctkctgaatggatactagggcatgggctgaatgctgctatcttgaaatgtacacagctagacttgscttttatttttaaaggktttccctcattcaggaaacttcattgkgatctgkactacagaaactwaatgkcatacatcatacgtgtgtgttcaaagkacataaaatggatctcaacgcacctaacagggagggtggcgacactgtgaagtgatgccmgcagcagctctctactcttgraaaccgscttycgtcgtcagstaacacgagctgscaggccagacgttctcaaggktgcagtagtactctaaaacgaaacttctcaayggktaattcttagacatctagctagtattagagctgktttcatttwacgctgkttkgawtatttkgatgccmaattatgttttagtcctaatcattrrtaatamckkmamdakrcgcmgkggcatttgagctcattcttgggataakttaaaaacytgagtgcgttcaaagagaacskcgttgrtkattaacggktcactaaatcagrwattcattkgkctcatcttttccttcytgyttkgttttccttcactcttctcatatggctctcctgacgtgtgtgtggtttgttwtgttttgtttttttaagactatggaaataatttaatgagttgagctccggtgatgatctgmtaagtttgaaaatgtaatattttgataatactgtactgtacctgtcccaaatgcttttgtaatgttttaaccccgagtattgcagttgctgctccgtacagaggtwwctgcaataaaggaagtggaatcawtwaaactttaawawhwaaaaaaaaaaaaaaaaaa

SEQ ID NO: 3052 - DNA, 1101 bp, Rattus norvegicus
cttgccagttggctttctgtccttctgtgaggaataccagtgtgaagcatgcagcaggacggtctcagcagtgtgaatcagctggggggactctttgtgaatggccggccccttccactggacacccgacagcagattgtgcagctagcgataagagggatgcgaccctgtgacatctcacggagccttaaggtatctaacggctgtgtgagtaagatcctaggacgctactaccgcacaggagtcttggaacccaagggtattgggggaagcaaaccacgtctggccacacctgctgtggtggctcgaattgcccagctaaaggatgagtatccagctctttttgcctgggagatccaacgccagctttgtgctgaagggctttgtacccaggacaaggctcccagtgtatcctctatcaatcgagtccttcgggcactacaggaagaccagaggttacactggacacaacttagatctccagctgttttggctccagctcttcctagtccccacagtaactgtgaggctccccgaggtccccacccggggaccagccacaggaatcggactatcttctccccgggccaagctgaggcactggagaaagagttccagcgtgggcagtatccagattcagttgtccgtggaaagctggctgctgccacctctctgcctgaagacacagtgagggtstggytytssaacasaagwgysaaatggcgcagacaagagaagttgaaatgggaaacacagatgccaggtgcttctcaggacctgatggtaccaaaagattctccagggatcatctctgcacagcagtcccctggcagtgtaccctcagcagccctgcctgtgctggaacaattgaatccttccttctgtcagctgtgctggggggcagtaccagacagatgttccagtgacaccacatcccaagcctgtctccaaccctactgggaatgccactccctccttcctgtggcttcttcctcatacatggaatttgcctggccctgcctcaccacccatcctgtgcatcatctgattggaggcccaggacaagcgccatcaacctattacttacactggccataagag

SEQ ID NO: 3053 - DNA, 1219 bp, Rattus norvegicus
cacgaggccgaacctgagccgagagaagagccctgggagattaagtttcttgcaaagatcgctggtgattgtagctgctgagcagagattctggaaagcactccatttctgagcctctagcatggcgggcctaaagaggcgggcaagccaggtgtggcccgaagagcgcgttgagcaggaacatgggctctacagcctccaccgcatgtttgacatcgtgggcacccacctgacacacagagatgttcgagtgctttccttcctttttgttgatgttattgatgaccatgaacgaggacttatccgaaatggacgtgacttcttgttggcactggascgccagggmcgctgtgatgagagtaactttcgccaggtgmtgcagctgctgcgtawcatcactcgccatgacttgctgccctatgttactctcaagaagagacgggctgtgtgccctgatcttgtagacaartatctggaggaaacatcaattcgctatgtgacccccagagccctcagcgatccagaaccgaggcctccyywkccctctaaaacagtgcskccccactatcctgtggtgtgctgccccamwwcgggttctcaaatgtgtagtaagcggccrgcccgagggagaaccacacttgggagtcagagaaaacgccggaagtcagtgactccagacccgaaggaaaagcagacatgtgacatcaggctgcgagttcgggcggaatactgccagcacgagactgctctgcaaggcaatgtcttctctaataagcaggacccacttgagcgccagtttgagcgctttaaccaggccaacactatcctcaagtcccgggacctgggctccatcatctgtgacatcaagttctctgagctcacctacctcgacgcattctggcgagactacattaatggcycawkawtwsaggcactgarrggcgttttcatcacagactctctcaagcaagctgtgggccatgaagccatcaagctgctggtgaacgtggatgargargactatgarctggsccgacagaaactcctgaggaacttgatgctgcaagcattaccctgacctttcccmgcctcacctttctggggactgttygctccgtcacctctggagccgacatactgttctggggtttgttctcwaccctttccaaccaaycacwccdccttyytttktyttwwhhtttaaaaaaaaaaaaaaaaa

SEQ ID NO: 3054 - DNA, 2236 bp, Rattus norvegicus
ctcagggacaggagaccagtactttcctcttcgacgcggggcagcctcctgcaggcagctgctcggaccgcgtagggcacacagccgcggagcgcatgaccagagactcccgggagccctgactcctcagggagcagcatctggcggcgatgaacgctagcgccgccgcgctcaacgagtcccaggtggtggcagtagcggccgagggagcggcagctgcggctacagcagcagggacaccggacaccagcgaatggggacctccggcagcatccgcggcgctgggaggcggcggaggacctaacgggtcactggagctgtcttcgcagctgcccgcaggaccctcaggacttctgctttcggcagtgaatccctgggatgtgctgctgtgcgtgtcggggactgtgatcgcaggcgaaaatgcgctggtggtggcgctcatcgcatccactcccgcgctgcgcacgcccatgtttgtgctcgtgggtagtctggccactgctgacctgctggcgggctgtggcctcatcctacacttcgtgttccagtacgtggtgccctcggagactgtgagcctgctcatggtgggcttcctggtggcgtccttcgccgcctcagtcagcagcctgctcgctatcacagtggaccgttacctgtccctttacaacgcgctcacctactactcgcgccggaccctgttgggcgtgcacctcttgctagcagccacctggacagtgtccctcgggttggggttgctgcccgttctaggctggaactgcttggctgaccgcgcgtcctgcagcgtggtgcgccccctgacacgcagccatgtggcgttgctctccacttccttctttgtggtctttggcatcatgctacacttgtacgtgcgcatctgccaggtggtctggcgccacgcccaccagatcgctttgcaacagcactgcctagcaccaccacacttagcagccaccagaaagggtgtgggaactttggccgtggtgctaggcacttttggggccagctggctgcccttcgccatctattgtgtggtgggtagccaagaggacccggccatctacacctatgccaccctgctgcctgccacctataactccatgatcaatcccatcatctatgccttccgcaaccaggagatccagcgtgccttgtggctcctgttctgtggctgtttccaatccaaagtgcccttccgctccaggtcccccagtgaggtctgaagggctcctccgtgtctcctcacccacatcacaaatccaacatgccggcctttggtgagcttctaggtgcctgctgatgaactcttgaggactcagtggttcggcgcgagtctgactgccccgcaaagggactggatgtgaacgcaacaaactgactcagacaaagaggcttgttggcattttacatatacagtgtatacacgtgtacatatatatacaaatatttgtatcttctggaggtgttcagggcctggagcttcccgttctgtgaaaaaaactaacaaaatgtggttgtatactcaatcgtacatcacatttgtcaagtgaagacattccaatactgcttaataatagcactttatttttagctgctgaaatgccaagacagtgttgccatccccaagagcaggagaaagggagtcagagatgtatttttgttgtatgtgatagaatattttgctgcacatgcatcagtaaactacaacatattttgtacacaaataaacacattataaaagtatgatcttgggtatgtgataaattgtggcattgtttggaatctgaattgtgagtgtgtttattttaaaagtctactgcacatctatctatcatctgtcccagggagagccacatgaaataccagatctaaaccatgggatgaggcagtaacattcatgagtcatggaggaagtaacattcacacgtggcatccccagaacacgagaaggaaggctgttactggtgcaagttaatgtgctctcttggtggccgggttgggaagacatgtttcagaggtcaaaacaattcaagtcacataggcacaggtgtaaactctgaagccacaacttaccagcataactttacaaacatgccaagatttctcaacatggcttattcagactgttgctacccaggtctggtagccaggtgcagagcccaataaaaccaataaaattctcctaaagcaggattcccagatcttcatggggtaactg

SEQ ID NO: 3055 - DNA, 2836 bp, Rattus norvegicus
  misc_feature (2735)..(2735): n is a, c, g, or t
gggctgaggacacgatgtcgggcgcctcccgcggactgttctgggccgccacctgcctcgccgcgctctgcctgtcggccgcgcagagcaacagcagcgcatctcccaacgtgactgacccgccgaccacgaccagcaaagtggtcccgacgacgctcaccaccaccaagccgccagaaacctgtgagagcttcaacagctgtgtttcctgtgtcaacgccaccttgactaataatattacctgcgtctggctagattgccatgaagcaaataagacctattgttcaagtgaattagtaagtaattgtacccagaagaccagtactgactcctgttctgtaatacctaccaccccagtgccaaccaattctacagctaagcctacaactcggccttcctctcctacacctactccctcagttgtcacatcagcaggtgcaacamataccactgtgactccawcctcacagcytgagcggaagtccacctttgatgcagccagcttcattggakgaatcgtcyttgtcttgggtgtgcaggctgtaattttctttctctataaattctgcaaatctaaagaacgaaattaccatactctgtaaacagacccattaaattaatgtggactggcarwwaamwwrwrwaamwcaactgaaaccaaaatattccagaagtcccacatggaagacgctgttccaggacctttacatttccagaggatgcatacaggatattgtggagcactatccttgaagaaaagtcagttaaaccattttgctcaacaggaatatttaaaatattctgcatgaatccatatggctgtcgtcttttgtttaaaatggctgctgctgtgggattgtgtttttccctctgacatgccaaatgtaacttcctgtaagttatggaaagtgctgtcctgtgcaggcagcttctgactctgcagtctaaatgtagtccctagcaacctagagtctgttattttcgtcctaacttgagatgtcacttagtggccagaattgagaagagtgccaagtgaccacccgtcaagcagattgagggccatcgcttcagacatggattaaatttatttagttctaaactacccctagagtaaaattttgtgcttgataaattgtattttatatattaaaaataagatgccacacggcattccagacttagaataaggaaaaggatacatagacagtaatacgcagcaggtcttgttcatactcataaagtaccatattaagaaatagaacagtgccttaagacagaccaagatgtcagcagaacggaaaatgtgttcacactgggaggcaaagcttggtctgagaatgtaatgttggtgtgagcagcagaaacctgcttttagataacatactgttaatatttaattaaaaccattggtttttccagagctgagaactagaagctaaagaataattctaagctgaaaggcttccttctatcaaaccatctaacattttcttagggctattgaatagatataaaatcgawttctctttctctctgtacacagkgtatccaaatattataccttaaggattcctaccaggktttcctgagaagkagcttttatgtgaggcaagaaagaagtaggttgtaggkagaatcattttctagttctttaaatgagacaatcactttgttttctaatagttgtgatctgtgtagcttaaagaaaccttarggtttgcaagagattgctatagatttccagtgatgatgccctggctgaataggcttgkctctcctttagcctgtacctcttttcttcctccttggtttcagtccccatgtgctataatcatgcaaacttttatttcaatagcttctgtcaagcactaagtttgcagtcctggggtcgcttyccccttgcctctgacacactgcactagtctagagggtgtcattggaaataggctttggtttcctgcctcatgcaagtgtgtgcttgcttgkttgtttagarkagcacagtttagcacttggtttccagggttttataatagaaaaggcagtttgatgtgaattggktcataaagtgaaacgaatgacgtcwckakktccttgtcacttgctggtacagctgaagtttgttttacttgcacatttgtacatatatctaatgttttcaagtgccttacttgtttaaaytctggcttcagaggttttggsrsrargataggtttacctcacagttagtttccattataatmtaggttcctcacacaaatctatttcagtgccatggctgttagttttcagtgagtgctcaagttcttttgaaagtacacagaattcccattccttaaawwsgksvcarrwycagtttgtcayttgsywcsakgtgactcmwtgcaccatataaatgtcrgcgtaygkmrsargttwtakgagarkgtaacttaatktgaaggtcctgtaattttgagcaytgctctaacactgtaggaagttagtgacagtttgcaggtctbwacataagctctcgccacagagttcacagytgccctgaytctttcccatttttgtttagcaaggtagtatwttgagccatcagtgattttgggtytyttaatccagaaggtatgtmgaaacctttcagagttttsatctgatttgtcyggaggctctagttctgtcaaataccttatttcacctttcctatatttgctgyacaagcmgayactgctgtacttagaaatttntatttgagttcaykaaaaarctayaaamctaawrwrwahrmrwawmaaactgatttaaaataaatatgtttattmgtctcttgrwmaaaaaaaaaaaaaaa

SEQ ID NO: 3056 - DNA, 1819 bp, Rattus norvegicus
ggcacgagctcasamrwgrcaggaaaagccacccctgaggcttctgtctctacttcagaggggacagcacctgagcctgccaaggtgcccactccagagccttctggacaggtggcagcatcagagtccacggggcaagagcaggctccagagccacagaagcagcctcaggcacaggaccctgcagcccacgaagctcccgccacacctgccaccactaagcctgaagctccragcgaagatgtccccagtgccccactgcagctgaccttggaggatgtgagccacagctccttgactgtgagctgggagcctccggagracctgggaagctggggctccarkgctatgtgttggagctctgtcagakagggagcctcagaatgggtacctgtgaatccccggcccgtgatggtgacccagcagacagttcgaaacctggctctgggagacaagttcttcytgckcgtgactgcagtaaactccgcaggggcgggccctccagctgtgctagaccagcctgtccacatccaggagatcactgaagcccccaagatccgtgttccccgacaccttcgtcagacctatatccgccaggtgggagagtctgtcaacttgcaaatccccttccaggggaagcccaagccgcaggcctcttggacccacaatggccacgccctggacagccagagagttaatgtgcgcagtggggaccaggactccatcctcttcattcgctcagctcagcgctcagactcaggccgctatgagctcactgtccgtctggaaggcttggaagccaaggccgccattgacatcctggtgatcgagaagcccggcccccctagtagcatcaagctattggatgtctggggttgcaatgctgcccttgagtggatgccaccccaggacacgggaaacacagagctcctgggctacacagtgcagaaggcagacaaaaagacagggcaatggttcacagtgttggagcgataccaccccaccacctgcaccgtctcagacctcatcattggcaactcgtactcttttcgggtcttctcagaaaacctgtgtggcctcagtgacttagccaccaccaccaaggagctggctcacatccacaaggcagctatcactgccaaacctagagagtttactgagcgagacttctcagaaccgccctccttcacccagccggtggctgaccgtacctccactcctggctatagcacgcagcttttctgcagcgtccgagcgtcacctaagccyaagatcatytggatgaaaaacaagatgagtatccagggggaccccaagtatcgtgctgtctccgagcaaggggtctgcaccctggagatccggaagcccagcccttttgattctggggtctacacttgcaaggccatcaacgtgctaggagagcctgccgtggattgtcggttggaggttaaagcctctgccacacactgaagaccaacacaggcagagactgggacaaggagacagcttggtcacataccaggatcgcgacggacattctctgccaggtcctgcagacctgaggatcaggcgcccaggcatcyccaagaccaagataccacaagaacagctaatgggggtgaacctccagaacctgctggctctctccaccagaggttgggtccagacccaggagtgggcctggcgggccccaggtcatacctcctgggtatgagagggccccaagggtgcagagactggcacccctctgcagaattgtacactgtgtgagaayatcmaataaaggtgtgtggtgttawarmaaaaaaaaaaaaaaaaa

SEQ ID NO: 3057 - DNA, 3581 bp, Rattus norvegicus
gcccgcgccccccacgctggcccagagggctgcggccgcttcgccgctgaggatgtcccggaaggggccgcgagcggaggtgtgtgcggactgcagcgcccctgaccctggctgggcatctatcagcagaggtgtgctggtttgtgacgagtgctgcagtgtgcaccggagcctgggacgacacatctccattgtcaaacaccttcgccacagcgcctggcctcctacgctgctacagatggtgcacacgcttgccagcaacggggccaactctatctgggagcattccctgctggaccctgcacaagtgcaaagtggccggcgcaaagccaacccccaagacaaagtccaccccatcaagtcagagttcatcagggcaaagtaccagatgctggcgtttgtgcacaagcttccctgccgtgatgatgatggggtcaccgccaaagacctcagcaagcaactgcactcgagtgtgcgaacaggcaacctggagacctgtctgcgcctgctttccctgggtgcccaggccaacttcttccacccagaaaagggcactacacctctacacgtggctgccaaggcagggcagacactgcaggctgagctgctagtagtgtatggggctgacccaggctcccctgatgtcaatggccgcacacccattgactatgccaggcaggcggggcaccatgaactggcagaaaggctagttgagtgccagtatgagctcactgaccggttggccttctacctctgtggacggaagcctgatcacaagaatgggcattacatcataccacagatggctgacagatctcggcaaaagtgcatgtctcagagtttggatctgtctgaattggccaaagctgccaagaagaagctacaagcactcagcaaccggctctttgaggagctcgccatggatgtgtatgacgaagtggaccggagagaaaatgatgcagtgtggctagctacccagaatcatagcaccctggtgacagaacgcagtgctgtgcccttcctgccagtcaaccctgaatactcagccactcggaatcagggacgacagaaattggctcgttttaatgcccgagagtttgccaccttgatcatcgacatcctcagtgaggccaaacggaggcagcagggcaagagtctgagcagccccacagacaacctcgagctgtctgcacggaaccaaagtgacctggacgaccagcacgactacgatagtgtggcttctgacgaagacacagaccaggagcccttgcccagtgctggcgccacgcggaacaatcgtgccaggagcatggactcctcagmtctgtcggatggggctgtgacgctgcaggagtacctggagctgaagaaggctctggctacctccgaggccaaagtgcagcagctcatgaaagtcaacagcagtctgagtgacgagcttcggaagctgcagagggagatccacaaactgcaggcagagaacctgcagctccggcagccaccaggaccagtgcctgtaccctcacttcccagtgaacgggcagaacacacactcatgggccctggtggaagtacccatcgcagggaccgccaggccttctctatgtatgagccaggctccgccctgaagccctttggaggtgcacctggggatgagctcgccacacggctccagcctttccacagcacagagctggaagatgatgccatctattcagtacatgtccctgctggcctttaccggatccggaagggggtgtctgcctcttctgtgaccttcactccctcctccccactgctgtcaagctcccaagaaggaagtcgccatgcgagcaagctttcacgccacggcagtggcgcagagagtgactatgagaacacacagagtggagagcctctgctgggacttgaagggaagcgattcctagagctgagcaaggaggatgagctgcacgctgagctggagagcttagatggagacccagaccccgggctccccagcacagaagatgtcatcctaaagacagagcaggtcaccaagaacattcaggagctattgcgggcagcccaggagttcaaacatgacagctttgtgccctgttcagaaaagatccatttggctgtgactgagatggcctctctcttcccaaagaggccagccctggagcctgtgcgcagttcactgcggctgctcaacgccagcgcctaccggctgcagagtgaatgccggaagacagtgcctccagaacctggcgcccctgtggacttccagctactgactcagcaggtgatccagtgcgcctatgacatcgccaaggctgccaagcagctggtcaccatcaccacccgagagaagaaacagtgaccactttccctgcccttacccacaccctgggacctcactggccatgggagctgggccactccagacactaacccacccccaacagagccactggcacaagtgcccttagtgccaccattctcctctggcatccaggtgccctggtgtccacacccccttaagccccaaggatgggaatgtgaggtgacaggaccatctgtcccccacattccacgcccctccctctgtacatagcatccctgccctgctgatacgcaggagcctcaaggagtccctcccagctcttcacctgccttccagggccccctcagcaaagggtgggacagggacactccaagtggggcagccccgcctactgcaccctatccccatgagccagttcagccctggggggtcgagcagaggcaccccctcctttgtgcattatctmtgggtgtytytgccmcgtagscagcagcccccccgctgctctttcatgacaaatggcccctgccagagcacaggccccaacttgtgtgccagggtccccagcagcaaacactggaacgtctttctctcccctacccctwaattttaactttgtggtaactgagtgtccctgcgttctwacaactgagtgtgtgagcggcagtgccgtkccagagacctggtccacctggagctctgaggggcaggggaaccagagtagtgggacmagcattgraagtcagmttccctctacccaacctgggacggggactgtcagggtcaccagctgtggtccagttgctacccctacttgtatccctatcctataawcttaaaaggwaaammamwwmhmwmmatctctccccatccmctgtgggaagtgtgytgmccaggcagrggacagagcacctgcgcctgggrmtggctcsccgggtccccaaytcagmtggtgrytgtggaactgagcccctctccmtagcctctgcaaggccagcacccacatcactacytgtacctacagtgacccacccagaaggcctggggatctggctgcagctgaaaaagctggcaaggcactgacagcacccaccagytattcccccaaccaccttcmtagcctgtggtggtgggtagctgtcagaaggtgtgtcatgtacatttgtatcaaaaataaataagtgrccatgwrmmamwwmwrawrwmwararrwmararrwrrrrctcagcccggtaaaaaaaaaaaaaaaaa

SEQ ID NO: 3058 - DNA, 2600 bp, Rattus norvegicus
  misc_feature (1714)..(1714): n is a, c, g, or t
gcgatctactctcagtcttcctgagtcacaggctaccaaggacaagtagctctgtctgccctttgttgaggggagctgtgacactggtttgctgctgctgctgctgctgctgctgcatcttctttgggaaatcagactcaataaactgccatccatctgaggttctcaactcagagccatctacctggagcatgggactttcaaatgtccagctctggacaatactgctgtgggcattggcatgggtgcagagtacaagatctgcgtgcccgtcctgtggggccccaactctgacaccccaaggagaacgcgctctggtcctagagctagccaagcagcaaatcctggagggrctgcacctaaccagccgtcccagaataactcgtcctctgccccaggcagcactgaccagagccctccggagactgcagcccaggagcatggtccctggcaaccgagagaaagtcatcagctttgctaccagcatagacaaatccacttcaacctaccgctccgtgctcaccttccaactgtcccctctttggtcccaccacctgtaccatgcccgcctctggctgcacgtgccyccctcttttccggccactctgtatctgaggatcttcggttgcggtaccacgaggtgcagaggatcccgcacgttcctagctgakyaccaaaccacttcctccggctggcacgccctgactctgccctctagcggcttgcggagtgaggaatctggagtcacaaaactccaactggaattcagacctctggaccttaacagcactactgccagactgccacggctgctgttggacacagcgggacagcagcgtcccttcttggaacttaagatccgagctaatgaacccggagcaggccgggccaggaggaggactcccacctgtgagtctgagacccccttatgttgtagacgagaccactatgtcgatttccaggagctggggtggagagactggatcctgcagccggagggataccagctgaattactgcagtgggcagtgcccgccccacctggctggcagccctggcattgctgcttccttccattctgctgtctttagcctcctcaaagccaacaacccttggcctgcgggttcttcctgctgtgtccccaccgcgcgaaggcctctctccctcctctaccttgaccataatggcaatgtggtcaagaccgatgtgccagacatggttgtagaggcctgtggctgcagctagcaagaggacctgaaggttttgagtgaagttcaaggttcaagttgggggttcccaagcaaaagggtcctgtgtctggaagcacaagttccggatccatactgacacccaacaagctgtgtagcagtatgcctgagtttgacccctgtggaactcaaatgggcatttttcttgtcccagattctggcctatttcaggctgtttcaaatgtggacagatgggtaaaacgtttcctttcgagaaactgcctggccagcaccatttcctacatcaagccctgttccaggacagcaggggatgccgtgggagggaaggaagaatgcagggaaaactacttagtctctcccgaaaaagaattcctcaagtaataaaggaggaattagaaggttaggcagattggggaaaggtatacaggctaagaacagggactgttgcctgctttgagcaaggtcaagaggaatatgagcaggcantgaggtgggagagcagttaggaggccctggaattgacagtcagtaaaaaggggtgctgaacccataagttctctagcttccccttggggagaggacccatgtaaatgacatacgtttatattttcttaataaaaaggagaaagaaaagcaacagtgtgtaaggggttgttaaaatgagccagaaacaaagtgtggtctggggacctctgtgcttcggggccttttcaaggggttttcaaactatttgcataatcacatagagaagttatttgtcatttactatcattattttttcattgttctgtgggaacagggtttacacttataactacagccctcaggaggctgagacaggaggatcgccgtgagttcaagaccagccttcatagtgaatgctgggctagcctgagctatggagtgagatcctgtctcaaagcaaaagaaacaaacaaaacaacaaagactaagtagtgagtctttccagagtgtattatatgatacagccgatgacattgtggcttatatattctcctttctctcctttaaacaattttatttatttttattgtatgtgtatgatgagtcttaggcctgcaccggcttgcagtgcccatagaggtcagaagaggacgctggatccttggaactaaagttagagcagtgtgagctgcctgtgtctgttaacagaactcaggtccacagtaagagaaacaaacaattaaaggctgagctacctctccacctgagacatgtgcacacacagtcacacattgttttgttttgtttggaaacagcccacgctatcttggaactctcaatcctcctgcctcagaccctcctgccctggaattaaaggcataaaccaccaaaaaaaaaaaaaaaaaaa

SEQ ID NO: 3059 - DNA, 1974 bp, Rattus norvegicus
gggctagaggcgcgggttgaaaagtctcgttccamgttwggagagagggagagagaggagagcgtctcagacctcgctacccgcaagcggggaggaggcagaagagaagatcgcggcgtctggggagcacccagacagccagaccgagctcaggctttccgagctaggagtgcgtgacgtgcctgggagaggcaggagcgcctgcgatcgggctgctcttgactagcgagagaagtccgaggcggcaaaggggggcgaacgacccgacgcaagatggcgagtaaagagatgtttgaagatactgtggaggagcgtgtcatcaacgaagaatataaaatctggaagaagaatacaccgtttctgtatgacctggktatgacccatgctcttcagtggsccagtcttaccgttcagtggcttcctgaagtgactaaaccagaaggaaaggattatgcccttcattggctagtgctgggtacccatacatctgatgagcagaatcatstggtggttgctcgagttcatattcccaatgatgatgcacagtttgatgcttyccattgtgacagtgacaagggagaatttggtggctttggttctgtaacaggaaaaattgratgtgaaattaaaattaatcatgaaggagaagtaaatcgcgctcgttatatgccacmgaacccacacatcattgccacaaaaacaccatckkcygatstttygrwtttygrcwmkasaaaacaccctgcaaaaccagatccaagtggagagtgtaatcctgatcttagattaagaggtcaccaaaaggaaggctatggtctctcctggaattctaatttgagtggacatctcctgagtgcatctgatgaccatactgtctgcctctgggatataaatgcaggaccaaaggaaggcaaaattgtggatgctaaagcaatctttactggccrctcagctgttgtagaggatgtggcctggcatctgctgcatgagtccttgtttggwtctgttgctgatgatcagaaacttatgatatgggacaccagatccaatactacttctaagcccagccatttggtggatgcacacactgcggaggtcaactgcctctcattcaatccctacagcgagtttattctggcaactggctckgcagakaagactgtagcttyatgggacctscgyratctgaaactaaarctccayaccttkgaatcccayaaggwtgarayttttcaggtccaytgktctccacatmaysarrctattctggcttcaagtggtrctgatcgccgcckgratgtgtggratttaagtaaaatkggrgargaacaatcagcaraagatgcagaggatgggcytccaragctcctgtytattcayggaggacacactgccragatttctgrmttcagtyggmacsmsrrtgaaccttgggtcatttkcyctgtgtctgaagatarmayyvkgcagabrtggcraatggctgaaaatatttacaatgatraagagtcagatktcaygacakcggaactggagggscaaggatcttaaacccaaagtatgagttgtytctattraatgtattkyywywcgawtgcttgwttwrwmaarmrmmaaaaargcattgtatagtagraaatgtaagtgggatggcttctggcattctttaccctctgattsyagcactttcaagtgagctgttgcgtactgtmtcatattgtagctattaggggaacaaaaaggaatgttgcttamgaatggacmtcattgttttaaacacacattgytgggtattgcctttgattcaactgtcattttctcaaacttttaagtgcttgctcaagttcccaratatgygaggakractytwacacttktyccttscaacmcttcktkattggmwwwgcagraataaagtyttwaadwwaavaaraaaaaaaaaaaaaaaaaacacattcggccgcaagtttgttc

SEQ ID NO: 3060 - DNA, 1712 bp, Rattus norvegicus
  misc_feature (16)..(16): n is a, c, g, or t
tttaattgaggccaantgtttcccaagcacattgtatttacttaaattgctacagtaattcaaaggacagccctgtctggacacagagttactgtggatttttaagaaactccgttaaagaatttaggcacttctgattcagttaaaggattgccaattcatcaatccytgaaacyraagcaatctcaacaggagaagaaatgggctktttamgtccaatatatgtcctcttcttctgttttgkagttagagtatacggccaatatgaagcttaccagtgggatgaagattatgagcaagagccaagtgaggattatgagccagaattccagtttcaccaaaatatcgaatatggagctcccttttatcagaatattttaggttgtgctaaggaatgcttctgtccaactaactttccaacatcaatgtactgtgacaaccgcaaactcaagactatyccagatattccaatgcacattcagcaactcaaccttcagttcaatgatattgaggctgtgactgcagattcattcatcaatgcaactcatcttaaagaaattaaccttagccacaacaaaattaaatctcaaaagattgattatggtgtgtttgctaaactttcaaatctacagcaacttcatctagatcacaataacttagaagaatttccatttcctcttcctaaatctctggaaagactccttcttggttataatgaaatctctacacttccaacacatgccatggatgggctggtaaatgtcactatgcttgacctctgctataaccatctctctgactccacgttaaaaggaaagattctttccaaactggaaaagctcatgcagcttaacctgtgcaataacaggttagagtcaatgccccctgggttgccgttatcacttatgtatctatctttagaaaataattcaatttcatctataccagagsaykastttcaraawcttccaraacttcatgctctaagaatatcacacaacaaacttgaagacattccatatgacatctttaatctttccaatcttatagaactcaatgttggacataacaaactgaagcaagcattctacattccaaggaatttggaacatctatacctacaaaataatgaaatacaaagcatcaatgtgacaatgatgtgtcyttctcttgatccattacaccatcaccatttaacataccttcgtgtggaccaaaataagctgaaggaaccawtaagttcatatatcttcttctgcttccctcggatacacagtatttattatggtgagcagaggagcactaatggtgaaacaatacaactgaagacccaagttttcaggcgctatcaagatgaggaagaggaagaggaagacgacagtcaggaccacactcttgagggtcaagaagaaacagaagagcactttaattctcattactatgaaatgcaagcatggcaaaatactatataggtacatatttatgactccataaagccttamtaattacaaatgywagcgtatacctgctcataataatatatctagaagtatgtgctagtataaagacccgaattgcatttgagatgttagtgagaatggttttacttcataggcgtagtgcttactagaaacgatgcaaaccttaagaaatataaagtagaatggcaagtgggaataaacaaaactaagctcaaaaaaaaaaaaaaaaaa

SEQ ID NO: 3061 - DNA, 927 bp, Rattus norvegicus
cacgagggcggtgctgaggatctgagccacgggtagctagacgcccggactgtccagtgagcgagcgagccagcgagccagcgagccagaggcaggaacccgcagccactgcagccccggagccacagccgcagccgccgtccgcggagcccagcccaactggmcatggcgctgtcgatgcccytgaacggactgaaggaggaggacaaagagcccctcatcgagctcttcgtcaaggccggcagtgatggtgagagcataggaaactgccccttttcacagaggctcttcatgatyytktggctcaaaggagtcgtgttcagtgtcaccaccgttgacctgaaaaggaagcctgcasatctgcagaacttggctcctgggacccacccaccatttataaccttcaacagcgaagtcaaaacggatgtaaataagattgaggaatttcttgaagmagtcttgtgcccacccaarwamwwaaarmwmwmaccaaaacacccagagtcaaacactgctgggatggacatctttgccaagttctctgcgtacatcaagaactcaagaccagaggctaatgaagcactggagagggggctcttgaaaacgctgcagaagctggatgagtacctgaattctcccctccctggcgaaatcgatgagaacagcatggaggacatcaaatcgtccacacgcaggtttctggacggcgacgagatgacattagcagactgcaacctgctgcccaagcttcacattgtcaaggtggtggccaaaaaataccgcaactttgacattcccaaaggcatgacgggcatctggagatacctgacaaacgcctacagtagggatgagttcaccaacacctgtcccagcgacaaggaggtggaaatcgcgtacagtgacgtcgccaagagacttaccaagtag

SEQ ID NO: 3062 - DNA, 3225 bp, Rattus norvegicus
cggccgcgggccgcggggcaacaggcggggaacgggtgcgagccgggaccgggaggggcggacgcgcaaaggggccgcggggcggccgggcggggcgcgggccggcggtttgggagggcgccccgcgtccgagaggtgagccgggccctgacgctgcgcgggttccgcgtcgcccccgccgcgccatggcggagaccaaaatcatytaccacatggacgasgaggagacgccgtacctggtcaagctgcccgtagctcccgagcgcgtcacgytggcagacttcaagaacgtgctcagcaaccgsccggtgcacgcmtacaaattcttcttcaagtctatggrccaggacttcggggtggtgaaggaggagatcttcgaygacaatgccaagttgccctgcttcaatggccgtgtggtttcctggctggtcctggctgagggcgctcactcggatgcagggtcccagggcactgacagccacacggacctgcccccaccccttgagaggacaggcggcattggggactccaggcccccctccttccatccaaatgttgccagtagccgagatggaatggacaatgagacaggcacagagtcaatggtcagtcaccggcgggagcgagcccgacgtcgaaaccgtgatgaggctgcccggaccaatgggcacccaagaggggmcysgyggcgggagctgggactacctccagacagtgcgtccactgtactgagcagtgagcttgaatctagcagctttattgactcagatgaggaggacaacacgagccggctgagcagctctacagagcagagtacctcctctcggctaattcgtaagcacaaatgccgtcgtcggaagcagcgcttgaggcagacagaccgggcatcctccttcagcagcatcaccgactctaccatgtccctgaacatcatcactgtcacgctcaacatggagaggcaccacttcctgggcatcagcatcgtgggccagagcaacgaccggggtgatggcggcatctacattggatccatcatgaagggcggggctgtggctgctgatggccgcattgagccaggcgacatgttgctgcaggtgaatgatgtcaactttgagaacatgagcaacgatgatgccgtgcgggtgcttcgggagatcgtatcccagacggggcccatcagtctcacagtggccaagtgctgggacccaacccctcggagctacttcaccatcccaagggctgacccagtgcgacccatcgacccggctgcctggctgtcccacacagcagcactgaccggtgctctgccccgctatggtacgagtccctgctccagcgccatcacacgcaccagctcttcctcactaaccagctcagtgcctggcgccccacagcttgaggaggcaccactgactgtgaagagtgacatgagtgccattgtccgcgtcatgcagttgccagactcgggactggagatccgggaccgcatgtggcttaagatcaccattgccaatgctgtcattggggcggatgtggtggactggctgtacacacacgtggagggcttcaaggagcgaagggaggcgaggaagtatgccagcagcatgctgaagcatggtttcctgcggcacacggtgaacaagatcactttctctgagcagtgctactatgtctttggtgacctgtgcagcaacctcgcatccctgaacctcaacagtggctccagtggagcctcagatcaggacacactggccccactgccccacccatctgtaccctggcccttgggtcaaggctatccctaccagtacccaggacccccgccctgcttcccacctgcttaccaggaccctggcttcagctatggcagtggcagtgctgggagtcagcagagtgaagggagcaagagcagtgggtccacamggagcagccatcgsaccccaggccgagaggagcgccgggcaactggagctgggggtagtggcagtgaatcagaccacacagtaccaagtgggtctggtagcactggctggtgggagcggcctgtcagccagcttagccgtggcagtagccctcgaagtcaggcttcagctgttgccccagggctccctccactgcacccccttaccaaggcctatgcagtagtgggtgggccacctggagggccacctgtccgggagctggctgctgttcctccagaacttacaggtagccgccagtccttccaaaaggccatgggaaacccctgtgagttctttgtggacatcatgtgatgatcaaccagtgtcttcagtgctgcctgtggcgagagtctgtgttcctgctgtgccaggagctctatgggcttgccttagtggtggccggccaggataggtcagtcgtagggtctgggccagggcagagggagcaggcaacagaagaagggctgagggcagccatacgaccaagatatcagcttgatattttgtctgctcttggggctgctggtggtggtgcagctcaagtatctgtagtcttgtaaggagacatctctgtctttaagtcctcagcacagatctcagggaccacctcctggttccttttttggaagtgacctccatttaggacaagaaaggctctcttgggctctgtcacccctttccccaaagtctcccagaactgcacaggggcacaggctgactgtcactaagtttatggscctcacctgtcagsccaaggtggggttcttraggggttagacagagccctcaaacctctctggctgcccaggtggggtctaacttacttatttattgctagcttgcctgctccaagggcggcagctggtcacccagtggggcagtttgcacgctcmwttcskcacskgcaactcggcacatgacagcacagtttgtgttgaaggtatgtggaggatggctmgtagggamgacaggagagagvcctgscactwatctactgtcttagtctcaatggcgggtgrgmrwbaacasaagagctgaagatgtggggtcctgtcctgtcactgttctcctggtggctgcccatcagcatgtsccactgccatctcggcacagcagccccacacatmtacacgagacactgtgtcaagaagtctgagcgactgggtagttcacatagagctgcttctgtgtaaatgctgcttctgtstaaatgctattwtaaacactaaaaaaarcgtbtrwkykdhmrmaaaaaaaaaaaaaa

SEQ ID NO: 3063 - DNA, 9627 bp, Rattus norvegicus
atgcggcgaggagggctgctggaggtcgcgctggctttcgccctgctcctcgagtcctacacgagccatggggcggatgccaatctggaggctgggagcctaaaggagaccagagccaatcgcgccaagagacgaggcggcggaggacacgatgctctgaaaggacccaatgtctgtggatctcgttataacgcatactgttgtcccggatggaaaaccttacctggtggaaatcagtgtattgttcccatttgccggcattcctgtggggacggattctgctcaagaccaaacatgtgcacttgcccgtctggtcagatatcgccttcctgtggctccagatccatacaacactgtagcatccgctgtatgaatgggggcagctgcagcgatgaccactgtctgtgccagaaggggtacattggcactcactgcggacaacctgtctgtgaaagtggctgtctcaatggagggaggtgcgtggccccaaatcggtgtgcatgcacatacggctttacgggaccccagtgtgaaagagattacagaacaggcccgtgttttactgtggtaagcaaccagatgtgccagggacagctcagcgggattgtctgcaccaaaacactctgctgtgccaccgtgggccgagcctggggccacccctgcgagatgtgtcctgcccagcctcacccctgccgccgcggcttcattcccaacatccgcactggagcttgtcaagatgtggatgaatgtcaggctatcccagggctgtgtcaaggaggaaattgcattaataccgttggatcttttgagtgcaaatgccccgctggacacaaatttaatgaagtgtcccaaaaatgtgaagatatcgatgagtgcagcaccatccctggtgtgtgcgatggcggggagtgtaccaacacggtcagcagttatttctgcaaatgtccccctggcttttacacctctcccgatggcaccagatgcgtagatgttcgccctggttactgctacacagctctgacaaatgggcgctgctctaaccagctgccacagtccataaccaaaatgcagtgctgttgtgatgttggccggtgctggtctccaggggttactgtcgctcctgagatgtgtcccatcaggtcaactgaggacttcaacaagctgtgctccgtccctctggtaatccccgggagaccagactatcctcccccacccctcggcccccttcctccggttcagcctgttcctgggtttccttccgggcctgtgataccggtcccccggccaccgccagaatacccgtatccatctccatcacgggaaccaccaaaggtgctgcctttcaacgttactgactactgtcaattggtccgctatctctgtcaaaatgggcgctgcattccaactcccggtagctaccgctgtgagtgcaacaagggcttccagctggatatccgtggcgagtgcatcgacgttgatgagtgtgagaaaaacccatgcaccggtggagaatgtatcaacaaccagggctcatatacctgtcactgccgagctggctaccagagcacactcaccaggactgagtgcagagacatagatgagtgtctgcagaacggccggatctgtaacaacgggcgctgcatcaacacagatggcagcttccactgcgtgtgcaatgcgggctttcacgtcacgagggacggaaagaactgtgaagacatggatgagtgcagcatcaggaacatgtgcctgaatgggatgtgcatcaacgaagatgggagtttcaagtgtatttgcaaacctgggttccaactggcgtcagatggccgctactgcaaagatatcaatgagtgtgagactcctggaatctgcatgaacggacgatgcgtgaacactgatggctcctacagatgcgaatgctttcccggattggctgtgggcctagatggacgcgtgtgtgttgacacacacatgcggagcacatgctacggaggctacaggagaggccagtgtgtgaagccgttgtttggtgctgttaccaaatcggaatgctgttgtgccagcaccgagtatgcctttggggaagcctgccagccgtgtcctgcacagaattcagcggaatatcaggcactttgcagcagtggacccggaatgacatcagcaggctctgatataaatgaatgtgcattagatcctgacatttgcccaaatggaatttgtgaaaatctccgtgggacctacaaatgtatatgcaactcgggatacgaagtagacataactgggaaaaactgtgtcgatattaatgagtgtgtgctgaacagtctactttgtgacaatggacaatgtcgaaacacacctggaagttttgtctgtacctgccccaagggatttgtgtacaaacctgacttaaagacctgtgaagacattgatgaatgtgaatcgagtccttgcattaatggagtctgcaagaacagccctgggtctttcatttgcgaatgctctcctgaaagtactctggatccaacaaaaaccatctgcatagaaaccatcaagggcacttgctggcagactgtcattgacgggcgatgtgagatcaatatcaatggagccaccttgaagtccgagtgctgctcctcccttggcgctgcctgggggagcccgtgcactatatgtcaagttgatcccatatgtggtaaagggtactcgagaattaaaggcacgcaatgtgaagatatcaatgagtgtgaagtattcccgggagtatgcaagaatggcctgtgtgttaactccaggggttccttcaagtgcgagtgtcccagtggaatgactttggatgctacaggaagaatctgtcttgatatccgcctggagacctgcttcctcaagtacgacgacgaggagtgcacgctgcccattgctggccgccaccgaatggatgcctgctgcagctccgttggggcagcctggggaacagaagagtgtgaggagtgtccattgagaaacagccgggagtatgaggaactctgtccccgaggacccgggtttgccacgaaagacataacaaatgggaaacctttcttcaaagacattaatgagtgcaagatgatacccagcctctgtacccacggcaagtgtaggaacaccattggcagcttcaagtgcaggtgtgacagtggctttgctttggactctgaagagaggaactgcacagacattgacgagtgccgcatatctcctgacctctgtggccgaggccagtgtgtgaacaccccgggggatttcgaatgcaagtgtgacgaaggctatgaaagtggcttcatgatgatgaagaactgtatggatattgatgaatgccagagagatcctctcctctgtcgaggaggcatctgccacaacacagagggaagttatcgctgtgaatgtccttctggccaccaactgtctccmaacatctctgcgtgcattgacatcaacgagtgtgaactgagygcsaacctctgtcccmrcgggcgttgtgtgaacctcattgggaagtacsagtgtgcctgcaacccgggctatcaccccactcaygataggcttttctgtgtcgacattgatgartgcagcataatgaatggtggttgtgagaccttctgcacaaactctgacgggagctatgaatgtagctgtcagccaggcttcgcgctgatgccagaccagcgatcgtgcacagacattgatgagtgtgaagataaccccaatatctgtgawggtggccagtgcacaaacattcctggagagtacaggtgcttgtgctatgatgggttcatggcgtctgaagacatgaagacttgtgttgatgtcaatgaatgtgacctgaatcccaacatctgcctcagtgggacctgcgagaacactaaaggctccttcatctgccactgtgatatgggctactcagggaaaaaarraaaaamwrrctgcacagatatcaatgaatgtgagattggagcacacaactgtggcagacatgctgtgtgcacaaatacagcagggagcttcaagtgcagctgcagtcctggctggattggagatggcattaagtgcacagatctggatgaatgctctaatggaacccacatgtgcagccaacacgcagactgcaagaacaccatggggtcatatcgctgtctctgtaaggatggctacacaggggatggcttcacctgcacagaccttgacgagtgctctgagaacctgaacctctctggcaatggccagtgcctcaatgcccctgcggggtaccgctgtgaatgcgacatgggcttcgtgcccagtgctgatgggaaggcctgtgaagatatcaacgagtgctcccttccaaacatctgtgtctttggaacttgccacaatctcccgggcctcttccgctgcgagtgtgagattggctacgagctggaccgaagtggtggaaactgcacagatgttaatgagtgtctggatcctaccacctgcatcagtgggaactgtgtcaacactccaggcagttacacatgcgactgtccacctgattttgagctgaatccaactcgagtgggctgtgtcgatactcgctctggaaactgctatctggatatccgaccccggggagacaatggagatacggcctgcagaaatgaaattggagttggtgtttctaaggcttcctgctgttgctctctgggtaaagcttggggaaccccatgtgagctgtgtcctcctgtgaacacatccgagtataaaattctctgccccggaggagaaggttttcgtccaaatcccatcaccgttatattggaagacatcgatgagtgccaggagctcccagggctgtgccaaggggggaagtgcatcaacacctttggcagcttccagtgtcgctgtccaacgggttactacctgaatgaagacacacgggtgtgtgatgatgtgaacgaatgtgagactcccggaatctgtggtccggggacatgttacaacaccgttggcaactatacctgcatttgtcctccagactacatgcaagtgaatggggggaataattgcatggacatgagaagaagcctgtgctacagaaactatcatgctgacaaccagacctgcgatggagaactgctcttcaacatgaccaagaagatgtgttgctgctcctacaacatcggccgtgcctggaataagccctgtgaacagtgtcccatcccaagcacagatgaatttgctaccctctgtggaagccagaggccaggcttcgtgattgacatttacacaggtttacctgtggatattgatgaatgccgggagatcccaggggtttgtgaaaatggagtgtgcatcaacatggttggcagcttccggtgtgagtgccctgtgggattcttctacaacgacaagttgctggtttgtgaagatatcgatgagtgtcagaatggccccgtgtgccagcgcaatgcggaatgcatcaacaccgcaggcagctaccgctgtgactgcaaacccggctaccgcctcacctccacaggtcaatgcaacgatcgaaacgagtgccaagaaatcccgaacatatgcagtcatggccaggtcatcgacactgtgggaagcttctactgcctctgtcacacaggcttcaaaacaaacryagatcagaccatgtgcttrgacataaatgagtgtgagagagacgcctgtgggaatgggacttgcagaaacacaattggttccttcaactgccgctgcaaccatggcttcatactctctcacaacaatgactgcatagacgttgatgaatgtgcaactggaaacgggaacctttgtagaaatggccagtgcgtcaacacggtggggtcctttcagtgcaggtgcaatgaaggctacgaggtggctccagacggcaggacctgtgtggatatcaatgaatgtgttctggatcctgggaaatgtgcacctggaacctgtcagaacttggacggctcctacagatgcatttgcccacctgggtacagtctacagaatgacaaatgtgaagatattgatgagtgtgtcgaagagccagaaatctgtgctttggggacctgcagcaacactgaaggcagcttcaaatgtctgtgtccaraarrrwwmwmmmwrwcctctactggaagaaggtgccaagacttgagaatgagctactgctacgcgaagtttgaaggtgggaagtgttcgtcgcccaaatccaggaatcattccaagcaggaatgctgctgcgctttgaagggagaaggctggggagacccttgtgagttgtgtcccactgagccagatgaggctttccgccagatatgcccctttggaagtgggatcatcgtgggccctgatgactcggcagttgatatggatgaatgcaaagaacctgatgtctgtaaacatgggcagtgcatcaacacagacggctcctatcgctgcgagtgtccctttggttatattctagaagggaatgagtgtgtggataccgatgaatgctccgtgggcaatccttgtggagatgggacctgcaagaatgtgattggaggttttgaatgtacctgtgaggagggattcgagcctggtccaatgatgacatgtgaagatataaatgaatgtgcccagaatcccctactctgcgccttccgctgtgtaaatacctatgggtcctatgaatgcaagtgccctgttggatatgttctgcgagaagacaggaggatgtgtaaagatgaggatgagtgtgcagaggggaagcacgactgtactgaaaagcaaatggagtgcaagaacctcatcggtacctacatgtgcatctgcggcccagggtaccagcgaagacctgatggagagggctgcatagatgagaatgaatgtcagaccaagcctgggatctgtgagaacgggcgttgcctcaacaccctggggagctacacctgtgagtgtaatgatggcttcacagccagccccactcaggatgagtgcttggacaaccgggaagggtactgcttttctgaggtactgcagaacatgtgccagattggatcaagcaacagaaaccccgtcaccaagtccgagtgctgctgtgatggagggagaggctggggaccccactgtgagatctgccccttcgagggcacagtggcttacaagaaactgtgtccccacggccgaggattcatgaccaacggagcagatattgatgagtgcaaggtaatccacgatgwttgccgaaacggggagtgtgtcaatgayagaggatcatatcactgcatctgtaaaactggctacactccggmcataacagggaccgcctgtrtagatctaaatgagtgcamccaggctcccaaaccctgmaatttcatatgcaaaaacacagaagggmrykassagtgttcctgccccaagggctatattctgcaagaggayggmaggagctgcaaagatcttgacgagtgtgcaaccaagcagcataactgtcagttcctgtgtgttaacaccatcggcggcttcacatgcaaatgccctcctgggttcacccagcaccacactgcctgcattgataacaatgaatgcacttctsagatcaacctgtgtgggtccaagggcgtttgccagaatacaccaggaagcttcacctgtgaatgccagcggggattctccctcgatcagagtggtgccagctgtgaagatgtggacgagtgtgagggtaaccaccgctgccaacatggctgccagaacatcattggaggctataggtgcagctgcccccakggctacctccagcactaccagtggaaccagtgtgtagacgaaaacgagtgcctgagtgcacatgtctgtgggggagcctcctgccacaacaccctggggagttacaagtgcatgtgtcctgctggcttccartacgaacagttcagtggaggctgccaagatatcaacgagtgtggctcatcccaggccccctgcagttatggttgctctaatactgagggtggctacctatgtggctgtcctccaggatacctccggataggccaagggcattgtgtttctggaatgggcatgggccgaggtggcccagagccacctgccagtggcgagatggatgacaactcactgtccccwkwggcykgmkrtgarwkwaagmtcmwkggytamsyaaaamrarrmarraaamggagaagcacgaaygrmacagatgcctctgacatccaggatgggtctgaratggaagccaacgtgagcctcgcgagctgggatgtggagaagccagctagctttgctttcaatatttcccatatcaataacaaagtccgaatcctrgagctcctrccggcccttacaactctgatgaaycacaacaaatacttgatcgagtctggaaatgaakatggcttctttaaaatcaaccagaaagaaggggtcagctacctccacttcacgaagaasaagccagtggctggaacctactccttacaaatcagcagtactccactttataaaaagaaagaacttaaccagttagaagacagatatgacawagactacctcagcggtgaactgggcgataacctgaagatgaaaattcagatcttgctgcattaacttaccatccagagaccaaataattaaaaaaraaaaarmaamwttaggtaggtaggattakattttccccaakccagaacctgcayggyacraksvkkcacygagkcsatmwrwvyhmatsmkcaccattcttggatggcarcaccaaggtacagcgacgatcctagttcaaacaaaccactctctcaagcttctcgtgagtagctcagctaccctgtcatgggtattgattcytgagaactgggacatgagtatcggcggaagtkggccgtgcgtgccgaccgccatctttccagccgccccacagaagcatgtttccatctgayggaccgctccgtgggtcttcaaatttcgaaactttgcykmkscgagtgcargtastasaggtckttgctgtctgwttggtgctagtaaattctcaaaatagatttatcgatgcactgtaataaggacacaaggtaggaaccaaaatgctaagtactcrgywcrarkgcttcattcatttcaatcaaccaaagttagttcagtagcttatctcacttatgagtatggtgcagtacatgtaaattaagtgtgtgtacactgtaacgtgctatttttatcattgaaacatttataaactacaataataaagyyckkmaygwgrrrrwwwrwaawrrwrmttattaagaccaaagacttgttaaacatctacaccaagtggtagtggattctgagactggcccgcgtgtgcactgaggttggggaggacaaggaaacgscctcagccaccagaggatcaccagcscagcctccatcacgccgcctgtgcaatatgccaaaaccgctctcsgtcattchtsccaascagggsttaatgtcatgatgtcacawyaaagtgatcytcccctccctmcctgttttagtytacaccttggtwttgtgttcttgtgtgggttgaggctggaraggcctttctggaggtgaaataaagtctcctgggtttaamgtaaaaaaaawaaaaaaaaa
